United States Patent Application Publication US 2011/0183924 A1 - sequence listing, part 144

SEQ ID NO: 376770 - DNA, 3977 bp, Homo sapiens
agccggaagtcgcgagatctgaatgagtcaaagccggcggcctcggctcctcagctccacctgacagtaggccgctgatcggccgcgggtcttgtcgaccgctaggccaccaggttcatgtggaggctcccaggcgcccgcgccgcgcttcgggtgatccggacggcggtggagaagctgagccgggctgaagcggggagccagacagcggcgggagcgatggagcgcgctgtagtgcgctgcgtaccttcggaacccaagctgagcctgtcattcgctttggctgatggtagccacaagaacatgcagcgcgaccagagcgagccgctgggtcgagtcctcagccgcatcgctaccaatgccctaaagggtcacgctaaggcggccgccgccaagaagagcaggaagagccggccgaatgctagcggcggtgcggcctgttcagggccggggcctgagccggctgtgttctgcgagcccgtggtgaagctgtactaccgggaagaggcagtggctgaggacgtgctcaacgtggatgcctggcaagacggcgcggtgctgcagatcggcgatgttaagtacaaggtggagcgcaacccgcccgccttcaccgaactgcagttgccgcgctacatcatggccgggttccctgtgtgccccaaactcagcctcgaatttggggatcccgccagctcccttttccgctggtataaggaagccaagcccggagcggcggagcccgaggtcggtgtcccctcgtcattgtctccctcctcaccttcttcttcttggactgagactgatgtggaggagcgtgtctacaccccgtccaatgccgacatcgggctaaggctcaagcttcactgcaccccaggcgatgggcagcgctttgggcacagccgggagttggaaagtgtgtgtgtggtagaggctgggcctggcacctgcacttttgaccaccggcatctctacacgaagaaggtgactgaggacgctctcatccgcactgtctcttacaacatcctggcagacacgtacgcgcagactgagttctcgcgaacggttctgtacccatactgtgccccctacgccctggagctcgactaccgccagaaccttatccagaaggaactcaccggctacaacgccgatgtcatctgtttgcaggaggttgaccgcgcagtgttttctgacagcttggtacccgccctagaggccttcgggctcgagggggtgtttcgaatcaagcagcacgaaggcctggccactttctaccgaaagtctaagttcagccttcttagccagcatgacatttcattctacgaagccctcgagtccgacccacttcacaaagaactgctggagaaactagttttgtacccatcagcgcaggagaaggtgctccagagatcttctgttcttcaggtttcagttcttcagtctacaaaggactcttctaaaaggatatgtgttgctaatacccatctttactggcatcctaaaggtgggtatattcgcctcattcaaatggcagtagccttggctcacataagacatgtttcatgtgatctgtatcctggcataccagttatattttgtggggactttaatagtacaccatcaacaggaatgtttcattttgtcatcaatggcagcattcccagaggatcatgaagactgggcttccaatggggaggaggaaagatgcaatatgtctcttacacatttcttcaagctgaaaagtgcttgtggtgaacctgcttacacaaattatgttggtggctttcatggatgtctagattacattttcattgacttaaatgctttagaggttgaacaggtgattccattacctagtcatgaagaagttaccacccaccaggccttacctagtgtttcccatccctctgatcacatagcacttgtatgtgatttaaaatggaaatagatgtgtgtttaatggaattgaagtctgaaaaggaagtagttattttagcagaaaatttaatatgaatcaaagcttatatgtaaacttcaaggaggaatggtaaaatgttcagccctcctagttatgttcctgatgtcttcgttatgaaactgttgatgtttgcatcatacatcttctctttccttgttttcctctacaattggaggagaaacaaatatatttcttactagcaaaatagaaaattgaattatttttctccaacttgagactctcagaaaaggaagattgaattagcgtgttttttgtttgtttgtttttgtttttgtttttgtttttttgagatggagtttcactcttgttgcccaggctggagtgcaatggcacaatctcggctcactgcaacctccgccccctgggtttaagcgattctcctgcctcagcttcccgagtagctgggattacaggcatgcgccaacatgtctggctaatttttgtatttttagtagaaatggggtttcgccacgttggccaggctggtcttgaactcctgacctcaggtgatccacccacctcggcctcccaaagtgttgggattacaggcgtgagccaccgcacccggcccttgtgtacatttttataagagaatttttttagctaggagttcagaatttttaaagtaccatttgaatgatcttaatttttctttcatgacaacacattccaaaatgaatcatgcttatgtactaagagggaaaatgtatttaagttaagggtgagagacttaagttataggtgaccttagagacctaaggtgagagacttgacacatggaaggagtaacattagggtctacctctacctcaatttagttagcgatttactacaatttcagagctttaacaaaagataaaaataaatcgtcaccaattgttattgcttctcatctttcatttttcaatgaacaagtaaggtattttcattcttatttttaggattttagtttttagtgtatggtacaaatgaacacagtttatattctaattcttactgcagctcattttaatttttaggatgcaagcacaatttagtattcaaagtgagtagcaacatattcaacttgatcccattgtcttcagttactcttgcccatgaaaaatgttcataaatgaacagggtatttgaccatatgatattagaaaatacagcacattactttatgagaaactacctactgatatgggcttgaaattttggatgaatcattgagcatttctacactagaagtaatttcaaaattgttggtttttataaacaggaaaaaggttgagtagtgggacttttaagcatctctgaaataaaaaacttctttttacagacaagcattatagtttgagttacagacaacagtgtgtatatatgtaatatatatatagtaaaatgaaatttaaatatgaagccaaactttttaaaattagaaactacaaatggttatactgattagtgtctagcctagagtggtaaccatgctttactaattcagttatgaaatacattatttataatgcattagctgtattagctgttgcttttttgatgttcaggataactatgttatctcatttctgcatttaattaatagctcgagtattaaaagcccactcccttcaagaaaagctttgattttccccagtcatgaaagcccttgtttcaaattctttaatctctgaacctagtatcataagaatttcctcttttgataacatctgtactttcatattctgctcactatcaaatgtattgttaacacttagtaagtttgaaaatgaaggggttttatctgcatttgacattgaaccttgaagtactttaagtactccaaggggaaaattaaagtggaagtttcttcggatcttgtttagaaaaaactataaataaaaaattgatgctaccaaattgtgccttcctaaataacatttttgagagcattttaacagcagtttacaaatatgtaaataatagattaaaacca

SEQ ID NO: 376771 - DNA, 5491 bp, Homo sapiens
agccggaagtcgcgagatctgaatgagtcaaagccggcggcctcggctcctcagctccacctgacagtaggccgctgatcggccgcgggtcttgtcgaccgctaggccaccaggttcatgtggaggctcccaggcgcccgcgccgcgcttcgggtgatccggacggcggtggagaagctgagccgggctgaagcggggagccagacagcggcgggagcgatggagcgcgctgtagtgcgctgcgtaccttcggaacccaagctgagcctgtcattcgctttggctgatggtagccacaagaacatgcagcgcgaccagagcgagccgctgggtcgagtcctcagccgcatcgctaccaatgccctaaagggtcacgctaaggcggccgccgccaagaagagcaggaagagccggccgaatgctagcggcggtgcggcctgttcagggccggggcctgagccggctgtgttctgcgagcccgtggtgaagctgtactaccgggaagaggcagtggctgaggacgtgctcaacgtggatgcctggcaagacggcgcggtgctgcagatcggcgatgttaagtacaaggtggagcgcaacccgcccgccttcaccgaactgcagttgccgcgctacatcatggccgggttccctgtgtgccccaaactcagcctcgaatttggggatcccgccagctcccttttccgctggtataaggaagccaagcccggagcggcggagcccgaggtcggtgtcccctcgtcattgtctccctcctcaccttcttcttcttggactgagactgatgtggaggagcgtgtctacaccccgtccaatgccgacatcgggctaaggctcaagcttcactgcaccccaggcgatgggcagcgctttgggcacagccgggagttggaaagtgtgtgtgtggtagaggctgggcctggcacctgcacttttgaccaccggcatctctacacgaagaaggtgactgaggacgctctcatccgcactgtctcttacaacatcctggcagacacgtacgcgcagactgagttctcgcgaacggttctgtacccatactgtgccccctacgccctggagctcgactaccgccagaaccttatccagaaggaactcaccggctacaacgccgatgtcatctgtttgcaggaggttgaccgcgcagtgttttctgacagcttggtacccgccctagaggccttcgggctcgagggggtgtttcgaatcaagcagcacgaaggcctggccactttctaccgaaagtctaagttcagccttcttagccagcatgacatttcattctacgaagccctcgagtccgacccacttcacaaagaactgctggagaaactagttttgtacccatcagcgcaggagaaggtgctccagagatcttctgttcttcaggtttcagttcttcagtctacaaaggactcttctaaaaggatatgtgttgctaatacccatctttactggcatcctaaaggtgggtatattcgcctcattcaaatggcagtagccttggctcacataagacatgtttcatgtgatctgtatcctggcataccagttatattttgtggggactttaatagtacaccatcaacaggaatgtttcattttgtcatcaatggcagcattcccagaggatcatgaagactgggcttccaatggggaggaggaaagatgcaatatgtctcttacacatttcttcaagctgaaaagtgcttgtggtgaacctgcttacacaaattatgttggtggctttcatggatgtctagattacattttcattgacttaaatgctttagaggttgaacaggtgattccattacctagtcatgaagaagttaccacccaccaggccttacctagtgtttcccatccctctgatcacatagcacttgtatgtgatttaaaatggaaatagatgtgtgtttaatggaattgaagtctgaaaaggaagtagttattttagcagaaaatttaatatgaatcaaagcttatatgtaaacttcaaggaggaatggtaaaatgttcagccctcctagttatgttcctgatgtcttcgttatgaaactgttgatgtttgcatcatacatcttctctttccttgttttcctctacaattggaggagaaacaaatatatttcttactagcaaaatagaaaattgaattatttttctccaacttgagactctcagaaaaggaagattgaattagcgtgttttttgtttgtttgtttttgtttttgtttttgtttttttgagatggagtttcactcttgttgcccaggctggagtgcaatggcacaatctcggctcactgcaacctccgccccctgggtttaagcgattctcctgcctcagcttcccgagtagctgggattacaggcatgcgccaacatgtctggctaatttttgtatttttagtagaaatggggtttcgccacgttggccaggctggtcttgaactcctgacctcaggtgatccacccacctcggcctcccaaagtgttgggattacaggcgtgagccaccgcacccggcccttgtgtacatttttataagagaatttttttagctaggagttcagaatttttaaagtaccatttgaatgatcttaatttttctttcatgacaacacattccaaaatgaatcatgcttatgtactaagagggaaaatgtatttaagttaagggtgagagacttaagttataggtgaccttagagacctaaggtgagagacttgacacatggaaggagtaacattagggtctacctctacctcaatttagttagcgatttactacaatttcagagctttaacaaaagataaaaataaatcgtcaccaattgttattgcttctcatctttcatttttcaatgaacaagtaaggtattttcattcttatttttaggattttagtttttagtgtatggtacaaatgaacacagtttatattctaattcttactgcagctcattttaatttttaggatgcaagcacaatttagtattcaaagtgagtagcaacatattcaacttgatcccattgtcttcagttactcttgcccatgaaaaatgttcataaatgaacagggtatttgaccatatgatattagaaaatacagcacattactttatgagaaactacctactgatatgggcttgaaattttggatgaatcattgagcatttctacactagaagtaatttcaaaattgttggtttttataaacaggaaaaaggttgagtagtgggacttttaagcatctctgaaataaaaaacttctttttacagacaagcattatagtttgagttacagacaacagtgtgtatatatgtaatatatatatagtaaaatgaaatttaaatatgaagccaaactttttaaaattagaaactacaaatggttatactgattagtgtctagcctagagtggtaaccatgctttactaattcagttatgaaatacattatttataatgcattagctgtattagctgttgcttttttgatgttcaggataactatgttatctcatttctgcatttaattaatagctcgagtattaaaagcccactcccttcaagaaaagctttgattttccccagtcatgaaagcccttgtttcaaattctttaatctctgaacctagtatcataagaatttcctcttttgataacatctgtactttcatattctgctcactatcaaatgtattgttaacacttagtaagtttgaaaatgaaggggttttatctgcatttgacattgaaccttgaagtactttaagtactccaaggggaaaattaaagtggaagtttcttcggatcttgtttagaaaaaactataaataaaaaattgatgctaccaaattgtgccttcctaaataacatttttgagagcattttaacagcagtttacaaatatgtaaataatagattaaaaccaaatcttgattctcttgtgaatttttttttcattttaaaaatatgtttttgggctgttttcaaagaaagatgttgatagaacccttagagtgacttgggagaaaacaaagtgtcacatcaaaaagttgagaaacattttgaaagaaaaaattcgaacatgcccatgaaaaaagcatacagcttccacattaacactggctagattaaactctagtcagaaaaactcagcacttaacagacattccatgtcctatatccttaattttgatgttttctgactaaacaatatactcagattgtatacaggcatttcacattattaggacatggaatgttattgtgaagtgccatatactgtgatcaaatctccagtatacggatacgttaaaatgattggagtccaaaggtagggaacactaagaaaatgtataaatagcatacacatttctttgtactcatgagttagaatgcagtgttattcagaaatgtctgtttaaagcacctatgtgattgcatttttctattacatttggattttttagtacatttaattttaagaaaacatgggaaatctagcgactttctatggtaaaccacattttataatgtcacaagttcttgctataggaattaacattctagaattttatattgattataaaagagtatttcagaacatattattctgttaaaatgaactcttgcacagttgccgctacagcaaatgtgtctgccaataatcaaaattcatgagcaaacaatcgtttctggctgtaatgtatgttctttttgaaattctgtatgctaaaatcagttgtttcaaaatttcaagaattccactgagtagtgatttttctgagtactaagctatgatctcatcagaatgtgctggtttcagtctggagatagatttctgaggagcctaatacaagggagagaatgtccaaagaacactactgtggaaagttcttacgatggaaattgacatcttttgtatctcattctccagccgtgaaataaaggcagaggttccctgcaaactagtttggttgggataaatccaatatttatatataatgaaaaataaaagtttgcattattagtttatcacaagacccatgtgacaactcagaaaatattctcagcataatttttttaagagatagggtctcactgttacccaggctggagtgcagtggtgcagtcataacttactacagcctcaaactgcggggctcaaatgatcctcctgcctcagcgtcccaagtagttgagattacaagcccaaccttccataactgaaaactaactttctttttttctttttttattattatactttaagttctagtgtacatgtgcccaacgtgcagatttgttacataggtatacatgtgccatgttggtttgctgcacccgttaactcgtcatttacattaggtatttctcctaatgctatccctcccccagccctgaaaatgaattttttaaacacaaataaaaaatatttcagtg

SEQ ID NO: 376772 - DNA, 5353 bp, Homo sapiens
agccggaagtcgcgagatctgaatgagtcaaagccggcggcctcggctcctcagctccacctgacagtaggccgctgatcggccgcgggtcttgtcgaccgctaggccaccaggttcatgtggaggctcccaggcgcccgcgccgcgcttcgggtgatccggacggcggtggagaagctgagccgggctgaagcggggagccagacagcggcgggagcgatggagcgcgctgtagtgcgctgcgtaccttcggaacccaagctgagcctgtcattcgctttggctgatggtagccacaagaacatgcagcgcgaccagagcgagccgctgggtcgagtcctcagccgcatcgctaccaatgccctaaagggtcacgctaaggcggccgccgccaagaagagcaggaagagccggccgaatgctagcggcggtgcggcctgttcagggccggggcctgagccggctgtgttctgcgagcccgtggtgaagctgtactaccgggaagaggcagtggctgaggacgtgctcaacgtggatgcctggcaagacggcgcggtgctgcagatcggcgatgttaagtacaaggtggagcgcaacccgcccgccttcaccgaactgcagttgccgcgctacatcatggccgggttccctgtgtgccccaaactcagcctcgaatttggggatcccgccagctcccttttccgctggctaaggctcaagcttcactgcaccccaggcgatgggcagcgctttgggcacagccgggagttggaaagtgtgtgtgtggtagaggctgggcctggcacctgcacttttgaccaccggcatctctacacgaagaaggtgactgaggacgctctcatccgcactgtctcttacaacatcctggcagacacgtacgcgcagactgagttctcgcgaacggttctgtacccatactgtgccccctacgccctggagctcgactaccgccagaaccttatccagaaggaactcaccggctacaacgccgatgtcatctgtttgcaggaggttgaccgcgcagtgttttctgacagcttggtacccgccctagaggccttcgggctcgagggggtgtttcgaatcaagcagcacgaaggcctggccactttctaccgaaagtctaagttcagccttcttagccagcatgacatttcattctacgaagccctcgagtccgacccacttcacaaagaactgctggagaaactagttttgtacccatcagcgcaggagaaggtgctccagagatcttctgttcttcaggtttcagttcttcagtctacaaaggactcttctaaaaggatatgtgttgctaatacccatctttactggcatcctaaaggtgggtatattcgcctcattcaaatggcagtagccttggctcacataagacatgtttcatgtgatctgtatcctggcataccagttatattttgtggggactttaatagtacaccatcaacaggaatgtttcattttgtcatcaatggcagcattcccagaggatcatgaagactgggcttccaatggggaggaggaaagatgcaatatgtctcttacacatttcttcaagctgaaaagtgcttgtggtgaacctgcttacacaaattatgttggtggctttcatggatgtctagattacattttcattgacttaaatgctttagaggttgaacaggtgattccattacctagtcatgaagaagttaccacccaccaggccttacctagtgtttcccatccctctgatcacatagcacttgtatgtgatttaaaatggaaatagatgtgtgtttaatggaattgaagtctgaaaaggaagtagttattttagcagaaaatttaatatgaatcaaagcttatatgtaaacttcaaggaggaatggtaaaatgttcagccctcctagttatgttcctgatgtcttcgttatgaaactgttgatgtttgcatcatacatcttctctttccttgttttcctctacaattggaggagaaacaaatatatttcttactagcaaaatagaaaattgaattatttttctccaacttgagactctcagaaaaggaagattgaattagcgtgttttttgtttgtttgtttttgtttttgtttttgtttttttgagatggagtttcactcttgttgcccaggctggagtgcaatggcacaatctcggctcactgcaacctccgccccctgggtttaagcgattctcctgcctcagcttcccgagtagctgggattacaggcatgcgccaacatgtctggctaatttttgtatttttagtagaaatggggtttcgccacgttggccaggctggtcttgaactcctgacctcaggtgatccacccacctcggcctcccaaagtgttgggattacaggcgtgagccaccgcacccggcccttgtgtacatttttataagagaatttttttagctaggagttcagaatttttaaagtaccatttgaatgatcttaatttttctttcatgacaacacattccaaaatgaatcatgcttatgtactaagagggaaaatgtatttaagttaagggtgagagacttaagttataggtgaccttagagacctaaggtgagagacttgacacatggaaggagtaacattagggtctacctctacctcaatttagttagcgatttactacaatttcagagctttaacaaaagataaaaataaatcgtcaccaattgttattgcttctcatctttcatttttcaatgaacaagtaaggtattttcattcttatttttaggattttagtttttagtgtatggtacaaatgaacacagtttatattctaattcttactgcagctcattttaatttttaggatgcaagcacaatttagtattcaaagtgagtagcaacatattcaacttgatcccattgtcttcagttactcttgcccatgaaaaatgttcataaatgaacagggtatttgaccatatgatattagaaaatacagcacattactttatgagaaactacctactgatatgggcttgaaattttggatgaatcattgagcatttctacactagaagtaatttcaaaattgttggtttttataaacaggaaaaaggttgagtagtgggacttttaagcatctctgaaataaaaaacttctttttacagacaagcattatagtttgagttacagacaacagtgtgtatatatgtaatatatatatagtaaaatgaaatttaaatatgaagccaaactttttaaaattagaaactacaaatggttatactgattagtgtctagcctagagtggtaaccatgctttactaattcagttatgaaatacattatttataatgcattagctgtattagctgttgcttttttgatgttcaggataactatgttatctcatttctgcatttaattaatagctcgagtattaaaagcccactcccttcaagaaaagctttgattttccccagtcatgaaagcccttgtttcaaattctttaatctctgaacctagtatcataagaatttcctcttttgataacatctgtactttcatattctgctcactatcaaatgtattgttaacacttagtaagtttgaaaatgaaggggttttatctgcatttgacattgaaccttgaagtactttaagtactccaaggggaaaattaaagtggaagtttcttcggatcttgtttagaaaaaactataaataaaaaattgatgctaccaaattgtgccttcctaaataacatttttgagagcattttaacagcagtttacaaatatgtaaataatagattaaaaccaaatcttgattctcttgtgaatttttttttcattttaaaaatatgtttttgggctgttttcaaagaaagatgttgatagaacccttagagtgacttgggagaaaacaaagtgtcacatcaaaaagttgagaaacattttgaaagaaaaaattcgaacatgcccatgaaaaaagcatacagcttccacattaacactggctagattaaactctagtcagaaaaactcagcacttaacagacattccatgtcctatatccttaattttgatgttttctgactaaacaatatactcagattgtatacaggcatttcacattattaggacatggaatgttattgtgaagtgccatatactgtgatcaaatctccagtatacggatacgttaaaatgattggagtccaaaggtagggaacactaagaaaatgtataaatagcatacacatttctttgtactcatgagttagaatgcagtgttattcagaaatgtctgtttaaagcacctatgtgattgcatttttctattacatttggattttttagtacatttaattttaagaaaacatgggaaatctagcgactttctatggtaaaccacattttataatgtcacaagttcttgctataggaattaacattctagaattttatattgattataaaagagtatttcagaacatattattctgttaaaatgaactcttgcacagttgccgctacagcaaatgtgtctgccaataatcaaaattcatgagcaaacaatcgtttctggctgtaatgtatgttctttttgaaattctgtatgctaaaatcagttgtttcaaaatttcaagaattccactgagtagtgatttttctgagtactaagctatgatctcatcagaatgtgctggtttcagtctggagatagatttctgaggagcctaatacaagggagagaatgtccaaagaacactactgtggaaagttcttacgatggaaattgacatcttttgtatctcattctccagccgtgaaataaaggcagaggttccctgcaaactagtttggttgggataaatccaatatttatatataatgaaaaataaaagtttgcattattagtttatcacaagacccatgtgacaactcagaaaatattctcagcataatttttttaagagatagggtctcactgttacccaggctggagtgcagtggtgcagtcataacttactacagcctcaaactgcggggctcaaatgatcctcctgcctcagcgtcccaagtagttgagattacaagcccaaccttccataactgaaaactaactttctttttttctttttttattattatactttaagttctagtgtacatgtgcccaacgtgcagatttgttacataggtatacatgtgccatgttggtttgctgcacccgttaactcgtcatttacattaggtatttctcctaatgctatccctcccccagccctgaaaatgaattttttaaacacaaataaaaaatatttcagtg

SEQ ID NO: 376773 - DNA, 2365 bp, Homo sapiens
  misc_feature (2352)..(2352): n is a, c, g, or t
agccggaagtcgcgagatctgaatgagtcaaagccggcggcctcggctcctcagctccacctgacagtaggccgctgatcggccgcgggtcttgtcgaccgctaggccaccaggttcatgtggaggctcccaggcgcccgcgccgcgcttcgggtgatccggacggcggtggagaagctgagccgggctgaagcggggagccagacagcggcgggagcgatggagcgcgctgtagtgcgctgcgtaccttcggaacccaagctgagcctgtcattcgctttggctgatggtagccacaagaacatgcagcgcgaccagagcgagccgctgggtcgagtcctcagccgcatcgctaccaatgccctaaagggtcacgctaaggcggccgccgccaagaagagcaggaagagccggccgaatgctagcggcggtgcggcctgttcagggccggggcctgagccggctgtgttctgcgagcccgtggtgaagctgtactaccgggaagaggcagtggctgaggacgtgctcaacgtggatgcctggcaagacggcgcggtgctgcagatcggcgatgttaagtacaaggtggagcgcaacccgcccgccttcaccgaactgcagttgccgcgctacatcatggccgggttccctgtgtgccccaaactcagcctcgaatttggggatcccgccagctcccttttccgctggtataaggaagccaagcccggagcggcggagcccgaggtcggtgtcccctcgtcattgtctccctcctcaccttcttcttcttggactgagactgatgtggaggagcgtgtctacaccccgtccaatgccgacatcgggctaaggctcaagcttcactgcaccccaggcgatgggcagcgctttgggcacagccgggagttggaaagtgtgtgtgtggtagaggctgggcctggcacctgcacttttgaccaccggcatctctacacgaagaaggtgactgaggacgctctcatccgcactgtctcttacaacatcctggcagacacgtacgcgcagactgagttctcgcgaacggttctgtacccatactgtgccccctacgccctggagctcgactaccgccagaaccttatccagaaggaactcaccggctacaacgccgatgtcatctgtttgcaggaggttgaccgcgcagtgttttctgacagcttggtacccgccctagaggccttcgggctcgagggggtgtttcgaatcaagcagcacgaaggcctggccactttctaccgaaagtctaagttcagccttcttagccagcatgacatttcattctacgaagccctcgagtccgacccacttcacaaagaactgctggagaaactagttttgtacccatcagcgcaggagaaggtgctccagagatcttctgttcttcaggtttcagttcttcagtctacaaaggactcttctaaaaggatatgtgttgctaatacccatctttactggcatcctaaaggtgggtatattcgcctcattcaaatggcagtagccttggctcacataagacatgtttcatgtgatctgtatcctggcataccagttatattttgtggggactttaatagtacaccatcaacaggaatgtttcattttgtcatcaatggcagcattcccagaggatcatgaagactgggcttccaatggggaggaggaaagatgcaatatgtctcttacacatttcttcaagctgaaaagtgcttgtggtgaacctgcttacacaaattatgttggtggctttcatggatgtctagattacattttcattgacttaaatgctttagaggttgaacaggtgattccattacctagtcatgaagaagttaccacccaccaggccttacctagtgtttcccatccctctgatcacatagcacttgtatgtgatttaaaatggaaatagatgtgtgtttaatggaattgaagtctgaaaaggaagtagttattttagcagaaaatttaatatgaatcaaagcttatatgtaaacttcaaggaggaatggtaaaatgttcagccctcctagttatgttcctgatgtcttcgttatgaaactgttgatgtttgcatcatacatcttctctttccttgttttcctctacaattggaggagaaacaaatatatttcttactagcaaaatagaaaattgaattatttttctccaacttgagactctcagaaaaggaagattgaattagcgtgttttttgtttgtttgtttttgtttttgtttttgtttttttgagatggagtttcactcttgttgcagtgagctgagattgcgccactgcactccagcctgagtgaanagaactccgtctc

SEQ ID NO: 376774 - DNA, 492 bp, Homo sapiens
gattacctactgggtcctcttccctgagagagtttatatattctattgccaactcaatatctccatttggacacctaggtacctcaaatgtaacatgccagtctattctcaccccactcccacacatcaaacaccaccaccatctaacctaacacaccagcagtcttctcagtcaatcataattacaatttctttctttctttcagttactcaggctaaaaaacttggacttagtcttgacccctatgtttgtttcatatcccacatctagtccaatatcaaatcctcttatttctactctcacgatatagccaaaatatagccactcttaccctaacaccattcttgtccaaaccattactctcttgcctcaaaatttcctctcttttctgactcccaattcaacttgacaatctatttcacagccattagaatgatcatgccacttctctgctagaaaatccaggaaacatagcaagaccccatctttac

SEQ ID NO: 376775 - DNA, 445 bp, Homo sapiens
acttaataaagcaagatatatcttatatgtggttgactgtgaaacgatgggcattttaaacatttgtgactttaacataaccaaaacagatattggttaatgtctaactgctattctttttaaagcgtatattaatgtatcaagtatatattttactaggacactctgtagtaggtagccatgaaaaaagtgactgttgacttattatcttcttggagttattgctggattaagaggagacattctctgttttttttcttttcttatttttaataacagaaactctggcccatgaaggcctgtgtgctctgagagaatgtgctgagccggccttgtttttctcctgtttcccgtgacagggcgctcctccccacaggacttgccaagtcctcatgcacgttgagtcaacattttggatatgagctcattacatgggaaaaagagt

SEQ ID NO: 376776 - DNA, 936 bp, Homo sapiens
tactgaaattcaattaaatactaataatctcaaatattttaagtgttactctaggcaataggtataaatcctaataagttaaaactattacagctatacttaaaactaagtaaaaatcaataactgggtaaagaggctcaaccaatcataagttaagtctatggcatactgaccttcacccatgcaacctgtggctaaagaagcagcctagctccacacactgaggtggagaaaagcaaactatcttaattatgtgtagtcatgggtatgcatgttggaagttctttgttcagaatgaactttctttcaccccatctttattctctgctccatgaggaaagaaaaacagcttcctcctcattctgatttcaaataaaccttcacaaccacaactgtcataccgttcatcccttattcctccagaatgaaacaccaccaaatcctgaagcgtccaccatggaaatcagttcttggatacctctgggctgtctacatgttaagatggctgcagagtgaccagagaattctggggcgggggatggggagtgctctagtgacagcaggccacacacagacaatggacagtacagctggggcgctggggaagaaagcagtctcccagtactctgctcatccctctccctttcctgttcttgcagattgccctaaagagctccaagcttttgccctctgttctgcagagttccttccttccgttaaaacccatatacagggaccaggatgctcaaacccaaaccccaaacccttatcaaagcacccacaaaaggggggctcacccctagaaccataattccctttagtcttaagaatataagattttccctacctcgttatacttttactaagcctttttttgtttgtttttttgagacggagtcttactctagcctgggtgacagagcaagacctatctcg

SEQ ID NO: 376777 - DNA, 313 bp, Homo sapiens
caagagatgtgcgtaagacaaggtagaaatgtgaagaagaaatcttaatcgatggaccgtaaagtgagaaggaacgagtatcttcacggacttgagagacgcaaaagggctgcacaggtggatgtatcccaaaccccaaacccttatcaaagcacccacaaaaggggggctcacccctagaaccataattccctttagtcttaagaatataagattttccctacctcgttatacttttactaagcctttttttgtttgtttttttgagacggagtcttactctagcctgggtgacagagcaagacctatctcg

SEQ ID NO: 376778 - DNA, 517 bp, Homo sapiens
atttggctgcaggctagacctacagcatggacctatggcataggatttgggctttcccattcaaaggagatgtcacatcccaaatgactcatcttcttcagtacttcaaattcataatcatttcatgtcagtaaaaccaaccaagaattcccctgtgtcagtctcctgtcttctattcctgggagcttttagctctggtgttttttttgtttgtttttttttcctctttaaaacatctctaggctgggattacaggcgtgagctactgcgcctggccttcagtggcattctagaatgttctattgaagttactatgtcagtgcttggatttcttactgtcttccccattagaacgtagtatgtagtgaagaattaaagccaaacataaacatttctagttttgtttttgtttttttccaactttaattatataggctagctggaagagtgagttaatttaacttgttaatttctgaagtgagattgcaacaacccatgaaatgctctgggtttttct

SEQ ID NO: 376779 - DNA, 348 bp, Homo sapiens
ctgggtgtggtggctcatgcctgtaatcccagcactttgggacgccaaagcgggaagatggcttgagtccaggagtttgagaccagcctgggcaacgtagcgagaccctgtctcgacaaaaagtttaaacagttagctgggtggtggctcgcacttgtagtcccagctacttggaaggctgaagcaggaggatcacttgagcccaggagttcgaggctatagtgagctatgatctcaccactacactgcagcctaggtgacagagtgagaccctatttctaaaacataataaaataaaataaaaacaaaatttaaaaactctctttaattcactgccttctctggctc

SEQ ID NO: 376780 - DNA, 453 bp, Homo sapiens
aatcagcttatacataagcaggacagcctgaaaagctactgtgaaatacagaaataggataaatatcctaacacctctttgaaaaaggcagcatgggatgaagatactttacttctaagaatatttattccttggccttttagagggttttcttttttggtggggagggagcagttggagaggaaagtgtgttgtcgtggctggagaagcaaaatgacagagatatggataaggggggagaccttcgaatgccccagaagtcaatgtaactcctataatatagccctacacagggcctttgctaggtgacgactcatcaggaagcttcttaatatctgttactctgtgcccacctactaggaatgatgataggccttctggacaagttaccattgttattaactcaaaagatccagcaatacaatataaaagctcattaatctacaccttgtt

SEQ ID NO: 376781 - DNA, 327 bp, Homo sapiens
ggcagcacagcccaggaacaggcccgacgtggccccctgcactggccttcatcacaggaaagcatcagggacaggcctggagtgactgctcgtacccgccttcatcacagggaagcatctgatatactgtggtgtgccttgaaagtgactggcctctctgattgtcaccaggctgagctgtgaccaggtgagccggtgatcagttaacagagtccccgtagatcccaaaatagccattcgagacccagctggcattctccctcctctccatcccggggctggctgagctcatggatcattttaattggataactggaaaaaaattct

SEQ ID NO: 376782 - DNA, 415 bp, Homo sapiens
agtgttattggctgggcagggtagatcacctgaggtcaggagtttgagaccagcctggccaatgtggtgaaaccccatctctactaaaaatacaaaaattagccaggtgtggtggtgggcacctgtaatcccagctacttgggaggctgaggcaggagaatcacttgaatctgggaggcggaggttgcagtgagccgagatcacgccactgcactccaggctaggcaacaagagcgaaactccatctcaatcatatcagtcaataatattattttaaaaagaagacagataattttctcttcattttacagaacagaaaaaccaagacacaaacaatctcactgtttacctgacatcacccaaatatgtaacagagatagaatcaatgtttactttttctgatttttggtatggt

SEQ ID NO: 376783 - DNA, 560 bp, Homo sapiens
cttcatttcttttcacaccagataggcatcatctttgaaaacatctttactgggtctcttgtctccctcctgcagccactgatctaaatcacagacttttttagaaagagggaaaatagtaaagaaagaaagcgattgagttgatgctcccagccactgtctgtaccctgaattttgtttttctgccatatgtcaggtggcctctcctggaccatcgtcactgtttctcctgcttccctgcagctgcagacacaggagcactgtgtaggtctggccttgagcacccacccacccagtacagagccagcccctgctgttctgaatcagtgcagtgaccacttagaacacagtgcccatgcctctgtgatctgaactgctctttccagttccatacaatgttaagaacccacttaagaatgttttaatcattcagtagtttttcgtggtatataataaaaaagtgatttaaatacaatctattttattttagattatatcattaggggttattttacaaagttacctttaaatactattgtaaataaattaataacaaataa

SEQ ID NO: 376784 - DNA, 4710 bp, Homo sapiens
tttctcgagaacctactgtgtgcatatcccgggcttagtgaagtcctaggcgggctctggcaccaccaggtgcccaagacacagctccttcccgcacctaacagggacttcccatctctctctgtgcccttagcctgctgtgcccacccaccccactgaccccgcgagcgtgctcgggcttgggagggcacgtctgtgggggtgagagacggagccacagcatttggtgactagggggaagccaggttggaagtactccatgacacacactcggagaaagtcccttcccatgctgagttcgggcctcactggccgccgagagcccctgcagatggaagacagcaacatggagcagggggttgagggtgtggagccaggcatgcccgagagcccaggtcacctcacagggcgccgcaagaattacccacttcgtaagcgcccattggttcctgagaagcccaaggcctgcaaagtgctgctgactcgcctggagaatgtggccggtccccggagtgcagatgaggctgatgagctaccgcctgacctgcccaagccccccagcccggccccatccagtgaagaccctggccttgcccagccccgcaagcggcgcctggcctccctcaatgctgaagctctcaataacctgctgctggagcgagaggacaccagcagcctggcaggcacccgccgcagtcgagcaggggatccccaccgcagccgtgaccgtgatcgtgctactgggggctggtcctcctccaagaagcggccccggctgggggaccttggaggaggaagtcgggacctgtctccagagccagcacccgatgaaggtccccgccgagatggagacccagctcccaagagactggctagcctgaacgcagctgctttcctaaaactgagccaggagcgggagctacccctgcggctgcctcgtgcccatgcagaagtagatgggcgctccactgagcccccagcacccaaggccccgaggccaaagtggcccaaggtcaatggcaagaactatcccaaggcttggcagggggccagctctggggaggctgcaggcccacctggctggcaaggctgccctgatgaaccatggccatctgcaactccttgtgggccatccgtccagccatctcataagcccctgagcaaggctctggagagccctttggggctgcgccctcacctgcccctgctgatgggtggacaggcggctctgaagccggagcctgggcgcccaggcgaggagtcacctgcccctaagcaggaactgcatcagccctctttccccacacctcagctgtcgccgctgccgatgcctggcaaccccgccgactacaatggcctgtgtgttgggcctgagctcactgcactaggcagcttctacctgtactgtggccaagaggggctgcagtgtgggggctactcgccctgccccatgcttcctgagggcaagctgtccccagtggctgcacctcacgaggaggggctcctcttagctccgagctcagtgccctcaggcacccctttccagcaccctccctggggctcctctcgctactgctctagcgaggacactggagtgaatggctacagcatctgcggagtgttgcccctgtctgttacccacgctggcactacctgtggcggctgcccatacaaaatgccttttgcagcaggctgcagatccctgggccagttggaatttcctctcccggaagctggccacccagcctcacccgcccacccactcctggggtgccctgtacccagtgtgccacctgcagcagagcccgtcccccatcttcagacacccacctcggagccccagacagtagcccgtgcgtgccctcagagcgccaaacctcccagcggttctaagtcaggtctgcgcacaggctccagctgcaggcacactgcaaggagcaaggctgcccgcaggcctagccaccccaagcagccacgtgtccagcgcccacgccctcgccgccgccgtcgccgccgcactaatggctgggtacctgttggggctgcgtgtgagaaggctgtgtatgtcttggatgagccggagccagccatccgaaagagctaccaggcggtagagcggcatggggagacaatccgagtccgggacaccgtccttctcaaatcaggcccacgaaagacctccacaccttatgtggccaagatctctgccctctgggagaaccccgagtcaggagagctgatgatgagcctcctgtggtattacagacctgagcacttacagggaggccgcagtcccagcatgcacgagcccttgcagaatgaagtgtttgcatcgcgacatcaggaccagaacagtgtggcctgcattgaggagaagtgctatgtgctgacttttgccgagtactgcaggttctgtgccatggccaagcgccgaggtgaaggcctccccagccgaaagacagcactggttcccccctctgcagactattccaccccaccccaccgcacagtgccagaggacacggaccctgagctggtgttcctttgccgccatgtctatgacttccgccacgggcgcatccttaagaacccccagtagcctcctcatgcccatgctggggctacccatgggcaagtggggctcggggtagggggcactgcttgaagcacagcacttggttagggggccacagaggcctaagtttgctggcctgtggttttcttgggggggagggcaggggcccctgtgggttctgggctccaggggagggagctggggaggccagggtataagaaaagcatcagaactctcagcttggcccaaggtaccttctgtggttcccctgggtggagatttccgaaaagtagtcttctctgaggctgggccaagcctgagggaaatggggccctaggagggtgggggcgggaaggaggggcaaggtctttcaggaaccagacccaacaggcccttctgtagcctcccccttgccctcaaagggggagtgggggccagctttacctcacccactgtgacccgccgcttccccttcagcctgggaccaggctttcctagatcccagcacagctctgagcttgttcctttgaggcatagagagccagagtctggcttccagagcattgacttcctcttcctagacttgaggccttttctctggctttcctcctttgccctgcagtagcaactggtgctgggacaagttgacccacctctcacagtcatgggtgtggcccacttgtgggagtctcctgtccacctcccagagacggccacccagcgggtctggcttcccagaaagttaactgatgattgtggggtttgtcatatctgggagggaagatgggtgctgggagagggttgggggcagggggcaaggaaaattgctacctgatttgttgaagatttttcctcttgccttacacatggaggttccaggaaacctcttgcagaacttcacacgtgattcttcaagccacacccacctgaaatcaaaccaaaggagtgctgtggctccccttgccctgccaccctttccctagtcttttgtagattgcactaatttacatcctagcaagaatcaacactgtatcagtccacggacctgctgagctgcagccacttgctctaggagctaaggacttgcattttcagtttgttcctgttgcccagaggccctgttctcacctcatgctgctccccagagtagactaacaggctcagtcccctgttgtccttgtggagactaggccttggccctggccctgagactctgtgagggggctggagcagcctggttatttcctatctgtaccaaagaggagtatggtgggagagggagtggagtgcagtgtggcttgggcctggtgctgggaacctgctagctgagcacttccacaagggcatacccctgggggcaggggctggggctgagaactgcagccctgggtcttcccttagggaggaagggcagatgaacccagcaggcttaggaggtggcactgggtgaggacagctgggcaggggctgcagagggaggtggaaatgaaccctgagggctcccccaacttgccatgccctgtcccttagtagatgagttgctcctgattggtcattgggtttgggtgaggcctggaggcttcagaggtgaatttatgcttgggaagcctgatcccaaacctgaagggaagggacttggatctccttatattgaataagctgtttggaggaaggtgtctgtctgggaggatggggcagtaaatgaggttggcagagtggcagtgggggctctgcagagccagccttggagcctgctcattctgggcccttgctgccaaggagcccagcctcacctagcaggaaaggagatgaaggccctcctcccaggaggtagggtcttggctgccccgaacttaaatgcttttgaaatctcttagatgtggaaatattttttcgaacctgaaaatgcagctggtagaatttcaatggaagcataatccatgtaaaatatattttagttgatattttgtaaaatgcactttttgtgtgtgttgatcctggtttcccagatctgtatttcagtgtttacaagggaggaaggacctttcctcacctcccttttgacagagattagaagtacttctttaagaaaaaaataaatttgagaaattgtattgatttagaaaaggatcgtt

SEQ ID NO: 376785 - DNA, 2827 bp, Homo sapiens
gaaagactcctcctaacaccccataggctctccaccaagctgtgtgctaaaagaggtgactgccatctgtgtgtgccctgggctcaccttttatttcactttcccttgcagggactttccatctaactggaaagatgaagaacatttcccctctcctacgctaggcagggctggggtttgggaggtcagtgacaatcaggggctagagcagatacctggctattctggagaagggggggacctagaagggactcaggaggaatgcctggaggcagtaggtgaggcatacttaggctgaatttccagggaagcttgctggagtcatctcaggtcagcaggcccagcagaggggttaatgtctgccttgctctgggaatgaggtgctttccagccctggtaacaacctccacctgtctccctttgagcccttgcagaatgaagtgtttgcatcgcgacatcaggaccagaacagtgtggcctgcattgaggagaagtgctatgtgctgacttttgccgagtactgcaggttctgtgccatggccaagcgccgaggtgaaggcctccccagccgaaagacagcactggttcccccctctgcagactattccaccccaccccaccgcacagtgccagaggacacggaccctgagctggtgttcctttgccgccatgtctatgacttccgccacgggcgcatccttaagaacccccagtagcctcctcatgcccatgctggggctacccatgggcaagtggggctcggggtagggggcactgcttgaagcacagcacttggttagggggccacagaggcctaagtttgctggcctgtggttttcttgggggggagggcaggggcccctgtgggttctgggctccaggggagggagctggggaggccagggtataagaaaagcatcagaactctcagcttggcccaaggtaccttctgtggttcccctgggtggagatttccgaaaagtagtcttctctgaggctgggccaagcctgagggaaatggggccctaggagggtgggggcgggaaggaggggcaaggtctttcaggaaccagacccaacaggcccttctgtagcctcccccttgccctcaaagggggagtgggggccagctttacctcacccactgtgacccgccgcttccccttcagcctgggaccaggctttcctagatcccagcacagctctgagcttgttcctttgaggcatagagagccagagtctggcttccagagcattgacttcctcttcctagacttgaggccttttctctggctttcctcctttgccctgcagtagcaactggtgctgggacaagttgacccacctctcacagtcatgggtgtggcccacttgtgggagtctcctgtccacctcccagagacggccacccagcgggtctggcttcccagaaagttaactgatgattgtggggtttgtcatatctgggagggaagatgggtgctgggagagggttgggggcagggggcaaggaaaattgctacctgatttgttgaagatttttcctcttgccttacacatggaggttccaggaaacctcttgcagaacttcacacgtgattcttcaagccacacccacctgaaatcaaaccaaaggagtgctgtggctccccttgccctgccaccctttccctagtcttttgtagattgcactaatttacatcctagcaagaatcaacactgtatcagtccacggacctgctgagctgcagccacttgctctaggagctaaggacttgcattttcagtttgttcctgttgcccagaggccctgttctcacctcatgctgctccccagagtagactaacaggctcagtcccctgttgtccttgtggagactaggccttggccctggccctgagactctgtgagggggctggagcagcctggttatttcctatctgtaccaaagaggagtatggtgggagagggagtggagtgcagtgtggcttgggcctggtgctgggaacctgctagctgagcacttccacaagggcatacccctgggggcaggggctggggctgagaactgcagccctgggtcttcccttagggaggaagggcagatgaacccagcaggcttaggaggtggcactgggtgaggacagctgggcaggggctgcagagggaggtggaaatgaaccctgagggctcccccaacttgccatgccctgtcccttagtagatgagttgctcctgattggtcattgggtttgggtgaggcctggaggcttcagaggtgaatttatgcttgggaagcctgatcccaaacctgaagggaagggacttggatctccttatattgaataagctgtttggaggaaggtgtctgtctgggaggatggggcagtaaatgaggttggcagagtggcagtgggggctctgcagagccagccttggagcctgctcattctgggcccttgctgccaaggagcccagcctcacctagcaggaaaggagatgaaggccctcctcccaggaggtagggtcttggctgccccgaacttaaatgcttttgaaatctcttagatgtggaaatattttttcgaacctgaaaatgcagctggtagaatttcaatggaagcataatccatgtaaaatatattttagttgatattttgtaaaatgcactttttgtgtgtgttgatcctggtttcccagatctgtatttcagtgtttacaagggaggaaggacctttcctcacctcccttttgacagagattagaagtacttctttaagaaaaaaataaatttgagaaattgtattgatttagaaaaggatcgtt

SEQ ID NO: 376786 - DNA, 1287 bp, Homo sapiens
cgagttacagccaacagcacaatataacccacagcactcctttggtttgatttcaggtgggtgtggcttgaagaatcactgaaatcaaaccaaaggagtgctgtggctccccttgccctgccaccctttccctagtcttttgtagattgcactaatttacatcctagcaagaatcaacactgtatcagtccacggacctgctgagctgcagccacttgctctaggagctaaggacttgcattttcagtttgttcctgttgcccagaggccctgttctcacctcatgctgctccccagagtagactaacaggctcagtcccctgttgtccttgtggagactaggccttggccctggccctgagactctgtgagggggctggagcagcctggttatttcctatctgtaccaaagaggagtatggtgggagagggagtggagtgcagtgtggcttgggcctggtgctgggaacctgctagctgagcacttccacaagggcatacccctgggggcaggggctggggctgagaactgcagccctgggtcttcccttagggaggaagggcagatgaacccagcaggcttaggaggtggcactgggtgaggacagctgggcaggggctgcagagggaggtggaaatgaaccctgagggctcccccaacttgccatgccctgtcccttagtagatgagttgctcctgattggtcattgggtttgggtgaggcctggaggcttcagaggtgaatttatgcttgggaagcctgatcccaaacctgaagggaagggacttggatctccttatattgaataagctgtttggaggaaggtgtctgtctgggaggatggggcagtaaatgaggttggcagagtggcagtgggggctctgcagagccagccttggagcctgctcattctgggcccttgctgccaaggagcccagcctcacctagcaggaaaggagatgaaggccctcctcccaggaggtagggtcttggctgccccgaacttaaatgcttttgaaatctcttagatgtggaaatattttttcgaacctgaaaatgcagctggtagaatttcaatggaagcataatccatgtaaaatatattttagttgatattttgtaaaatgcactttttgtgtgtgttgatcctggtttcccagatctgtatttcagtgtttacaagggaggaaggacctttcctcacctcccttttgacagagattagaagtacttctttaagaaaaaaataaatttgagaaattgtattgatttagaaaaggatcgtt

SEQ ID NO: 376787 - DNA, 2119 bp, Homo sapiens
cccggccggggcctgcgggcgcccagagccgcgccgtccgcgccgcccgttctggttggaagtactccatgacacacactcggagaaagtcccttcccatgctgagttcgggcctcactggccgccgagagcccctgcagatggaagacagcaacatggagcagggggttgagggtgtggagccaggcatgcccgagagcccaggtcacctcacagggcgccgcaagaattacccacttcgtaagcgcccattggttcctgagaagcccaaggcctgcaaagtgctgctgactcgcctggagaatgtggccggtccccggagtgcagatgaggctgatgagctaccgcctgacctgcccaagccccccagcccggccccatccagtgaagaccctggccttgcccagccccgcaagcggcgcctggcctccctcaatgctgaagctctcaataacctgctgctggagcgagaggacaccagcagcctggcaggcacccgccgcagtcgagcaggggatccccaccgcagccgtgaccgtgatcgtgctactgggggctggtcctcctccaagaagcggccccggctgggggaccttggaggaggaagtcgggacctgtctccagagccagcacccgatgaaggtccccgccgagatggagacccagctcccaagagactggctagcctgaacgcagctgctttcctaaaactgagccaggagcgggagctacccctgcggctgcctcgtgcccatgcagaagtagatgggcgctccactgagcccccagcacccaaggccccgaggccaaagtggcccaaggtcaatggcaagaactatcccaaggcttggcagggggccagctctggggaggctgcaggcccacctggctggcaaggctgccctgatgaaccatggccatctgcaactccttgtgggccatccgtccagccatctcataagcccctgagcaaggctctggagagccctttggggctgcgccctcacctgcccctgctgatgggtggacaggcggctctgaagccggagcctgggcgcccaggcgaggagtcacctgcccctaagcaggaactgcatcagccctctttccccacacctcagctgtcgccgctgccgatgcctggcaaccccgccgactacaatggcctgtgtgttgggcctgagctcactgcactaggcagcttctacctgtactgtggccaagaggggctgcagtgtgggggctactcgccctgccccatgcttcctgagggcaagctgtccccagtggctgcacctcacgaggaggggctcctcttagctccgagctcagtgccctcaggcacccctttccagcaccctccctggggctcctctcgctactgctctagcgaggacactggagtgaatggctacagcatctgcggagtgttgcccctgtctgttacccacgctggcactacctgtggcggctgcccatacaaaatgccttttgcagcaggctgcagatccctgggccagttggaatttcctctcccggaagctggccacccagcctcacccgcccacccactcctggggtgccctgtacccagtgtgccacctgcagcagagcccgtcccccatctccttatattgaataagctgtttggaggaaggtgtctgtctgggaggatggggcagtaaatgaggttggcagagtggcagtgggggctctgcagagccagccttggagcctgctcattctgggcccttgctgccaaggagcccagcctcacctagcaggaaaggagatgaaggccctcctcccaggaggtagggtcttggctgccccgaacttaaatgcttttgaaatctcttagatgtggaaatattttttcgaacctgaaaatgcagctggtagaatttcaatggaagcataatccatgtaaaatatattttagttgatattttgtaaaatgcactttttgtgtgtgttgatcctggtttcccagatctgtatttcagtgtttacaagggaggaaggacctttcctcacctcccttttgacagagattagaagtacttctttaagaaaaaaataaatttgagaaattgtattgatttagaaaaggatcgtt

SEQ ID NO: 376788 - DNA, 416 bp, Homo sapiens
ccttgctccctaggctcttcaggggcttagttcagagataccctaggctaaaaggaaagaggaggaaccagtccttgcacagctgctggtagcttgattccactgccccttcacactctggaaagggagtcccaggaaaatccatactggagacagggtagttgtaggccaggatcactgcacctggggctgggtaggctgcagtgggagagaaagcaggcaggagcaggccagagagggcttctctcattgcccaccttctgtcctgcaggttggaagtactccatgacacacactcggagaaagtcccttcccatgctgagttcgggcctcactggccgccgagagcccctgcagatggaagacagcaacatggagcagggggttgagggtgtggagccaggcatgcccgagag

SEQ ID NO: 376789 - DNA, 4519 bp, Homo sapiens
cccggccggggcctgcgggcgcccagagccgcgccgtccgcgccgcccgttctggttggaagtactccatgacacacactcggagaaagtcccttcccatgctgagttcgggcctcactggccgccgagagcccctgcagatggaagacagcaacatggagcagggggttgagggtgtggagccaggcatgcccgagagcccaggtcacctcacagggcgccgcaagaattacccacttcgtaagcgcccattggttcctgagaagcccaaggcctgcaaagtgctgctgactcgcctggagaatgtggccggtccccggagtgcagatgaggctgatgagctaccgcctgacctgcccaagccccccagcccggccccatccagtgaagaccctggccttgcccagccccgcaagcggcgcctggcctccctcaatgctgaagctctcaataacctgctgctggagcgagaggacaccagcagcctggcaggcacccgccgcagtcgagcaggggatccccaccgcagccgtgaccgtgatcgtgctactgggggctggtcctcctccaagaagcggccccggctgggggaccttggaggaggaagtcgggacctgtctccagagccagcacccgatgaaggtccccgccgagatggagacccagctcccaagagactggctagcctgaacgcagctgctttcctaaaactgagccaggagcgggagctacccctgcggctgcctcgtgcccatgcagaagtagatgggcgctccactgagcccccagcacccaaggccccgaggccaaagtggcccaaggtcaatggcaagaactatcccaaggcttggcagggggccagctctggggaggctgcaggcccacctggctggcaaggctgccctgatgaaccatggccatctgcaactccttgtgggccatccgtccagccatctcataagcccctgagcaaggctctggagagccctttggggctgcgccctcacctgcccctgctgatgggtggacaggcggctctgaagccggagcctgggcgcccaggcgaggagtcacctgcccctaagcaggaactgcatcagccctctttccccacacctcagctgtcgccgctgccgatgcctggcaaccccgccgactacaatggcctgtgtgttgggcctgagctcactgcactaggcagcttctacctgtactgtggccaagaggggctgcagtgtgggggctactcgccctgccccatgcttcctgagggcaagctgtccccagtggctgcacctcacgaggaggggctcctcttagctccgagctcagtgccctcaggcacccctttccagcaccctccctggggctcctctcgctactgctctagcgaggacactggagtgaatggctacagcatctgcggagtgttgcccctgtctgttacccacgctggcactacctgtggcggctgcccatacaaaatgccttttgcagcaggctgcagatccctgggccagttggaatttcctctcccggaagctggccacccagcctcacccgcccacccactcctggggtgccctgtacccagtgtgccacctgcagcagagcccgtcccccatcttcagacacccacctcggagccccagacagtagcccgtgcgtgccctcagagcgccaaacctcccagcggttctaagtcaggtctgcgcacaggctccagctgcaggcacactgcaaggagcaaggctgcccgcaggcctagccaccccaagcagccacgtgtccagcgcccacgccctcgccgccgccgtcgccgccgcactaatggctgggtacctgttggggctgcgtgtgagaaggctgtgtatgtcttggatgagccggagccagccatccgaaagagctaccaggcggtagagcggcatggggagacaatccgagtccgggacaccgtccttctcaaatcaggcccacgaaagacctccacaccttatgtggccaagatctctgccctctgggagaaccccgagtcaggagagctgatgatgagcctcctgtggtattacagacctgagcacttacagggaggccgcagtcccagcatgcacgagcccttgcagaatgaagtgtttgcatcgcgacatcaggaccagaacagtgtggcctgcattgaggagaagtgctatgtgctgacttttgccgagtactgcaggttctgtgccatggccaagcgccgaggtgaaggcctccccagccgaaagacagcactggttcccccctctgcagactattccaccccaccccaccgcacagtgccagaggacacggaccctgagctggtgttcctttgccgccatgtctatgacttccgccacgggcgcatccttaagaacccccagtagcctcctcatgcccatgctggggctacccatgggcaagtggggctcggggtagggggcactgcttgaagcacagcacttggttagggggccacagaggcctaagtttgctggcctgtggttttcttgggggggagggcaggggcccctgtgggttctgggctccaggggagggagctggggaggccagggtataagaaaagcatcagaactctcagcttggcccaaggtaccttctgtggttcccctgggtggagatttccgaaaagtagtcttctctgaggctgggccaagcctgagggaaatggggccctaggagggtgggggcgggaaggaggggcaaggtctttcaggaaccagacccaacaggcccttctgtagcctcccccttgccctcaaagggggagtgggggccagctttacctcacccactgtgacccgccgcttccccttcagcctgggaccaggctttcctagatcccagcacagctctgagcttgttcctttgaggcatagagagccagagtctggcttccagagcattgacttcctcttcctagacttgaggccttttctctggctttcctcctttgccctgcagtagcaactggtgctgggacaagttgacccacctctcacagtcatgggtgtggcccacttgtgggagtctcctgtccacctcccagagacggccacccagcgggtctggcttcccagaaagttaactgatgattgtggggtttgtcatatctgggagggaagatgggtgctgggagagggttgggggcagggggcaaggaaaattgctacctgatttgttgaagatttttcctcttgccttacacatggaggttccaggaaacctcttgcagaacttcacacgtgattcttcaagccacacccacctgaaatcaaaccaaaggagtgctgtggctccccttgccctgccaccctttccctagtcttttgtagattgcactaatttacatcctagcaagaatcaacactgtatcagtccacggacctgctgagctgcagccacttgctctaggagctaaggacttgcattttcagtttgttcctgttgcccagaggccctgttctcacctcatgctgctccccagagtagactaacaggctcagtcccctgttgtccttgtggagactaggccttggccctggccctgagactctgtgagggggctggagcagcctggttatttcctatctgtaccaaagaggagtatggtgggagagggagtggagtgcagtgtggcttgggcctggtgctgggaacctgctagctgagcacttccacaagggcatacccctgggggcaggggctggggctgagaactgcagccctgggtcttcccttagggaggaagggcagatgaacccagcaggcttaggaggtggcactgggtgaggacagctgggcaggggctgcagagggaggtggaaatgaaccctgagggctcccccaacttgccatgccctgtcccttagtagatgagttgctcctgattggtcattgggtttgggtgaggcctggaggcttcagaggtgaatttatgcttgggaagcctgatcccaaacctgaagggaagggacttggatctccttatattgaataagctgtttggaggaaggtgtctgtctgggaggatggggcagtaaatgaggttggcagagtggcagtgggggctctgcagagccagccttggagcctgctcattctgggcccttgctgccaaggagcccagcctcacctagcaggaaaggagatgaaggccctcctcccaggaggtagggtcttggctgccccgaacttaaatgcttttgaaatctcttagatgtggaaatattttttcgaacctgaaaatgcagctggtagaatttcaatggaagcataatccatgtaaaatatattttagttgatattttgtaaaatgcactttttgtgtgtgttgatcctggtttcccagatctgtatttcagtgtttacaagggaggaaggacctttcctcacctcccttttgacagagattagaagtacttctttaagaaaaaaataaatttgagaaattgtattgatttagaaaaggatcgtt

SEQ ID NO: 376790 - DNA, 4520 bp, Homo sapiens
cccggccggggcctgcgggcgcccagagccgcgccgtccgcgccgcccgttctggttggaagtactccatgacacacactcggagaaagtcccttcccatgctgagttcgggcctcactggccgccgagagcccctgcagatggaagacagcaacatggagcagggggttgagggtgtggagccaggcatgcccgagagcccaggtcacctcacagggcgccgcaagaattacccacttcgtaagcgcccattggttcctgagaagcccaaggcctgcaaagtgctgctgactcgcctggagaatgtggccggtccccggagtgcagatgaggctgatgagctaccgcctgacctgcccaagccccccagcccggccccatccagtgaagaccctggccttgcccagccccgcaagcggcgcctggcctccctcaatgctgaagctctcaataacctgctgctggagcgagaggacaccagcagcctggcaggcacccgccgcagtcgagcaggggatccccaccgcagccgtgaccgtgatcgtgctactgggggctggtcctcctccaagaagcggccccggctgggggaccttggaggaggaagtcgggacctgtctccagagccagcacccgatgaaggtccccgccgagatggagacccagctcccaagagactggctagcctgaacgcagctgctttcctaaaactgagccaggagcgggagctacccctgcggctgcctcgtgcccatgcagaagtagatgggcgctccactgagcccccagcacccaaggccccgaggccaaagtggcccaaggtcaatggcaagaactatcccaaggcttggcagggggccagctctggggaggctgcaggcccacctggctggcaaggctgccctgatgaaccatggccatctgcaactccttgtgggccatccgtccagccatctcataagcccctgagcaaggctctggagagccctttggggctgcgccctcacctgcccctgctgatgggtggacaggcggctctgaagccggagcctgggcgcccaggcgaggagtcacctgcccctaagcaggaactgcatcagccctctttccccacacctcagctgtcgccgctgccgatgcctggcaaccccgccgactacaatggcctgtgtgttgggcctgagctcactgcactaggcagcttctacctgtactgtggccaagaggggctgcagtgtgggggctactcgccctgccccatgcttcctgagggcaagctgtccccagtggctgcacctcacgaggaggggctcctcttagctccgagctcagtgccctcaggcacccctttccagcaccctccctggggctcctctcgctactgctctagcgaggacactggagtgaatggctacagcatctgcggagtgttgcccctgtctgttacccacgctggcactacctgtggcggctgcccatacaaaatgccttttgcagcaggctgcagatccctgggccagttggaatttcctctcccggaagctggccacccagcctcacccgcccacccactcctggggtgccctgtacccagtgtgccacctgcagcagagcccgtcccccatcttcagacacccacctcggagccccagacagtagcccgtgcgtgccctcagagcgccaaacctcccagcggttctaagtcaggtctgcgcacaggctccagctgcaggcacactgcaaggagcaaggctgcccgcaggcctagccaccccaagcagccacgtgtccagcgcccacgccctcgccgccgccgtcgccgccgcactaatggctgggtacctgttggggctgcgtgtgagaaggctgtgtatgtcttggatgagccggagccagccatccgaaagagctaccaggcggtagagcggcatggggagacaatccgagtccgggacaccgtccttctcaaatcaggcccacgaaagacctccacaccttatgtggccaagatctctgccctctgggagaaccccgagtcaggagagctgatgatgagcctcctgtggtattacagacctgagcacttacagggaggccgcagtcccagcatgcacgagcccttgcagaatgaagtgtttgcatcgcgacatcaggaccagaacagtgtggcctgcattgaggagaagtgctatgtgctgacttttgccgagtactgcaggttctgtgccatggccaagcgccgaggtgaaggcctccccagccgaaagacagcactggttcccccctctgcagactattccaccccaccccaccgcacagtgccagaggacacggaccctgagctggtgttcctttgccgccatgtctatgacttccgccacgggcgcatccttaagaacccccagtagcctcctcatgcccatgctggggctacccatgggcaagtggggctcggggtagggggcactgcttgaagcacagcacttggttagggggccacagaggcctaagtttgctggcctgtggttttcttgggggggagggcaggggcccctgtgggttctgggctccaggggagggagctggggaggccagggtataagaaaagcatcagaactctcagcttggcccaaggtaccttctgtggttcccctgggtggagatttccgaaaagtagtcttctctgaggctgggccaagcctgagggaaatggggccctaggagggtgggggcgggaaggaggggcaaggtctttcaggaaccagacccaacaggcccttctgtagcctcccccttgccctcaaagggggagtgggggccagctttacctcacccactgtgacccgccgcttccccttcagcctgggaccaggctttcctagatcccagcacagctctgagcttgttcctttgaggcatagagagccagagtctggcttccagagcattgacttcctcttcctagacttgaggccttttctctggctttcctcctttgccctgcagtagcaactggtgctgggacaagttgacccacctctcacagtcatgggtgtggcccacttgtgggagtctcctgtccacctcccagagacggccacccagcgggtctggcttcccagaaagttaactgatgattgtggggtttgtcatatctgggagggaagatgggtgctgggagagggttgggggcagggggcaaggaaaattgctacctgatttgttgaagatttttcctcttgccttacacatggaggttccaggaaacctcttgcagaacttcacacgtgattcttcaagccacacccacctgaaatcaaaccaaaggagtgctgtggctccccttgccctgccaccctttccctagtcttttgtagattgcactaatttacatcctagcaagaatcaacactgtatcagtccacggacctgctgagctgcagccacttgctctaggagctaaggacttgcattttcagtttgttcctgttgcccagaggccctgttctcacctcatgctgctccccagagtagactaacaggctcagtcccctgttgtccttgtggagactaggccttggccctggccctgagactctgtgagggggctggagcagcctggttatttcctatctgtaccaaagaggagtatggtgggagagggagtggagtgcagtgtggcttgggcctggtgctgggaacctgctagctgagcacttccacaagggcatacccctgggggcaggggctggggctgagaactgcagccctgggtcttcccttagggaggaagggcagatgaacccagcaggcttaggaggtggcactgggtgaggacagctgggcaggggctgcagagggaggtggaaatgaaccctgagggctcccccaacttgccatgccctgtcccttagtagatgagttgctcctgattggtcattgggtttgggtgaggcctggaggcttcagaggtgaatttatgcttgggaagcctgatcccaaacctgaagggaagggacttggatctccttatattgaataagctgtttggaggaaggtgtctgtctgggaggatggggcagtaaatgaggttggcagagtggcagtgggggctctgcagagccagccttggagcctgctcattctgggcccttgctgccaaggagcccagcctcacctagcaggaaaggagatgaaggccctcctcccaggaggtagggtcttggctgccccgaacttaaatgcttttgaaatctcttagatgtggaaatattttttcgaacctgaaaatgcagctggtagaatttcaatggaagcataatccatgtaaaatatattttagttgatattttgtaaaatgcactttttgtgtgtgttgatcctggtttcccagatctgtatttcagtgtttacaagggaggaaggacctttcctcacctcccttttcgtcatgatctacaagattgtttcttaaccactaaatacgtttgttttaattgtaccgtcttcgtaactattat

SEQ ID NO: 376791 - DNA, 2779 bp, Homo sapiens
cagcctggagtgcagctcatactccatgcccagaattcctgcctcgccactgtcctgctgccctccagacatgctggggccctgcatgctgctgctgctgctgctgctgggcctgaggctacagctctccctgggcatcatcccagttgaggaggagaacccggacttctggaaccgcgaggcagccgaggccctgggtgccgccaagaagctgcagcctgcacagacagccgccaagaacctcatcatcttcctgggcgatgggatgggggtgtctacggtgacagctgccaggatcctaaaagggcagaagaaggacaaactggggcctgagatacccctggccatggaccgcttcccatatgtggctctgtccaagacatacaatgtagacaaacatgtgccagacagtggagccacagccacggcctacctgtgcggggtcaagggcaacttccagaccattggcttgagtgcagccgcccgctttaaccagtgcaacacgacacgcggcaacgaggtcatctccgtgatgaatcgggccaagaaagcagggaagtcagtgggagtggtaaccaccacacgagtgcagcacgcctcgccagccggcacctacgcccacacggtgaaccgcaactggtactcggacgccgacgtgcctgcctcggcccgccaggaggggtgccaggacatcgctacgcagctcatctccaacatggacattgacgtgatcctaggtggaggccgaaagtacatgtttcgcatgggaaccccagaccctgagtacccagatgactacagccaaggtgggaccaggctggacgggaagaatctggtgcaggaatggctggcgaagcgccagggtgcccggtacgtgtggaaccgcactgagctcatgcaggcttccctggacccgtctgtgacccatctcatgggtctctttgagcctggagacatgaaatacgagatccaccgagactccacactggacccctccctgatggagatgacagaggctgccctgcgcctgctgagcaggaacccccgcggcttcttcctcttcgtggagggtggtcgcatcgaccatggtcatcatgaaagcagggcttaccgggcactgactgagacgatcatgttcgacgacgccattgagagggcgggccagctcaccagcgaggaggacacgctgagcctcgtcactgccgaccactcccacgtcttctccttcggaggctaccccctgcgagggagctccatcttcgggctggcccctggcaaggcccgggacaggaaggcctacacggtcctcctatacggaaacggtccaggctatgtgctcaaggacggcgcccggccggatgttaccgagagcgagagcgggagccccgagtatcggcagcagtcagcagtgcccctggacgaagagacccacgcaggcgaggacgtggcggtgttcgcgcgcggcccgcaggcgcacctggttcacggcgtgcaggagcagaccttcatagcgcacgtcatggccttcgccgcctgcctggagccctacaccgcctgcgacctggcgccccccgccggcaccaccgacgccgcgcacccggggcggtccgtggtccccgcgttgcttcctctgctggccgggaccctgctgctgctggagacggccactgctccctgagtgtcccgtccctggggctcctgcttccccatcccggagttctcctgctccccacctcctgtcgtcctgcctggcctccagcccgagtcgtcatccccggagtccctatacagaggtcctgccatggaaccttcccctccccgtgcgctctggggactgagcccatgacaccaaacctgccccttggctgctctcggactccctaccccaaccccagggactgcaggttgtgccctgtggctgcctgcaccccaggaaaggagggggctcaggccatccagccaccacctacagcccagtgggtaccaggcaggctcccttcctggggaaaagaagcacccagaccccgcgccccgctgatctttgcttcagtccttgaatcacctgtgggacttgaggactcgggatcttcaggacgcctggagaagggtggtttcctgccaccctgctggccaaggaggctcctggggtggggatcaccagggggattttgacacagccttcggctgccccccactaagctaattccacacccctgtacccccccagggggccctctgcctcatggcaaaggcttgccccaaatctcaacttctcagacgttccatacccccacatgccaatttcagcacccaactgagatccgaggagctcctgggaagccctgggtgcaggacactggtcgagagccaaaggtccctccccagacatctggacactgggcatagatttctcaagaaggaagactcccctgcctccccagggcctctgctctcctgggagacaaagcaataataaaaggaagtgtttgtaatcccagcactttgggaggccgaggtgggcggatcacgaggtcaggagatggagaccatcctggctaacacggtgaaaccccttatctatgcgcctgtagtcccagctacccaggaggctgaagcaggataatcgcttgaacccgggcggcggagattgcagtgagccgaggtcatgccactgcactgcagcctgggcgacagagcgagattctgcctcaaaaataaacaaataaattttaaaaataaataaataataaaaggaagtgttagacaatgtaatgccagt

SEQ ID NO: 376792 - DNA, 2658 bp, Homo sapiens
tgatttttgctctccccctggccagttgaggaggagaacccggacttctggaaccgcgaggcagccgaggccctgggtgccgccaagaagctgcagcctgcacagacagccgccaagaacctcatcatcttcctgggcgatgggatgggggtgtctacggtgacagctgccaggatcctaaaagggcagaagaaggacaaactggggcctgagatacccctggccatggaccgcttcccatatgtggctctgtccaagacatacaatgtagacaaacatgtgccagacagtggagccacagccacggcctacctgtgcggggtcaagggcaacttccagaccattggcttgagtgcagccgcccgctttaaccagtgcaacacgacacgcggcaacgaggtcatctccgtgatgaatcgggccaagaaagcagggaagtcagtgggagtggtaaccaccacacgagtgcagcacgcctcgccagccggcacctacgcccacacggtgaaccgcaactggtactcggacgccgacgtgcctgcctcggcccgccaggaggggtgccaggacatcgctacgcagctcatctccaacatggacattgacgtgatcctaggtggaggccgaaagtacatgtttcgcatgggaaccccagaccctgagtacccagatgactacagccaaggtgggaccaggctggacgggaagaatctggtgcaggaatggctggcgaagcgccagggtgcccggtacgtgtggaaccgcactgagctcatgcaggcttccctggacccgtctgtgacccatctcatgggtctctttgagcctggagacatgaaatacgagatccaccgagactccacactggacccctccctgatggagatgacagaggctgccctgcgcctgctgagcaggaacccccgcggcttcttcctcttcgtggagggtggtcgcatcgaccatggtcatcatgaaagcagggcttaccgggcactgactgagacgatcatgttcgacgacgccattgagagggcgggccagctcaccagcgaggaggacacgctgagcctcgtcactgccgaccactcccacgtcttctccttcggaggctaccccctgcgagggagctccatcttcgggctggcccctggcaaggcccgggacaggaaggcctacacggtcctcctatacggaaacggtccaggctatgtgctcaaggacggcgcccggccggatgttaccgagagcgagagcgggagccccgagtatcggcagcagtcagcagtgcccctggacgaagagacccacgcaggcgaggacgtggcggtgttcgcgcgcggcccgcaggcgcacctggttcacggcgtgcaggagcagaccttcatagcgcacgtcatggccttcgccgcctgcctggagccctacaccgcctgcgacctggcgccccccgccggcaccaccgacgccgcgcacccggggcggtccgtggtccccgcgttgcttcctctgctggccgggaccctgctgctgctggagacggccactgctccctgagtgtcccgtccctggggctcctgcttccccatcccggagttctcctgctccccacctcctgtcgtcctgcctggcctccagcccgagtcgtcatccccggagtccctatacagaggtcctgccatggaaccttcccctccccgtgcgctctggggactgagcccatgacaccaaacctgccccttggctgctctcggactccctaccccaaccccagggactgcaggttgtgccctgtggctgcctgcaccccaggaaaggagggggctcaggccatccagccaccacctacagcccagtgggtaccaggcaggctcccttcctggggaaaagaagcacccagaccccgcgccccgctgatctttgcttcagtccttgaatcacctgtgggacttgaggactcgggatcttcaggacgcctggagaagggtggtttcctgccaccctgctggccaaggaggctcctggggtggggatcaccagggggattttgacacagccttcggctgccccccactaagctaattccacacccctgtacccccccagggggccctctgcctcatggcaaaggcttgccccaaatctcaacttctcagacgttccatacccccacatgccaatttcagcacccaactgagatccgaggagctcctgggaagccctgggtgcaggacactggtcgagagccaaaggtccctccccagacatctggacactgggcatagatttctcaagaaggaagactcccctgcctccccagggcctctgctctcctgggagacaaagcaataataaaaggaagtgtttgtaatcccagcactttgggaggccgaggtgggcggatcacgaggtcaggagatggagaccatcctggctaacacggtgaaaccccttatctatgcgcctgtagtcccagctacccaggaggctgaagcaggataatcgcttgaacccgggcggcggagattgcagtgagccgaggtcatgccactgcactgcagcctgggcgacagagcgagattctgcctcaaaaataaacaaataaattttaaaaataaataaataataaaaggaagtgttagacaatgtaatgccagt

SEQ ID NO: 376793 - DNA, 2435 bp, Homo sapiens
ccccagagaagagctcagagtgtctctgtccccagacatacaatgtagacaaacatgtgccagacagtggagccacagccacggcctacctgtgcggggtcaagggcaacttccagaccattggcttgagtgcagccgcccgctttaaccagtgcaacacgacacgcggcaacgaggtcatctccgtgatgaatcgggccaagaaagcagggaagtcagtgggagtggtaaccaccacacgagtgcagcacgcctcgccagccggcacctacgcccacacggtgaaccgcaactggtactcggacgccgacgtgcctgcctcggcccgccaggaggggtgccaggacatcgctacgcagctcatctccaacatggacattgacgtgatcctaggtggaggccgaaagtacatgtttcgcatgggaaccccagaccctgagtacccagatgactacagccaaggtgggaccaggctggacgggaagaatctggtgcaggaatggctggcgaagcgccagggtgcccggtacgtgtggaaccgcactgagctcatgcaggcttccctggacccgtctgtgacccatctcatgggtctctttgagcctggagacatgaaatacgagatccaccgagactccacactggacccctccctgatggagatgacagaggctgccctgcgcctgctgagcaggaacccccgcggcttcttcctcttcgtggagggtggtcgcatcgaccatggtcatcatgaaagcagggcttaccgggcactgactgagacgatcatgttcgacgacgccattgagagggcgggccagctcaccagcgaggaggacacgctgagcctcgtcactgccgaccactcccacgtcttctccttcggaggctaccccctgcgagggagctccatcttcgggctggcccctggcaaggcccgggacaggaaggcctacacggtcctcctatacggaaacggtccaggctatgtgctcaaggacggcgcccggccggatgttaccgagagcgagagcgggagccccgagtatcggcagcagtcagcagtgcccctggacgaagagacccacgcaggcgaggacgtggcggtgttcgcgcgcggcccgcaggcgcacctggttcacggcgtgcaggagcagaccttcatagcgcacgtcatggccttcgccgcctgcctggagccctacaccgcctgcgacctggcgccccccgccggcaccaccgacgccgcgcacccggggcggtccgtggtccccgcgttgcttcctctgctggccgggaccctgctgctgctggagacggccactgctccctgagtgtcccgtccctggggctcctgcttccccatcccggagttctcctgctccccacctcctgtcgtcctgcctggcctccagcccgagtcgtcatccccggagtccctatacagaggtcctgccatggaaccttcccctccccgtgcgctctggggactgagcccatgacaccaaacctgccccttggctgctctcggactccctaccccaaccccagggactgcaggttgtgccctgtggctgcctgcaccccaggaaaggagggggctcaggccatccagccaccacctacagcccagtgggtaccaggcaggctcccttcctggggaaaagaagcacccagaccccgcgccccgctgatctttgcttcagtccttgaatcacctgtgggacttgaggactcgggatcttcaggacgcctggagaagggtggtttcctgccaccctgctggccaaggaggctcctggggtggggatcaccagggggattttgacacagccttcggctgccccccactaagctaattccacacccctgtacccccccagggggccctctgcctcatggcaaaggcttgccccaaatctcaacttctcagacgttccatacccccacatgccaatttcagcacccaactgagatccgaggagctcctgggaagccctgggtgcaggacactggtcgagagccaaaggtccctccccagacatctggacactgggcatagatttctcaagaaggaagactcccctgcctccccagggcctctgctctcctgggagacaaagcaataataaaaggaagtgtttgtaatcccagcactttgggaggccgaggtgggcggatcacgaggtcaggagatggagaccatcctggctaacacggtgaaaccccttatctatgcgcctgtagtcccagctacccaggaggctgaagcaggataatcgcttgaacccgggcggcggagattgcagtgagccgaggtcatgccactgcactgcagcctgggcgacagagcgagattctgcctcaaaaataaacaaataaattttaaaaataaataaataataaaaggaagtgttagacaatgtaatgccagt

SEQ ID NO: 376794 - DNA, 1834 bp, Homo sapiens
cggtacccatcaggcgaagactgtggcacgagactccacactggacccctccctgatggagatgacagaggctgccctgcgcctgctgagcaggaacccccgcggcttcttcctcttcgtggagggtggtcgcatcgaccatggtcatcatgaaagcagggcttaccgggcactgactgagacgatcatgttcgacgacgccattgagagggcgggccagctcaccagcgaggaggacacgctgagcctcgtcactgccgaccactcccacgtcttctccttcggaggctaccccctgcgagggagctccatcttcgggctggcccctggcaaggcccgggacaggaaggcctacacggtcctcctatacggaaacggtccaggctatgtgctcaaggacggcgcccggccggatgttaccgagagcgagagcgggagccccgagtatcggcagcagtcagcagtgcccctggacgaagagacccacgcaggcgaggacgtggcggtgttcgcgcgcggcccgcaggcgcacctggttcacggcgtgcaggagcagaccttcatagcgcacgtcatggccttcgccgcctgcctggagccctacaccgcctgcgacctggcgccccccgccggcaccaccgacgccgcgcacccggggcggtccgtggtccccgcgttgcttcctctgctggccgggaccctgctgctgctggagacggccactgctccctgagtgtcccgtccctggggctcctgcttccccatcccggagttctcctgctccccacctcctgtcgtcctgcctggcctccagcccgagtcgtcatccccggagtccctatacagaggtcctgccatggaaccttcccctccccgtgcgctctggggactgagcccatgacaccaaacctgccccttggctgctctcggactccctaccccaaccccagggactgcaggttgtgccctgtggctgcctgcaccccaggaaaggagggggctcaggccatccagccaccacctacagcccagtgggtaccaggcaggctcccttcctggggaaaagaagcacccagaccccgcgccccgctgatctttgcttcagtccttgaatcacctgtgggacttgaggactcgggatcttcaggacgcctggagaagggtggtttcctgccaccctgctggccaaggaggctcctggggtggggatcaccagggggattttgacacagccttcggctgccccccactaagctaattccacacccctgtacccccccagggggccctctgcctcatggcaaaggcttgccccaaatctcaacttctcagacgttccatacccccacatgccaatttcagcacccaactgagatccgaggagctcctgggaagccctgggtgcaggacactggtcgagagccaaaggtccctccccagacatctggacactgggcatagatttctcaagaaggaagactcccctgcctccccagggcctctgctctcctgggagacaaagcaataataaaaggaagtgtttgtaatcccagcactttgggaggccgaggtgggcggatcacgaggtcaggagatggagaccatcctggctaacacggtgaaaccccttatctatgcgcctgtagtcccagctacccaggaggctgaagcaggataatcgcttgaacccgggcggcggagattgcagtgagccgaggtcatgccactgcactgcagcctgggcgacagagcgagattctgcctcaaaaataaacaaataaattttaaaaataaataaataataaaaggaagtgttagacaatgtaatgccagt

SEQ ID NO: 376795 - DNA, 1416 bp, Homo sapiens
cagcctggagtgcagctcatactccatgcccagaattcctgcctcgccactgtcctgctgccctccagacatgctggggccctgcatgctgctgctgctgctgctgctgggcctgaggctacagctctccctgggcatcatcccagttgaggaggagaacccggacttctggaaccgcgaggcagccgaggccctgggtgccgccaagaagctgcagcctgcacagacagccgccaagaacctcatcatcttcctgggcgatgggatgggggtgtctacggtgacagctgccaggatcctaaaagggcagaagaaggacaaactggggcctgagatacccctggccatggaccgcttcccatatgtggctctgtccaagacatacaatgtagacaaacatgtgccagacagtggagccacagccacggcctacctgtgcggggtcaagggcaacttccagaccattggcttgagtgcagccgcccgctttaaccagtgcaacacgacacgcggcaacgaggtcatctccgtgatgaatcgggccaagaaagcagggaagtcagtgggagtggtaaccaccacacgagtgcagcacgcctcgccagccggcacctacgcccacacggtgaaccgcaactggtactcggacgccgacgtgcctgcctcggcccgccaggaggggtgccaggacatcgctacgcagctcatctccaacatggacattgacgtgatcctaggtggaggccgaaagtacatgtttcgcatgggaaccccagaccctgagtacccagatgactacagccaaggtgggaccaggctggacgggaagaatctggtgcaggaatggctggcgaagcgccagggtgcccggtacgtgtggaaccgcactgagctcatgcaggcttccctggacccgtctgtgacccatctcatgggtctctttgagcctggagacatgaaatacgagatccaccgagactccacactggacccctccctgatggagatgacagaggctgccctgcgcctgctgagcaggaacccccgcggcttcttcctcttcgtggagggtggtcgcatcgaccatggtcatcatgaaagcagggcttaccgggcactgactgagacgatcatgttcgacgacgccattgagagggcgggccagctcaccagcgaggaggacacgctgagcctcgtcactgccgaccactcccacgtcttctccttcggaggctaccccctgcgagggagctccatcttcgggctggcccctggcaaggcccgggacaggaaggcctacacggtcctcctatacggaaacggtccaggctatgtgctcaaggacggcgcccggccggatgttaccgagagcgagagcggtgagtgccgcggggtggccccctgagggggaccagg

SEQ ID NO: 376796 - DNA, 757 bp, Homo sapiens
cggtacccatcaggcgaagactgtggcatccttgaatcacctgtgggacttgaggactcgggatcttcaggacgcctggagaagggtggtttcctgccaccctgctggccaaggaggctcctggggtggggatcaccagggggattttgacacagccttcggctgccccccactaagctaattccacacccctgtacccccccagggggccctctgcctcatggcaaaggcttgccccaaatctcaacttctcagacgttccatacccccacatgccaatttcagcacccaactgagatccgaggagctcctgggaagccctgggtgcaggacactggtcgagagccaaaggtccctccccagacatctggacactgggcatagatttctcaagaaggaagactcccctgcctccccagggcctctgctctcctgggagacaaagcaataataaaaggaagtgtttgtaatcccagcactttgggaggccgaggtgggcggatcacgaggtcaggagatggagaccatcctggctaacacggtgaaaccccttatctatgcgcctgtagtcccagctacccaggaggctgaagcaggataatcgcttgaacccgggcggcggagattgcagtgagccgaggtcatgccactgcactgcagcctgggcgacagagcgagattctgcctcaaaaataaacaaataaattttaaaaataaataaataataaaaggaagtgttagacaatgtaatgccagt

SEQ ID NO: 376797 - DNA, 2745 bp, Homo sapiens
cagcctggagtgcagctcatactccatgcccagaattcctgcctcgccactgtcctgctgccctccagacatgctggggccctgcatgctgctgctgctgctgctgctgggcctgaggctacagctctccctgggcatcatcccagttgaggaggagaacccggacttctggaaccgcgaggcagccgaggccctgggtgccgccaagaagctgcagcctgcacagacagccgccaagaacctcatcatcttcctgggcgatgggatgggggtgtctacggtgacagctgccaggatcctaaaagggcagaagaaggacaaactggggcctgagatacccctggccatggaccgcttcccatatgtggctctgtccaagacatacaatgtagacaaacatgtgccagacagtggagccacagccacggcctacctgtgcggggtcaagggcaacttccagaccattggcttgagtgcagccgcccgctttaaccagtgcaacacgacacgcggcaacgaggtcatctccgtgatgaatcgggccaagaaagcagggaagtcagtgggagtggtaaccaccacacgagtgcagcacgcctcgccagccggcacctacgcccacacggtgaaccgcaactggtactcggacgccgacgtgcctgcctcggcccgccaggaggggtgccaggacatcgctacgcagctcatctccaacatggacattgacgtgatcctaggtggaggccgaaagtacatgtttcgcatgggaaccccagaccctgagtacccagatgactacagccaaggtgggaccaggctggacgggaagaatctggtgcaggaatggctggcgaagcgccagggtgcccggtacgtgtggaaccgcactgagctcatgcaggcttccctggacccgtctgtgacccatctcatgggtctctttgagcctggagacatgaaatacgagatccaccgagactccacactggacccctccctgatggagatgacagaggctgccctgcgcctgctgagcaggaacccccgcggcttcttcctcttcgtggagggtggtcgcatcgaccatggtcatcatgaaagcagggcttaccgggcactgactgagacgatcatgttcgacgacgccattgagagggcgggccagctcaccagcgaggaggacacgctgagcctcgtcactgccgaccactcccacgtcttctccttcggaggctaccccctgcgagggagctccatcttcgggctggcccctggcaaggcccgggacaggaaggcctacacggtcctcctatacggaaacggtccaggctatgtgctcaaggacggcgcccggccggatgttaccgagagcgagagcgggagccccgagtatcggcagcagtcagcagtgcccctggacgaagagacccacgcaggcgaggacgtggcggtgttcgcgcgcggcccgcaggcgcacctggttcacggcgtgcaggagcagaccttcatagcgcacgtcatggccttcgccgcctgcctggagccctacaccgcctgcgacctggcgccccccgccggcaccaccgacgccgcgcacccggggcggtccgtggtccccgcgttgcttcctctgctggccgggaccctgctgctgctggagacggccactgctccctgagtgtcccgtccctggggctcctgcttccccatcccggagttctcctgctccccacctcctgtcgtcctgcctggcctccagcccgagtcgtcatccccggagtccctatacagaggtcctgccatggaaccttcccctccccgtgcgctctggggactgagcccatgacaccaaacctgccccttggctgctctcggactccctaccccaaccccagggactgcaggttgtgccctgtggctgcctgcaccccaggaaaggagggggctcaggccatccagccaccacctacagcccagtgggtaccaggcaggctcccttcctggggaaaagaagcacccagaccccgcgccccgctgatctttgcttcagtccttgaatcacctgtgggacttgaggactcgggatcttcaggacgcctggagaagggtggtttcctgccaccctgctggccaaggaggctcctggggtggggatcaccagggggattttgacacagccttcggctgccccccactaagctaattccacacccctgtacccccccagggggccctctgcctcatggcaaaggcttgccccaaatctcaacttctcagacgttccatacccccacatgccaatttcagcacccaactgagatccgaggagctcctgggaagccctgggtgcaggacactggtcgagagccaaaggtccctccccagacatctggacactgggcatagatttctcaagaaggaagactcccctgcctccccagggcctctgctctcctgggagacaaagcaataataaaaggaagtgtttgtaatcccagcactttgggaggccgaggtgggcggatcacgaggtcaggagatggagaccatcctggctaacacggtgaaaccccttatctatgcgcctgtagtcccagctacccaggaggctgaagcaggataatcgcttgaacccgggcggcggagattgcagtgagccgaggtcatgccactgcactgcagcctggcgcaatcacgccaaaaaaaatttaaaaatataaatgaaaatacagggggcataatatt

SEQ ID NO: 376798 - DNA, 2389 bp, Homo sapiens
  misc_feature (23)..(23): n is a, c, g, or t
cccgccgtaccaagttgcgcccnccgtaccagttgcggcctacctgtgcggggtcaagggcaacttccagaccattggcttgagtgcagccgcccgctttaaccagtgcaacacgacacgcggcaacgaggtcatctccgtgatgaatcgggccaagaaagcagggaagtcagtgggagtggtaaccaccacacgagtgcagcacgcctcgccagccggcacctacgcccacacggtgaaccgcaactggtactcggacgccgacgtgcctgcctcggcccgccaggaggggtgccaggacatcgctacgcagctcatctccaacatggacattgacgtgatcctaggtggaggccgaaagtacatgtttcgcatgggaaccccagaccctgagtacccagatgactacagccaaggtgggaccaggctggacgggaagaatctggtgcaggaatggctggcgaagcgccagggtgcccggtacgtgtggaaccgcactgagctcatgcaggcttccctggacccgtctgtgacccatctcatgggtctctttgagcctggagacatgaaatacgagatccaccgagactccacactggacccctccctgatggagatgacagaggctgccctgcgcctgctgagcaggaacccccgcggcttcttcctcttcgtggagggtggtcgcatcgaccatggtcatcatgaaagcagggcttaccgggcactgactgagacgatcatgttcgacgacgccattgagagggcgggccagctcaccagcgaggaggacacgctgagcctcgtcactgccgaccactcccacgtcttctccttcggaggctaccccctgcgagggagctccatcttcgggctggcccctggcaaggcccgggacaggaaggcctacacggtcctcctatacggaaacggtccaggctatgtgctcaaggacggcgcccggccggatgttaccgagagcgagagcgggagccccgagtatcggcagcagtcagcagtgcccctggacgaagagacccacgcaggcgaggacgtggcggtgttcgcgcgcggcccgcaggcgcacctggttcacggcgtgcaggagcagaccttcatagcgcacgtcatggccttcgccgcctgcctggagccctacaccgcctgcgacctggcgccccccgccggcaccaccgacgccgcgcacccggggcggtccgtggtccccgcgttgcttcctctgctggccgggaccctgctgctgctggagacggccactgctccctgagtgtcccgtccctggggctcctgcttccccatcccggagttctcctgctccccacctcctgtcgtcctgcctggcctccagcccgagtcgtcatccccggagtccctatacagaggtcctgccatggaaccttcccctccccgtgcgctctggggactgagcccatgacaccaaacctgccccttggctgctctcggactccctaccccaaccccagggactgcaggttgtgccctgtggctgcctgcaccccaggaaaggagggggctcaggccatccagccaccacctacagcccagtgggtaccaggcaggctcccttcctggggaaaagaagcacccagaccccgcgccccgctgatctttgcttcagtccttgaatcacctgtgggacttgaggactcgggatcttcaggacgcctggagaagggtggtttcctgccaccctgctggccaaggaggctcctggggtggggatcaccagggggattttgacacagccttcggctgccccccactaagctaattccacacccctgtacccccccagggggccctctgcctcatggcaaaggcttgccccaaatctcaacttctcagacgttccatacccccacatgccaatttcagcacccaactgagatccgaggagctcctgggaagccctgggtgcaggacactggtcgagagccaaaggtccctccccagacatctggacactgggcatagatttctcaagaaggaagactcccctgcctccccagggcctctgctctcctgggagacaaagcaataataaaaggaagtgtttgtaatcccagcactttgggaggccgaggtgggcggatcacgaggtcaggagatggagaccatcctggctaacacggtgaaaccccttatctatgcgcctgtagtcccagctacccaggaggctgaagcaggataatcgcttgaacccgggcggcggagattgcagtgagccgaggtcatgccactgcactgcagcctgggcgacagagcgagattctgcctcaaaaataaacaaataaattttaaaaataaataaataataaaaggaagtgttagacaatgtaatgccagt

SEQ ID NO: 376799 - DNA, 2469 bp, Homo sapiens
cagcctggagtgcagctcatactccatgcccagaattcctgcctcgccactgtcctgctgccctccagacatgctggggccctgcatgctgctgctgctgctgctgctgggcctgaggctacagctctccctgggcatcatcccagttgaggaggagaacccggacttctggaaccgcgaggcagccgaggccctgggtgccgccaagaagctgcagcctgcacagacagccgccaagaacctcatcatcttcctgggcgatgggatgggggtgtctacggtgacagctgccaggatcctaaaagggcagaagaaggacaaactggggcctgagatacccctggccatggaccgcttcccatatgtggctctgtccaagacatacaatgtagacaaacatgtgccagacagtggagccacagccacggcctacctgtgcggggtcaagggcaacttccagaccattggcttgagtgcagccgcccgctttaaccagtgcaacacgacacgcggcaacgaggtcatctccgtgatgaatcgggccaagaaagcagggaagtcagtgggagtggtaaccaccacacgagtgcagcacgcctcgccagccggcacctacgcccacacggtgaaccgcaactggtactcggacgccgacgtgcctgcctcggcccgccaggaggggtgccaggacatcgctacgcagctcatctccaacatggacattgacgtgatcctaggtggaggccgaaagtacatgtttcgcatgggaaccccagaccctgagtacccagatgactacagccaaggtgggaccaggctggacgggaagaatctggtgcaggaatggctggcgaagcgccagggtgcccggtacgtgtggaaccgcactgagctcatgcaggcttccctggacccgtctgtgacccatctcatgggtctctttgagcctggagacatgaaatacgagatccaccgagactccacactggacccctccctgatggagatgacagaggctgccctgcgcctgctgagcaggaacccccgcggcttcttcctcttcgtggagggtggtcgcatcgaccatggtcatcatgaaagcagggcttaccgggcactgactgagacgatcatgttcgacgacgccattgagagggcgggccagctcaccagcgaggaggacacgctgagcctcgtcactgccgaccactcccacgtcttctccttcggaggctaccccctgcgagggagctccatcttcgggctggcccctggcaaggcccgggacaggaaggcctacacggtcctcctatacggaaacggtccaggctatgtgctcaaggacggcgcccggccggatgttaccgagagcgagagcgggagccccgagtatcggcagcagtcagcagtgcccctggacgaagagacccacgcaggcgaggacgtggcggtgttcgcgcgcggcccgcaggcgcacctggttcacggcgtgcaggagcagaccttcatagcgcacgtcatggccttcgccgcctgcctggagccctacaccgcctgcgacctggcgccccccgccggcaccaccgacgccgcgcacccggggcggtccgtggtccccgcgttgcttcctctgctggccgggaccctgctgctgctggagacggccactgctccctgagtgtcccgtccctggggctcctgcttccccatcccggagttctcctgctccccacctcctgtcgtcctgcctggcctccagcccgagtcgtcatccccggagtccctatacagaggtcctgccatggaaccttcccctccccgtgcgctctggggactgagcccatgacaccaaacctgccccttggctgctctcggactccctaccccaaccccagggactgcaggttgtgccctgtggctgcctgcaccccaggaaaggagggggctcaggccatccagccaccacctacagcccagtgggtaccaggcaggctcccttcctggggaaaagaagcacccagaccccgcgccccgctgatctttgcttcagtccttgaatcacctgtgggacttgaggactcgggatcttcaggacgcctggagaagggtggtttcctgccaccctgctggccaaggaggctcctggggtggggatcaccagggggattttgacacagccttcggctgccccccactaagctaattccacacccctgtacccccccagggggccctctgcctcatggcaaaggcttgccccaaatctcaacttctcagacgttccatacccccacatgccaatttcagcacccaactgagatccgaggagctcctgggaagccctgggtgcaggacactggtcgagagccaaaggtccctccccagacatctggacactgggcatagatttctcaagaaggaagactccctttggccaggcacagtggctcacgcctgtaatcccagcac

SEQ ID NO: 376800 - DNA, 284 bp, Homo sapiens
acgcggcaacgaggtcatctccgtgatgaatcgggccaagaaagcaggtgagctggggcccgctgctgggtcacggccaggtcacagacgttggtcacatatactgacctctgacacccttagggaagtcagtgggagtggtaaccaccacacgagtgcagcacgcctcgccagccggcacctacgcccacacggtgaaccgcaactggtactcggacgccgacgtgcctgcctcggcccgccaggaggggtgccaggacatcgctacgcagctcatctccaac

SEQ ID NO: 376801 - DNA, 757 bp, Homo sapiens
gaagggattttcttcaggaacctccttgtggctctgccatggcggggagggttggggagtgggccctacatccaatgactggtgttctcataaggagagagagacaaagagtagacagacacaagggagaaggccgtgtgaagatggagacagagattggaatgatacagccacaagccaagaaacatctgcggccgtcagaagttggaagaggcaaggaatgatttattctttcccactcattgtttcaccaatgagcaccttccatgtgccaccgttctgaccctgctgacaatgtggtttcagacttctggcccccagaactgtgaaagagtaaatttctgttaagttatcttgcttgtggtactttgttacagcagccctgtggatctaatatagtcataagagacattgtgacctcctccctgctctcttgaaccactcattctgggagaagtcagctgccatgtcatgaagctactcagggaggtccatggagaggtccacatggcaaggaactgaggcctcctgccagtagccagcaccatcttgctggccatgtgagcgtgccatcttagatgcagatcatacggccccagtcaagccttcaaatgactgcatccctacttgacattttgactgtaacctcatgagaaaccctaagccagaacaccagctaagccactccccaattcctcatcaagagaaactgagataataaatgtttattattgttttaagctactaaattttgagg

SEQ ID NO: 376802 - DNA, 743 bp, Homo sapiens
ctgaaagctcagctgaccccgaggctcttctggtcatgcttagagtgggccctacatccaatgactggtgttctcataaggagagagagacaaagagtagacagacacaagggagaaggccgtgtgaagatggagacagagattggaatgatacagccacaagccaagaaacatctgcggccgtcagaagttggaagaggcaaggaatgatttattctttcccactcattgtttcaccaatgagcaccttccatgtgccaccgttctgaccctgctgacaatgtggtttcagacttctggcccccagaactgtgaaagagtaaatttctgttaagttatcttgcttgtggtactttgttacagcagccctgtggatctaatatagtcataagagacattgtgacctcctccctgctctcttgaaccactcattctgggagaagtcagctgccatgtcatgaagctactcagggaggtccatggagaggtccacatggcaaggaactgaggcctcctgccagtagccagcaccatcttgctggccatgtgagcgtgccatcttagatgcagatcatacggccccagtcaagccttcaaatgactgcatccctacttgacattttgactgtaacctcatgagaaaccctaagccagaacaccagctaagccactccccaattcctcatcaagagaaactgagataataaatgtttattattgttttaagctactaaattttgagg

SEQ ID NO: 376803 - DNA, 975 bp, Homo sapiens
agttgttacatgaaatctgcagtttcataatttccgtgggtcgggccgggcgggccaggcgctgggcacggtgatggccaccactggggccctgggcaactactacgtggactcgttcctgctgggcgccgacgccgcggatgagctgagcgttggccgctatgcgccggggaccctgggccagcctccccggcaggcggcgacgctggccgagcaccccgacttcagcccgtgcagcttccagtccaaggcgacggtgtttggcgcctcgtggaacccagtgcacgcggcgggcgccaacgctgtacccgctgcggtgtaccaccaccatcaccaccacccctacgtgcacccccaggcgcccgtggcggcggcggcgccggacggcagttgatagagaaaaacaacccagcgaaggcgccttctctgaaaacaatgctgagaatgagagcggcggagacaagccccccatcgatcccaataacccagcagccaactggcttcatgcgcgctccactcggaaaaagcggtgcccctatacaaaacaccagaccctggaactggagaaagagtttctgttcaacatgtacctcaccagggaccgcaggtacgaggtggctcgactgctcaacctcaccgagaggcaggtcaagatctggttccagaaccgcaggatgaaaatgaagaaaatcaacaaagaccgagcaaaagacgagtgatgccatttgggcttatttagaaaaaagggtaagctagagagaaaaagaaagaactgtccgtcccccttccgcttttcttgtaaccaagcttagctagatccggaaagggttaaactaggaattttccaggacgtcagtgtgagctgcgtgagggagaggcgccttttaaaagggcggggcttgggggtgggaattcaacgggaagggatacggggggaaggtgaaggggcaacggtgtcgttttcgtttgttttcc

SEQ ID NO: 376804 - DNA, 814 bp, Homo sapiens
cactggcgggcgcaggttgcctaggggctgggctgggccgggccaggcgcgatggcagggttctctccttggcggcggcggcagcggcggaggcggcggcggcggcgggcgaggcagcccttcgcgggcagcaccagaactggtcggtgatttaggtagtttcctgttgttgggatccacctttctctcgacagcacgacactgccttcattacttcagttgaaatcgtctccaggtacctctgcgcgcgggggtcgggccgggcggggcatcacggccctggtcgtgccaggcctgcggtggcaacctcggctttccctgctcaggagcctcgtgtctttctccgcagcgctttgccagccggccggctttccccttccaccacacacctccacctggtcccttctctctgtaagctcggccgctgctaggagtcgcctctcttttcttccttcttttccctgtcttcccttcctcttttatctcttctttctttttttcttctttcctttgctccttcctgctttcttttcttccgttggtctttttttcatcttccgtctctgccagattctatctcacctccttatctccttcccaaagcatccttggggaggggcccagagctggcttcaggagagcctagggggtctcactttcctctgcggctcaagtagaggttgggaagtctgccgaggaagggcccgcgtggggcggctgccgagggcggtgggtttgggcctggtgtgttactctgcagacaaggcctcggttatgatcacgaccggatggcggcagccttgcgtttcttcgc

SEQ ID NO: 376805 - DNA, 479 bp, Homo sapiens
cttccttggccaagagaagggcttacaggcatggacatgcaggttggcaaacgggcttgactttggccttctctctgtaagctcggccgctgctaggagtcgcctctcttttcttccttcttttccctgtcttcccttcctcttttatctcttctttctttttttcttctttcctttgctccttcctgctttcttttcttccgttggtctttttttcatcttccgtctctgccagattctatctcacctccttatctccttcccaaagcatccttggggaggggcccagagctggcttcaggagagcctagggggtctcactttcctctgcggctcaagtagaggttgggaagtctgccgaggaagggcccgcgtggggcggctgccgagggcggtgggtttgggcctggtgtgttactctgcagacaaggcctcggttatgatcacgaccggatggcggcagccttgcgtttcttcgc

SEQ ID NO: 376806 - DNA, 2074 bp, Homo sapiens
  misc_feature (1223)..(1223): n is a, c, g, or t
  misc_feature (1227)..(1227): n is a, c, g, or t
  misc_feature (1230)..(1230): n is a, c, g, or t
  misc_feature (1260)..(1260): n is a, c, g, or t
  misc_feature (1267)..(1267): n is a, c, g, or t
  misc_feature (1276)..(1276): n is a, c, g, or t
  misc_feature (1294)..(1295): n is a, c, g, or t
  misc_feature (1299)..(1299): n is a, c, g, or t
  misc_feature (1309)..(1309): n is a, c, g, or t
  misc_feature (1311)..(1311): n is a, c, g, or t
  misc_feature (1321)..(1322): n is a, c, g, or t
  misc_feature (1324)..(1326): n is a, c, g, or t
  misc_feature (1329)..(1329): n is a, c, g, or t
  misc_feature (1338)..(1340): n is a, c, g, or t
  misc_feature (1342)..(1342): n is a, c, g, or t
  misc_feature (1347)..(1348): n is a, c, g, or t
  misc_feature (1350)..(1350): n is a, c, g, or t
  misc_feature (1353)..(1353): n is a, c, g, or t
  misc_feature (1360)..(1360): n is a, c, g, or t
  misc_feature (1366)..(1366): n is a, c, g, or t
  misc_feature (1368)..(1369): n is a, c, g, or t
  misc_feature (1373)..(1373): n is a, c, g, or t
  misc_feature (1388)..(1388): n is a, c, g, or t
  misc_feature (1390)..(1390): n is a, c, g, or t
  misc_feature (1396)..(1396): n is a, c, g, or t
  misc_feature (1398)..(1398): n is a, c, g, or t
  misc_feature (1410)..(1410): n is a, c, g, or t
  misc_feature (1416)..(1416): n is a, c, g, or t
  misc_feature (1419)..(1419): n is a, c, g, or t
  misc_feature (1421)..(1421): n is a, c, g, or t
  misc_feature (1428)..(1429): n is a, c, g, or t
  misc_feature (1431)..(1431): n is a, c, g, or t
  misc_feature (1433)..(1433): n is a, c, g, or t
  misc_feature (1441)..(1442): n is a, c, g, or t
  misc_feature (1444)..(1444): n is a, c, g, or t
  misc_feature (1447)..(1448): n is a, c, g, or t
  misc_feature (1452)..(1452): n is a, c, g, or t
  misc_feature (1464)..(1464): n is a, c, g, or t
  misc_feature (1468)..(1472): n is a, c, g, or t
  misc_feature (1474)..(1474): n is a, c, g, or t
  misc_feature (1477)..(1478): n is a, c, g, or t
  misc_feature (1481)..(1481): n is a, c, g, or t
  misc_feature (1483)..(1483): n is a, c, g, or t
  misc_feature (1486)..(1486): n is a, c, g, or t
  misc_feature (1488)..(1488): n is a, c, g, or t
  misc_feature (1493)..(1493): n is a, c, g, or t
  misc_feature (1501)..(1502): n is a, c, g, or t
  misc_feature (1504)..(1504): n is a, c, g, or t
  misc_feature (1506)..(1506): n is a, c, g, or t
  misc_feature (1511)..(1511): n is a, c, g, or t
  misc_feature (1520)..(1520): n is a, c, g, or t
  misc_feature (1522)..(1522): n is a, c, g, or t
  misc_feature (1525)..(1525): n is a, c, g, or t
  misc_feature (1531)..(1531): n is a, c, g, or t
  misc_feature (1534)..(1534): n is a, c, g, or t
agttgttacatgaaatctgcagtttcataatttccgtgggtcgggccgggcgggccaggcgctgggcacggtgatggccaccactggggccctgggcaactactacgtggactcgttcctgctgggcgccgacgccgcggatgagctgagcgttggccgctatgcgccggggaccctgggccagcctccccggcaggcggcgacgctggccgagcaccccgacttcagcccgtgcagcttccagtccaaggcgacggtgtttggcgcctcgtggaacccagtgcacgcggcgggcgccaacgctgtacccgctgcggtgtaccaccaccatcaccaccacccctacgtgcacccccaggcgcccgtggcggcggcggcgccggacggcaggtacatgcgctcctggctggagcccacgcccggtgcgctctccttcgcgggcttgccctccagccggccttatggcattaaacctgaaccgctgtcggccagaaggggtgactgtcccacgcttgacactcacactttgtccctgactgactatgcttgtggttctcctccagttgatagagaaaaacaacccagcgaaggcgccttctctgaaaacaatgctgagaatgagagcggcggagacaagccccccatcgatcccaataacccagcagccaactggcttcatgcgcgctccactcggaaaaagcggtgcccctatacaaaacaccagaccctggaactggagaaagagtttctgttcaacatgtacctcaccagggaccgcaggtacgaggtggctcgactgctcaacctcaccgagaggcaggtcaagatctggttccagaaccgcaggatgaaaatgaagaaaatcaacaaagaccgagcaaaagacgagtgatgccatttgggcttatttagaaaaaagggtaagctagagagaaaaagaaagaactgtccgtcccccttccgccttctcccttttctcacccccaccctagcctccaccatccccgcacaaagcggctctaaacctcaggccacatcttttccaaggcaaaccctgttcaggctggctcgtaggcctgccgctttgatggaggaggtattgtaagctttccattttctataagaaaaaggaaaagttgaggggggggcattagtgctgatagctgtgtgtgttagcttgtatatatatttttaaaaatctacctgttcctgacttaaaaccnccgnccngacccccccccccccaatgccccaccgccnccggccncgccgcccngccccccccccccgcgcnnccancccccacccncnccccgccgcnncnnnccnccccccccnnncncccgnncnccncgccccnccgcgncnncccnccgtcccgcgacccncncccccncncaccgggcgacncccccnccncnatcccgnnananagaacccnncncgnncccnggccgcccacgngggnnnnnanacnnccncnccngngcacngccccgcnncngnacacnccccccgtncnacnaggccnccnccctatgattgtaaagtagctgtaagaatttcccagtgaaataaaaaaaaattttaagtgttctcggggatgcatagattcatcattttctccaccttaaaaatgcgggcatttaagtctgtccattatctatatagtcctgtcttgtctattgtatatataatctatatgattaaagaaaatatgcataatcagacaagcttgaatattgtttttgcaccagacgaacagtgaggaaattcggagctatacatatgtgcagaaggttactacctagggtttatgcttaattttaatcggaggaaatgaatgctgattgtaacggagttaattttattgataataaattatacactatgaaaccgccattgggctactgtagatttgtatccttgatgaatctggggtttccatcagactgaacttacactgtatattttgcaatagttacctcaaggcctactgaccaaattgttgtgttgagatgatatttaactttttgccaaataaaatatattgattcttttctattttttgcgg

SEQ ID NO: 376807 - DNA, 1894 bp, Homo sapiens
agttgttacatgaaatctgcagtttcataatttccgtgggtcgggccgggcgggccaggcgctgggcacggtgatggccaccactggggccctgggcaactactacgtggactcgttcctgctgggcgccgacgccgcggatgagctgagcgttggccgctatgcgccggggaccctgggccagcctccccggcaggcggcgacgctggccgagcaccccgacttcagcccgtgcagcttccagtccaaggcgacggtgtttggcgcctcgtggaacccagtgcacgcggcgggcgccaacgctgtacccgctgcggtgtaccaccaccatcaccaccacccctacgtgcacccccaggcgcccgtggcggcggcggcgccggacggcagttgatagagaaaaacaacccagcgaaggcgccttctctgaaaacaatgctgagaatgagagcggcggagacaagccccccatcgatcccaataacccagcagccaactggcttcatgcgcgctccactcggaaaaagcggtgcccctatacaaaacaccagaccctggaactggagaaagagtttctgttcaacatgtacctcaccagggaccgcaggtacgaggtggctcgactgctcaacctcaccgagaggcaggtcaagatctggttccagaaccgcaggatgaaaatgaagaaaatcaacaaagaccgagcaaaagacgagtgatgccatttgggcttatttagaaaaaagggtaagctagagagaaaaagaaagaactgtccgtcccccttccgccttctcccttttctcacccccaccctagcctccaccatccccgcacaaagcggctctaaacctcaggccacatcttttccaaggcaaaccctgttcaggctggctcgtaggcctgccgctttgatggaggaggtattgtaagctttccattttctataagaaaaaggaaaagttgaggggggggcattagtgctgatagctgtgtgtgttagcttgtatatatatttttaaaaatctacctgttcctgacttaaaacaaaaggaaagaaactacctttttataatgcacaactgttgatggtaggctgtatagtttttagtctgtgtagttaatttaatttgcagtttgtgcggcagattgctctgccaagatacttgaacactgtgttttattgtggtaattatgttttgtgattcaaacttctgtgtactgggtgatgcacccattgtgattgtggaagatagaattcaatttgaactcaggttgtttatgaggggaaaaaaacagttgcatagagtatagctctgtagtggaatatgtcttctgtataactaggctgttaacctatgattgtaaagtagctgtaagaatttcccagtgaaataaaaaaaaattttaagtgttctcggggatgcatagattcatcattttctccaccttaaaaatgcgggcatttaagtctgtccattatctatatagtcctgtcttgtctattgtatatataatctatatgattaaagaaaatatgcataatcagacaagcttgaatattgtttttgcaccagacgaacagtgaggaaattcggagctatacatatgtgcagaaggttactacctagggtttatgcttaattttaatcggaggaaatgaatgctgattgtaacggagttaattttattgataataaattatacactatgaaaccgccattgggctactgtagatttgtatccttgatgaatctggggtttccatcagactgaacttacactgtatattttgcaatagttacctcaaggcctactgaccaaattgttgtgttgagatgatatttaactttttgccaaataaaatatattgattcttttctattttttgcgg

SEQ ID NO: 376808 - DNA, 1459 bp, Homo sapiens
atgtgcgtcttctgctcctaaacccagtgtttctcttccccgcagataacccagcagccaactggcttcatgcgcgctccactcggaaaaagcggtgcccctatacaaaacaccagaccctggaactggagaaagagtttctgttcaacatgtacctcaccagggaccgcaggtacgaggtggctcgactgctcaacctcaccgagaggcaggtcaagatctggttccagaaccgcaggatgaaaatgaagaaaatcaacaaagaccgagcaaaagacgagtgatgccatttgggcttatttagaaaaaagggtaagctagagagaaaaagaaagaactgtccgtcccccttccgccttctcccttttctcacccccaccctagcctccaccatccccgcacaaagcggctctaaacctcaggccacatcttttccaaggcaaaccctgttcaggctggctcgtaggcctgccgctttgatggaggaggtattgtaagctttccattttctataagaaaaaggaaaagttgaggggggggcattagtgctgatagctgtgtgtgttagcttgtatatatatttttaaaaatctacctgttcctgacttaaaacaaaaggaaagaaactacctttttataatgcacaactgttgatggtaggctgtatagtttttagtctgtgtagttaatttaatttgcagtttgtgcggcagattgctctgccaagatacttgaacactgtgttttattgtggtaattatgttttgtgattcaaacttctgtgtactgggtgatgcacccattgtgattgtggaagatagaattcaatttgaactcaggttgtttatgaggggaaaaaaacagttgcatagagtatagctctgtagtggaatatgtcttctgtataactaggctgttaacctatgattgtaaagtagctgtaagaatttcccagtgaaataaaaaaaaattttaagtgttctcggggatgcatagattcatcattttctccaccttaaaaatgcgggcatttaagtctgtccattatctatatagtcctgtcttgtctattgtatatataatctatatgattaaagaaaatatgcataatcagacaagcttgaatattgtttttgcaccagacgaacagtgaggaaattcggagctatacatatgtgcagaaggttactacctagggtttatgcttaattttaatcggaggaaatgaatgctgattgtaacggagttaattttattgataataaattatacactatgaaaccgccattgggctactgtagatttgtatccttgatgaatctggggtttccatcagactgaacttacactgtatattttgcaatagttacctcaaggcctactgaccaaattgttgtgttgagatgatatttaactttttgccaaataaaatatattgattcttttctattttttgcgg

SEQ ID NO: 376809 - DNA, 2067 bp, Homo sapiens
agttgttacatgaaatctgcagtttcataatttccgtgggtcgggccgggcgggccaggcgctgggcacggtgatggccaccactggggccctgggcaactactacgtggactcgttcctgctgggcgccgacgccgcggatgagctgagcgttggccgctatgcgccggggaccctgggccagcctccccggcaggcggcgacgctggccgagcaccccgacttcagcccgtgcagcttccagtccaaggcgacggtgtttggcgcctcgtggaacccagtgcacgcggcgggcgccaacgctgtacccgctgcggtgtaccaccaccatcaccaccacccctacgtgcacccccaggcgcccgtggcggcggcggcgccggacggcaggtacatgcgctcctggctggagcccacgcccggtgcgctctccttcgcgggcttgccctccagccggccttatggcattaaacctgaaccgctgtcggccagaaggggtgactgtcccacgcttgacactcacactttgtccctgactgactatgcttgtggttctcctccagttgatagagaaaaacaacccagcgaaggcgccttctctgaaaacaatgctgagaatgagagcggcggagacaagccccccatcgatcccaataacccagcagccaactggcttcatgcgcgctccactcggaaaaagcggtgcccctatacaaaacaccagaccctggaactggagaaagagtttctgttcaacatgtacctcaccagggaccgcaggtacgaggtggctcgactgctcaacctcaccgagaggcaggtcaagatctggttccagaaccgcaggatgaaaatgaagaaaatcaacaaagaccgagcaaaagacgagtgatgccatttgggcttatttagaaaaaagggtaagctagagagaaaaagaaagaactgtccgtcccccttccgccttctcccttttctcacccccaccctagcctccaccatccccgcacaaagcggctctaaacctcaggccacatcttttccaaggcaaaccctgttcaggctggctcgtaggcctgccgctttgatggaggaggtattgtaagctttccattttctataagaaaaaggaaaagttgaggggggggcattagtgctgatagctgtgtgtgttagcttgtatatatatttttaaaaatctacctgttcctgacttaaaacaaaaggaaagaaactacctttttataatgcacaactgttgatggtaggctgtatagtttttagtctgtgtagttaatttaatttgcagtttgtgcggcagattgctctgccaagatacttgaacactgtgttttattgtggtaattatgttttgtgattcaaacttctgtgtactgggtgatgcacccattgtgattgtggaagatagaattcaatttgaactcaggttgtttatgaggggaaaaaaacagttgcatagagtatagctctgtagtggaatatgtcttctgtataactaggctgttaacctatgattgtaaagtagctgtaagaatttcccagtgaaataaaaaaaaattttaagtgttctcggggatgcatagattcatcattttctccaccttaaaaatgcgggcatttaagtctgtccattatctatatagtcctgtcttgtctattgtatatataatctatatgattaaagaaaatatgcataatcagacaagcttgaatattgtttttgcaccagacgaacagtgaggaaattcggagctatacatatgtgcagaaggttactacctagggtttatgcttaattttaatcggaggaaatgaatgctgattgtaacggagttaattttattgataataaattatacactatgaaaccgccattgggctactgtagatttgtatccttgatgaatctggggtttccatcagactgaacttacactgtatattttgcaatagttacctcaaggcctactgaccaaattgttgtgttgagatgatatttaactttttgccaaataaaatatattgattcttttctattttttgcgg

SEQ ID NO: 376810 - DNA, 796 bp, Homo sapiens
  misc_feature (296)..(296): n is a, c, g, or t
  misc_feature (299)..(300): n is a, c, g, or t
  misc_feature (303)..(303): n is a, c, g, or t
  misc_feature (305)..(305): n is a, c, g, or t
  misc_feature (309)..(310): n is a, c, g, or t
  misc_feature (313)..(313): n is a, c, g, or t
  misc_feature (321)..(321): n is a, c, g, or t
  misc_feature (323)..(324): n is a, c, g, or t
  misc_feature (327)..(327): n is a, c, g, or t
  misc_feature (331)..(331): n is a, c, g, or t
  misc_feature (336)..(338): n is a, c, g, or t
  misc_feature (341)..(341): n is a, c, g, or t
  misc_feature (343)..(344): n is a, c, g, or t
  misc_feature (358)..(358): n is a, c, g, or t
  misc_feature (360)..(360): n is a, c, g, or t
  misc_feature (362)..(363): n is a, c, g, or t
  misc_feature (374)..(374): n is a, c, g, or t
  misc_feature (382)..(382): n is a, c, g, or t
  misc_feature (414)..(415): n is a, c, g, or t
  misc_feature (422)..(422): n is a, c, g, or t
  misc_feature (427)..(427): n is a, c, g, or t
  misc_feature (457)..(457): n is a, c, g, or t
  misc_feature (460)..(461): n is a, c, g, or t
  misc_feature (463)..(464): n is a, c, g, or t
  misc_feature (474)..(474): n is a, c, g, or t
  misc_feature (485)..(485): n is a, c, g, or t
  misc_feature (495)..(495): n is a, c, g, or t
  misc_feature (507)..(507): n is a, c, g, or t
  misc_feature (578)..(578): n is a, c, g, or t
  misc_feature (584)..(584): n is a, c, g, or t
  misc_feature (612)..(613): n is a, c, g, or t
  misc_feature (640)..(640): n is a, c, g, or t
  misc_feature (645)..(645): n is a, c, g, or t
  misc_feature (655)..(655): n is a, c, g, or t
  misc_feature (669)..(669): n is a, c, g, or t
  misc_feature (686)..(686): n is a, c, g, or t
  misc_feature (720)..(720): n is a, c, g, or t
  misc_feature (728)..(728): n is a, c, g, or t
  misc_feature (735)..(735): n is a, c, g, or t
  misc_feature (754)..(754): n is a, c, g, or t
agttgttacatgaaatctgcagtttcataatttccgtgggtcgggccgggcgggccaggcgctgggcacggtgatggccaccactggggccctgggcaactactacgtggactcgttcctgctgggcgccgacgccgcggatgagctgagcgttggccgctatgcgccggggaccctgggccagcctccccggcaggcggcgacgctggccgagcaccccgacttcagcccgtgcagcttccagtccaaggcgacggtgtttggcgcctcgtggaacccagtgcacgcggcggggnggnnggngntgtnngcnggtggggngnnccnggcncgcgnnnggncnngggggcgcgtgggngngnngccgcgagggngcgcgcgnggcgggcgggggggcggcgcgggggggggggnngggtggngggtngtgggtggggggggggtcgggggggggggncgnngnngggggggggntggcgcgtggngggggggcgntggggggggttngagagggtgggggggggggctcgggccaggaaggggggtgacctggtccgcagcggctgtgaacagctcancaactnttggtcccgtgacctgagactagtggcnntggtgggtgtctcccttccaggtgtgnagtangaggagaaanagcaaaccccaagncgaaaggggcgtcgctntgcttctggaaaagaacagagtggcgtggagganagtgtagnaaggcgnggcgggagtaacaaaggcncgcccccagtcggagtcgccagagtatagccccaaggcaggc

SEQ ID NO: 376811 - DNA, 1815 bp, Homo sapiens
cactggcgggcgcaggttgcctaggggctgggctgggccgggccaggcgcgatggcagggttctctccttggcggcggcggcagcggcggaggcggcggcggcggcgggcgaggcagcccttcgcgggcagcaccagaactggtcggtgatttaggtagtttcctgttgttgggatccacctttctctcgacagcacgacactgccttcattacttcagttgaaatcgtctccaggtacctctgcgcgcgggggtcgggccgggcggggcatcacggccctggtcgtgccaggcctgcggtggcaacctcggctttccctgctcaggagcctcgtgtctttctccgcagcgctttgccagccggccggctttccccttccaccacacacctccacctggtcataacccagcagccaactggcttcatgcgcgctccactcggaaaaagcggtgcccctatacaaaacaccagaccctggaactggagaaagagtttctgttcaacatgtacctcaccagggaccgcaggtacgaggtggctcgactgctcaacctcaccgagaggcaggtcaagatctggttccagaaccgcaggatgaaaatgaagaaaatcaacaaagaccgagcaaaagacgagtgatgccatttgggcttatttagaaaaaagggtaagctagagagaaaaagaaagaactgtccgtcccccttccgccttctcccttttctcacccccaccctagcctccaccatccccgcacaaagcggctctaaacctcaggccacatcttttccaaggcaaaccctgttcaggctggctcgtaggcctgccgctttgatggaggaggtattgtaagctttccattttctataagaaaaaggaaaagttgaggggggggcattagtgctgatagctgtgtgtgttagcttgtatatatatttttaaaaatctacctgttcctgacttaaaacaaaaggaaagaaactacctttttataatgcacaactgttgatggtaggctgtatagtttttagtctgtgtagttaatttaatttgcagtttgtgcggcagattgctctgccaagatacttgaacactgtgttttattgtggtaattatgttttgtgattcaaacttctgtgtactgggtgatgcacccattgtgattgtggaagatagaattcaatttgaactcaggttgtttatgaggggaaaaaaacagttgcatagagtatagctctgtagtggaatatgtcttctgtataactaggctgttaacctatgattgtaaagtagctgtaagaatttcccagtgaaataaaaaaaaattttaagtgttctcggggatgcatagattcatcattttctccaccttaaaaatgcgggcatttaagtctgtccattatctatatagtcctgtcttgtctattgtatatataatctatatgattaaagaaaatatgcataatcagacaagcttgaatattgtttttgcaccagacgaacagtgaggaaattcggagctatacatatgtgcagaaggttactacctagggtttatgcttaattttaatcggaggaaatgaatgctgattgtaacggagttaattttattgataataaattatacactatgaaaccgccattgggctactgtagatttgtatccttgatgaatctggggtttccatcagactgaacttacactgtatattttgcaatagttacctcaaggcctactgaccaaattgttgtgttgagatgatatttaactttttgccaaataaaatatattgattcttttctattttttgcgg

SEQ ID NO: 376812 - DNA, 1574 bp, Homo sapiens
ttaggcatctatttaaatattacctagacggtcgtaatttgtctgggccctatagccctggtgccgtaagttgatagagaaaaacaacccagcgaaggcgccttctctgaaaacaatgctgagaatgagagcggcggagacaagccccccatcgatcccaataacccagcagccaactggcttcatgcgcgctccactcggaaaaagcggtgcccctatacaaaacaccagaccctggaactggagaaagagtttctgttcaacatgtacctcaccagggaccgcaggtacgaggtggctcgactgctcaacctcaccgagaggcaggtcaagatctggttccagaaccgcaggatgaaaatgaagaaaatcaacaaagaccgagcaaaagacgagtgatgccatttgggcttatttagaaaaaagggtaagctagagagaaaaagaaagaactgtccgtcccccttccgccttctcccttttctcacccccaccctagcctccaccatccccgcacaaagcggctctaaacctcaggccacatcttttccaaggcaaaccctgttcaggctggctcgtaggcctgccgctttgatggaggaggtattgtaagctttccattttctataagaaaaaggaaaagttgaggggggggcattagtgctgatagctgtgtgtgttagcttgtatatatatttttaaaaatctacctgttcctgacttaaaacaaaaggaaagaaactacctttttataatgcacaactgttgatggtaggctgtatagtttttagtctgtgtagttaatttaatttgcagtttgtgcggcagattgctctgccaagatacttgaacactgtgttttattgtggtaattatgttttgtgattcaaacttctgtgtactgggtgatgcacccattgtgattgtggaagatagaattcaatttgaactcaggttgtttatgaggggaaaaaaacagttgcatagagtatagctctgtagtggaatatgtcttctgtataactaggctgttaacctatgattgtaaagtagctgtaagaatttcccagtgaaataaaaaaaaattttaagtgttctcggggatgcatagattcatcattttctccaccttaaaaatgcgggcatttaagtctgtccattatctatatagtcctgtcttgtctattgtatatataatctatatgattaaagaaaatatgcataatcagacaagcttgaatattgtttttgcaccagacgaacagtgaggaaattcggagctatacatatgtgcagaaggttactacctagggtttatgcttaattttaatcggaggaaatgaatgctgattgtaacggagttaattttattgataataaattatacactatgaaaccgccattgggctactgtagatttgtatccttgatgaatctggggtttccatcagactgaacttacactgtatattttgcaatagttacctcaaggcctactgaccaaattgttgtgttgagatgatatttaactttttgccaaataaaatatattgattcttttctattttttgcgg

SEQ ID NO: 376813 - DNA, 781 bp, Homo sapiens
agttgttacatgaaatctgcagtttcataatttccgtgggtcgggccgggcgggccaggcgctgggcacggtgatggccaccactggggccctgggcaactactacgtggactcgttcctgctgggcgccgacgccgcggatgagctgagcgttggccgctatgcgccggggaccctgggccagcctccccggcaggcggcgacgctggccgagcaccccgacttcagcccgtgcagcttccagtccaaggcgacggtgtttggcgcctcgtggaacccagtgcacgcggcgggcgccaacgctgtacccgctgcggtgtaccaccaccatcaccaccacccctacgtgcacccccaggcgcccgtggcggcggcggcgccggacggcaggtacatgcgctcctggctggagcccacgcccggtgcgctctccttcgcgggcttgccctccagccggccttatggcattaaacctgaaccgctgtcggccagaaggggtgactgtcccacgcttgacactcacactttgtccctgactgactatgcttgtggttctcctccagttgatagagaaaaacaacccagcgaaggcgccttctctgaaaacaatgctgagaatgagagcggcggagacaagccccccatcgatcccagtaagtgtctcctcccttcaaatccgccgccgcctccacgccggcctcccggatctgctggcccgccaggtttctctcgagcctgccttcgtcctcgctggaagcctctcgagttggggccaggagcc

SEQ ID NO: 376814 - DNA, 241 bp, Homo sapiens
gcctttacaaattcagtgttttttggcaactttatggatcataactactgcaaatgataagaataactccagttattttattttttcaaaaattgagtttcctctttaatgcatttttcctaaatgatatattttaagttatttttcctgatcactagatcttcttcaatgtaattgtcatatctgtgtagcaatacagcatacagatgtgctattagtatatttactaaaagctctttta

SEQ ID NO: 376815 - DNA, 940 bp, Homo sapiens
cctgggcgtgtgctaaggccagagctaccagatgggtccagctgccgcaggctctccaggcactgtcccctaagtgacagctgttactgcctgggagagctcaagtgcaaagactatcctgttctcccataaagaggaggaaaaggaagatacagaaatcggtgctgctcccaacagcagatcaaggcagtcgtcaggaactcaggatccggggggtcttcacggcttctctgcccaggggccagaaccgaggaggccaggagggctgctggggctaaggggtctaaggacctcgttgcacacgctaccaggagcaggggcatggagcacagtgagggggctcccggagacccagccggtactgtggtaccccaggagctgctggaagagatgctttggttttttcgtgtggaagatgcatctccctggaatcattccatccttgccctggcagctgtggtggtcattataagcatggtcctcctgggaagaagcatccaggcaagcagaaaagaaaagatgcagccaccagaaaaagaaactccagaagtcctgcatttggatgaggccaaggatcacaacagcctaaacaacctaagagaaactttgctctcagaaaagccaaacttggcccaggtggaacttgagttaaaagagagagatgtgctgtcagttttccttccggatgtaccagaaactgagagctagtgagggttcagagaagccccatcctaagccagacacatgatgtgggctcagctcagtggcctgaaacctctcaggttttagagtctctcccaagaagccgcttttttctttttctttctttctttttttttttcttagcagatacaatgaatgaactgcaagcaaactaaaattctgttattaaaaaaaatcttttattaaaatgctcctggaagggagcaggtggtattgc

SEQ ID NO: 376816 - DNA, 885 bp, Homo sapiens
cctgggcgtgtgctaaggccagagctaccagatgggtccagctgccgcaggctctccaggcactgtcccctaagtgacagctgttactgcctgggagagctcaagtgcaaagactatcctgttctcccataaagaggaggaaaaggaagatacagaaatcggtgctgctcccaacagcagatcaaggcagtcgtcaggaactcaggatccggggggtcttcacggcttctctgcccaggggccagaaccgaggaggccaggagggctgctggggctaaggggtctaaggacctcgttgcacacgctaccaggagcaggggcatggagcacagtgagggggctcccggagacccagccggtactgtggtaccccaggagctgctggaagagatgctttggttttttcgtgtggaagatgcatctccctggaatcattccatccttgccctggcagctgtggtggtcattataagcatggtcctcctgggaagaagcatccaggcaagcagaaaagaaaagatgcagccaccagaaaaagaaactccagaagtcctgcatttggatgaggccaaggatcacaacagcctaaacaacctaagagaaactttgctctcagaaaagccaaacttggcccaggtggaacttgaagctagtgagggttcagagaagccccatcctaagccagacacatgatgtgggctcagctcagtggcctgaaacctctcaggttttagagtctctcccaagaagccgcttttttctttttctttctttctttttttttttcttagcagatacaatgaatgaactgcaagcaaactaaaattctgttattaaaaaaaatcttttattaaaatgctcctggaagggagcaggtggtattgc

SEQ ID NO: 376817 - DNA, 3263 bp, Homo sapiens
attggtgggggcggaagggggccgggcgccagcgctgccttttctcctgccgggtagtttcgctttcctgcgcagagtctgcggaggggctcggctgcaccggggggatcgcgcctggcagaccccagaccgagcagaggcgacccagcgcgctcgggagaggctgcaccgccgcgcccccgcctagcccttccggatcctgcgcgcagaaaagtttcatttgctgtatgccatcctcgagagctgtctaggttaacgttcgcactctgtgtatataacctcgacagtcttggcacctaacgtgctgtgcgtagctgctcctttggttgaatccccaggcccttgttggggcacaaggtggcaggatgtctcagtggtacgaacttcagcagcttgactcaaaattcctggagcaggttcaccagctttatgatgacagttttcccatggaaatcagacagtacctggcacagtggttagaaaagcaagactgggagcacgctgccaatgatgtttcatttgccaccatccgttttcatgacctcctgtcacagctggatgatcaatatagtcgcttttctttggagaataacttcttgctacagcataacataaggaaaagcaagcgtaatcttcaggataattttcaggaagacccaatccagatgtctatgatcatttacagctgtctgaaggaagaaaggaaaattctggaaaacgcccagagatttaatcaggctcagtcggggaatattcagagcacagtgatgttagacaaacagaaagagcttgacagtaaagtcagaaatgtgaaggacaaggttatgtgtatagagcatgaaatcaagagcctggaagatttacaagatgaatatgacttcaaatgcaaaaccttgcagaacagagaacacgagaccaatggtgtggcaaagagtgatcagaaacaagaacagctgttactcaagaagatgtatttaatgcttgacaataagagaaaggaagtagttcacaaaataatagagttgctgaatgtcactgaacttacccagaatgccctgattaatgatgaactagtggagtggaagcggagacagcagagcgcctgtattggggggccgcccaatgcttgcttggatcagctgcagaactggttcactatagttgcggagagtctgcagcaagttcggcagcagcttaaaaagttggaggaattggaacagaaatacacctacgaacatgaccctatcacaaaaaacaaacaagtgttatgggaccgcaccttcagtcttttccagcagctcattcagagctcgtttgtggtggaaagacagccctgcatgccaacgcaccctcagaggccgctggtcttgaagacaggggtccagttcactgtgaagttgagactgttggtgaaattgcaagagctgaattataatttgaaagtcaaagtcttatttgataaagatgtgaatgagagaaatacagtaaaaggatttaggaagttcaacattttgggcacgcacacaaaagtgatgaacatggaggagtccaccaatggcagtctggcggctgaatttcggcacctgcaattgaaagaacagaaaaatgctggcaccagaacgaatgagggtcctctcatcgttactgaagagcttcactcccttagttttgaaacccaattgtgccagcctggtttggtaattgacctcgagacgacctctctgcccgttgtggtgatctccaacgtcagccagctcccgagcggttgggcctccatcctttggtacaacatgctggtggcggaacccaggaatctgtccttcttcctgactccaccatgtgcacgatgggctcagctttcagaagtgctgagttggcagttttcttctgtcaccaaaagaggtctcaatgtggaccagctgaacatgttgggagagaagcttcttggtcctaacgccagccccgatggtctcattccgtggacgaggttttgtaaggaaaatataaatgataaaaattttcccttctggctttggattgaaagcatcctagaactcattaaaaaacacctgctccctctctggaatgatgggtgcatcatgggcttcatcagcaaggagcgagagcgtgccctgttgaaggaccagcagccggggaccttcctgctgcggttcagtgagagctcccgggaaggggccatcacattcacatgggtggagcggtcccagaacggaggcgaacctgacttccatgcggttgaaccctacacgaagaaagaactttctgctgttactttccctgacatcattcgcaattacaaagtcatggctgctgagaatattcctgagaatcccctgaagtatctgtatccaaatattgacaaagaccatgcctttggaaagtattactccaggccaaaggaagcaccagagccaatggaacttgatggccctaaaggaactggatatatcaagactgagttgatttctgtgtctgaagtgtaagtgaacacagaagagtgacatgtttacaaacctcaagccagccttgctcctggctggggcctgttgaagatgcttgtattttacttttccattgtaattgctatcgccatcacagctgaacttgttgagatccccgtgttactgcctatcagcattttactactttaaaaaaaaaaaaaaagccaaaaaccaaatttgtatttaaggtatataaattttcccaaaactgataccctttgaaaaagtataaataaaatgagcaaaagttgatcagagtgggaaagtagttcttttcaatctagaaaaggccaaagtaatgattgagatacactgtctccacttgctttgattttgttgtttcattttataaaaggtagaaaaaattttggaaatgtcattgtcagttatttggcctgcagcactgtcttggggtgaatggatgtagccttcatgtaaaaacactgtgtggagcagctttatctgcattcaaacctcaaggtagggatgagggactccccagacatttctctggtgcttttctgtccagggtaagccacgaggcattgtcatctcagggtagtgcaccgcacatgctcacacctaggcttacccaggcagaagcggcacagattccagtctggctattgcttatcacatccctggagtgtgaaacatttcccaaggggctgggctggggacatgagcctcccatgagctgtacttttgcaaatgtattttacaagtgtatgcacttaccca

SEQ ID NO: 376818 - DNA, 889 bp, Homo sapiens
gcagcatcttacaaatgctacctgtctccatggcttgctagatccacggggtaggaaactgctcactcagcatcctccccatggaagctcaagcatgggaacagcttcgggcctggtgcagctaaggaacattggccgtggtttcaccaaaggaggtgccatctaggtaatgggagggcagtggcaggagccactggcttagactggaagtgaaaatgaaagcacctggaggctgctggagtaaggtgccatcaggcatgtaaagtttagaagcagcagagtgtgctcatagaaaaagaaaaaaaaaggaatttgctgtatgtgataacaactaacattcatgtacttgagctcatttcactaaacacagcttcagagaagtccatttgtgtgcatgtgtgtgtgtgcttaatatcagaactcctcactaacatgccactttatctcgaggtatgacaggataaaatgtatgtgtaactcctagaaaatcctgttctatccgttttttgaagccccttttacccactttccaaatgaatcctgaattaccaacccaagacaaagaattataggtcacaatttaaaatgaaatggcctttttcttattattaaactacagagcccaccaagaattacacaatagaaaaatcacaagaaatctggaatgatccagtggtcccccaaggaggacaaatctcttgatgcagactcttaatgacaggcttggaaacaaatgtttgttagttgtagcagttcccatactttcagaataactttggtagcttagagcatttctgaatttatctttaccctagaagctaaaaaaaaaaacttcttaaagagctgcagttgcacatcccttcgttttttagactgataaacttgacta

SEQ ID NO: 376819 - DNA, 1028 bp, Homo sapiens
tcttctcgttgtttctgcattcccactagaattttaggtgactcaggcagggaggttatagctccttaaagttttaggaggctaagctgtctagaaacacagtagaactttaatccccccgaaaagttgatgttgtattctgatggaatttcggttgatggaaagcgtacacaatgtgtttatttctagcaccagagccaatggaacttgatggccctaaaggaactggatatatcaagactgagttgatttctgtgtctgaagtgtaagtgaacacagaagagtgacatgtttacaaacctcaagccagccttgctcctggctggggcctgttgaagatgcttgtattttacttttccattgtaattgctatcgccatcacagctgaacttgttgagatccccgtgttactgcctatcagcattttactactttaaaaaaaaaaaaaaagccaaaaaccaaatttgtatttaaggtatataaattttcccaaaactgataccctttgaaaaagtataaataaaatgagcaaaagttgatcagagtgggaaagtagttcttttcaatctagaaaaggccaaagtaatgattgagatacactgtctccacttgctttgattttgttgtttcattttataaaaggtagaaaaaattttggaaatgtcattgtcagttatttggcctgcagcactgtcttggggtgaatggatgtagccttcatgtaaaaacactgtgtggagcagctttatctgcattcaaacctcaaggtagggatgagggactccccagacatttctctggtgcttttctgtccagggtaagccacgaggcattgtcatctcagggtagtgcaccgcacatgctcacacctaggcttacccaggcagaagcggcacagattccagtctggctattgcttatcacatccctggagtgtgaaacatttcccaaggggctgggctggggacatgagcctcccatgagctgtacttttgcaaatgtattttacaagtgtatgcacttaccca

SEQ ID NO: 376820 - DNA, 4184 bp, Homo sapiens
attggtgggggcggaagggggccgggcgccagcgctgccttttctcctgccgggtagtttcgctttcctgcgcagagtctgcggaggggctcggctgcaccggggggatcgcgcctggcagaccccagaccgagcagaggcgacccagcgcgctcgggagaggctgcaccgccgcgcccccgcctagcccttccggatcctgcgcgcagaaaagtttcatttgctgtatgccatcctcgagagctgtctaggttaacgttcgcactctgtgtatataacctcgacagtcttggcacctaacgtgctgtgcgtagctgctcctttggttgaatccccaggcccttgttggggcacaaggtggcaggatgtctcagtggtacgaacttcagcagcttgactcaaaattcctggagcaggttcaccagctttatgatgacagttttcccatggaaatcagacagtacctggcacagtggttagaaaagcaagactgggagcacgctgccaatgatgtttcatttgccaccatccgttttcatgacctcctgtcacagctggatgatcaatatagtcgcttttctttggagaataacttcttgctacagcataacataaggaaaagcaagcgtaatcttcaggataattttcaggaagacccaatccagatgtctatgatcatttacagctgtctgaaggaagaaaggaaaattctggaaaacgcccagagatttaatcaggctcagtcggggaatattcagagcacagtgatgttagacaaacagaaagagcttgacagtaaagtcagaaatgtgaaggacaaggttatgtgtatagagcatgaaatcaagagcctggaagatttacaagatgaatatgacttcaaatgcaaaaccttgcagaacagagaacacgagaccaatggtgtggcaaagagtgatcagaaacaagaacagctgttactcaagaagatgtatttaatgcttgacaataagagaaaggaagtagttcacaaaataatagagttgctgaatgtcactgaacttacccagaatgccctgattaatgatgaactagtggagtggaagcggagacagcagagcgcctgtattggggggccgcccaatgcttgcttggatcagctgcagaactggttcactatagttgcggagagtctgcagcaagttcggcagcagcttaaaaagttggaggaattggaacagaaatacacctacgaacatgaccctatcacaaaaaacaaacaagtgttatgggaccgcaccttcagtcttttccagcagctcattcagagctcgtttgtggtggaaagacagccctgcatgccaacgcaccctcagaggccgctggtcttgaagacaggggtccagttcactgtgaagttgagactgttggtgaaattgcaagagctgaattataatttgaaagtcaaagtcttatttgataagtaagatatctttaacattatataacatacatgtactattgaatttaggaagttcaacattttgggcacgcacacaaaagtgatgaacatggaggagtccaccaatggcagtctggcggctgaatttcggcacctgcaattgaaagaacagaaaaatgctggcaccagaacgaatgagggtcctctcatcgttactgaagagcttcactcccttagttttgaaacccaattgtgccagcctggtttggtaattgacctcgagacgacctctctgcccgttgtggtgatctccaacgtcagccagctcccgagcggttgggcctccatcctttggtacaacatgctggtggcggaacccaggaatctgtccttcttcctgactccaccatgtgcacgatgggctcagctttcagaagtgctgagttggcagttttcttctgtcaccaaaagaggtctcaatgtggaccagctgaacatgttgggagagaagcttcttggtcctaacgccagccccgatggtctcattccgtggacgaggttttgtaaggaaaatataaatgataaaaattttcccttctggctttggattgaaagcatcctagaactcattaaaaaacacctgctccctctctggaatgatgggtgcatcatgggcttcatcagcaaggagcgagagcgtgccctgttgaaggaccagcagccggggaccttcctgctgcggttcagtgagagctcccgggaaggggccatcacattcacatgggtggagcggtcccagaacggaggcgaacctgacttccatgcggttgaaccctacacgaagaaagaactttctgctgttactttccctgacatcattcgcaattacaaagtcatggctgctgagaatattcctgagaatcccctgaagtatctgtatccaaatattgacaaagaccatgcctttggaaagtattactccaggccaaaggaagcaccagagccaatggaacttgatggccctaaaggaactggatatatcaagactgagttgatttctgtgtctgaagttcacccttctagacttcagaccacagacaacctgctccccatgtctcctgaggagtttgacgaggtgtctcggatagtgggctctgtagaattcgacagtatgatgaacacagtatagagcatgaatttttttcatcttctctggcgacagttttccttctcatctgtgattccctcctgctactctgttccttcacatcctgtgtttctagggaaatgaaagaaaggccagcaaattcgctgcaacctgttgatagcaagtgaatttttctctaactcagaaacatcagttactctgaagggcatcatgcatcttactgaaggtaaaattgaaaggcattctctgaagagtgggtttcacaagtgaaaaacatccagatacacccaaagtatcaggacgagaatgagggtcctttgggaaaggagaagttaagcaacatctagcaaatgttatgcataaagtcagtgcccaactgttataggttgttggataaatcagtggttatttagggaactgcttgacgtaggaacggtaaatttctgtgggagaattcttacatgttttctttgctttaagtgtaactggcagttttccattggtttacctgtgaaatagttcaaagccaagtttatatacaattatatcagtcctctttcaaaggtagccatcatggatctggtagggggaaaatgtgtattttattacatctttcacattggctatttaaagacaaagacaaattctgtttcttgagaagagaatattagctttactgtttgttatggcttaatgacactagctaatatcaatagaaggatgtacatttccaaattcacaagttgtgtttgatatccaaagctgaatacattctgctttcatcttggtcacatacaattatttttacagttctcccaagggagttaggctattcacaaccactcattcaaaagttgaaattaaccatagatgtagataaactcagaaatttaattcatgtttcttaaatgggctactttgtcctttttgttattagggtggtatttagtctattagccacaaaattgggaaaggagtagaaaaagcagtaactgacaacttgaataatacaccagagataatatgagaatcagatcatttcaaaactcatttcctatgtaactgcattgagaactgcatatgtttcgctgatatatgtgtttttcacatttgcgaatggttccattctctctcctgtactttttccagacacttttttgagtggatgatgtttcgtgaagtatactgtatttttacctttttccttccttatcactgacacaaaaagtagattaagagatgggtttgacaaggttcttcccttttacatactgctgtctatgtggctgtatcttgtttttccactactgctaccacaactatattatcatgcaaatgctgtattcttctttggtggagataaagatttcttgagttttgttttaaaattaaagctaaagtatctgtattgcattaaatataatatgcacacagtgctttccgtggcactgcatacaatctgaggcctcctctctcagtttttatatagatggcgagaacctaagtttcagttgattttacaattgaaatgactaaaaaacaaagaagacaacattaaaacaatattgtttctaa

SEQ ID NO: 376821 - DNA, 3490 bp, Homo sapiens
  misc_feature (21)..(21): n is a, c, g, or t
gttttatttaagggttatgtnagtcataagagaaggtagtttctaactatattaggctcagtcggggaatattcagagcacagtgatgttagacaaacagaaagagcttgacagtaaagtcagaaatgtgaaggacaaggttatgtgtatagagcatgaaatcaagagcctggaagatttacaagatgaatatgacttcaaatgcaaaaccttgcagaacagagaacacgagaccaatggtgtggcaaagagtgatcagaaacaagaacagctgttactcaagaagatgtatttaatgcttgacaataagagaaaggaagtagttcacaaaataatagagttgctgaatgtcactgaacttacccagaatgccctgattaatgatgaactagtggagtggaagcggagacagcagagcgcctgtattggggggccgcccaatgcttgcttggatcagctgcagaactggttcactatagttgcggagagtctgcagcaagttcggcagcagcttaaaaagttggaggaattggaacagaaatacacctacgaacatgaccctatcacaaaaaacaaacaagtgttatgggaccgcaccttcagtcttttccagcagctcattcagagctcgtttgtggtggaaagacagccctgcatgccaacgcaccctcagaggccgctggtcttgaagacaggggtccagttcactgtgaagttgagactgttggtgaaattgcaagagctgaattataatttgaaagtcaaagtcttatttgataaagatgtgaatgagagaaatacagtaaaaggatttaggaagttcaacattttgggcacgcacacaaaagtgatgaacatggaggagtccaccaatggcagtctggcggctgaatttcggcacctgcaattgaaagaacagaaaaatgctggcaccagaacgaatgagggtcctctcatcgttactgaagagcttcactcccttagttttgaaacccaattgtgccagcctggtttggtaattgacctcgagacgacctctctgcccgttgtggtgatctccaacgtcagccagctcccgagcggttgggcctccatcctttggtacaacatgctggtggcggaacccaggaatctgtccttcttcctgactccaccatgtgcacgatgggctcagctttcagaagtgctgagttggcagttttcttctgtcaccaaaagaggtctcaatgtggaccagctgaacatgttgggagagaagcttcttggtcctaacgccagccccgatggtctcattccgtggacgaggttttgtaaggaaaatataaatgataaaaattttcccttctggctttggattgaaagcatcctagaactcattaaaaaacacctgctccctctctggaatgatgggtgcatcatgggcttcatcagcaaggagcgagagcgtgccctgttgaaggaccagcagccggggaccttcctgctgcggttcagtgagagctcccgggaaggggccatcacattcacatgggtggagcggtcccagaacggaggcgaacctgacttccatgcggttgaaccctacacgaagaaagaactttctgctgttactttccctgacatcattcgcaattacaaagtcatggctgctgagaatattcctgagaatcccctgaagtatctgtatccaaatattgacaaagaccatgcctttggaaagtattactccaggccaaaggaagcaccagagccaatggaacttgatggccctaaaggaactggatatatcaagactgagttgatttctgtgtctgaagttcacccttctagacttcagaccacagacaacctgctccccatgtctcctgaggagtttgacgaggtgtctcggatagtgggctctgtagaattcgacagtatgatgaacacagtatagagcatgaatttttttcatcttctctggcgacagttttccttctcatctgtgattccctcctgctactctgttccttcacatcctgtgtttctagggaaatgaaagaaaggccagcaaattcgctgcaacctgttgatagcaagtgaatttttctctaactcagaaacatcagttactctgaagggcatcatgcatcttactgaaggtaaaattgaaaggcattctctgaagagtgggtttcacaagtgaaaaacatccagatacacccaaagtatcaggacgagaatgagggtcctttgggaaaggagaagttaagcaacatctagcaaatgttatgcataaagtcagtgcccaactgttataggttgttggataaatcagtggttatttagggaactgcttgacgtaggaacggtaaatttctgtgggagaattcttacatgttttctttgctttaagtgtaactggcagttttccattggtttacctgtgaaatagttcaaagccaagtttatatacaattatatcagtcctctttcaaaggtagccatcatggatctggtagggggaaaatgtgtattttattacatctttcacattggctatttaaagacaaagacaaattctgtttcttgagaagagaatattagctttactgtttgttatggcttaatgacactagctaatatcaatagaaggatgtacatttccaaattcacaagttgtgtttgatatccaaagctgaatacattctgctttcatcttggtcacatacaattatttttacagttctcccaagggagttaggctattcacaaccactcattcaaaagttgaaattaaccatagatgtagataaactcagaaatttaattcatgtttcttaaatgggctactttgtcctttttgttattagggtggtatttagtctattagccacaaaattgggaaaggagtagaaaaagcagtaactgacaacttgaataatacaccagagataatatgagaatcagatcatttcaaaactcatttcctatgtaactgcattgagaactgcatatgtttcgctgatatatgtgtttttcacatttgcgaatggttccattctctctcctgtactttttccagacacttttttgagtggatgatgtttcgtgaagtatactgtatttttacctttttccttccttatcactgacacaaaaagtagattaagagatgggtttgacaaggttcttcccttttacatactgctgtctatgtggctgtatcttgtttttccactactgctaccacaactatattatcatgcaaatgctgtattcttctttggtggagataaagatttcttgagttttgttttaaaattaaagctaaagtatctgtattgcattaaatataatatgcacacagtgctttccgtggcactgcatacaatctgaggcctcctctctcagtttttatatagatggcgagaacctaagtttcagttgattttacaattgaaatgactaaaaaacaaagaagacaacattaaaacaatattgtttctaa

SEQ ID NO: 376822 - DNA, 4700 bp, Homo sapiens
attggtgggggcggaagggggccgggcgccagcgctgccttttctcctgccgggtagtttcgctttcctgcgcagagtctgcggaggggctcggctgcaccggggggatcgcgcctggcagaccccagaccgagcagaggcgacccagcgcgctcgggagaggctgcaccgccgcgcccccgcctagcccttccggatcctgcgcgcagaaaagtttcatttgctgtatgccatcctcgagagctgtctaggttaacgttcgcactctgtgtatataacctcgacagtcttggcacctaacgtgctgtgcgtagctgctcctttggttgaatccccaggcccttgttggggcacaaggtggcaggatgtctcagtggtacgaacttcagcagcttgactcaaaattcctggagcaggttcaccagctttatgatgacagttttcccatggaaatcagacagtacctggcacagtggttagaaaagcaagactgggagcacgctgccaatgatgtttcatttgccaccatccgttttcatgacctcctgtcacagctggatgatcaatatagtcgcttttctttggagaataacttcttgctacagcataacataaggaaaagcaagcgtaatcttcaggataattttcaggaagacccaatccagatgtctatgatcatttacagctgtctgaaggaagaaaggaaaattctggaaaacgcccagagatttaatcaggctcagtcggggaatattcagagcacagtgatgttagacaaacagaaagagcttgacagtaaagtcagaaatgtgaaggacaaggttatgtgtatagagcatgaaatcaagagcctggaagatttacaagatgaatatgacttcaaatgcaaaaccttgcagaacagagaacacgagaccaatggtgtggcaaagagtgatcagaaacaagaacagctgttactcaagaagatgtatttaatgcttgacaataagagaaaggaagtagttcacaaaataatagagttgctgaatgtcactgaacttacccagaatgccctgattaatgatgaactagtggagtggaagcggagacagcagagcgcctgtattggggggccgcccaatgcttgcttggatcagctgcagaactggttcactatagttgcggagagtctgcagcaagttcggcagcagcttaaaaagttggaggaattggaacagaaatacacctacgaacatgaccctatcacaaaaaacaaacaagtgttatgggaccgcaccttcagtcttttccagcagctcattcagagctcgtttgtggtggaaagacagccctgcatgccaacgcaccctcagaggccgctggtcttgaagacaggggtccagttcactgtgaagttgagactgttggtgaaattgcaagagctgaattataatttgaaagtcaaagtcttatttgataaagatgtgaatgagagaaatacagtaaaaggatttaggaagttcaacattttgggcacgcacacaaaagtgatgaacatggaggagtccaccaatggcagtctggcggctgaatttcggcacctgcaattgaaagaacagaaaaatgctggcaccagaacgaatgagggtcctctcatcgttactgaagagcttcactcccttagttttgaaacccaattgtgccagcctggtttggtaattgacctcgagacgacctctctgcccgttgtggtgatctccaacgtcagccagctcccgagcggttgggcctccatcctttggtacaacatgctggtggcggaacccaggaatctgtccttcttcctgactccaccatgtgcacgatgggctcagctttcagaagtgctgagttggcagttttcttctgtcaccaaaagaggtctcaatgtggaccagctgaacatgttgggagagaagcttcttggtcctaacgccagccccgatggtctcattccgtggacgaggttttgtaaggaaaatataaatgataaaaattttcccttctggctttggattgaaagcatcctagaactcattaaaaaacacctgctccctctctggaatgatgggtgcatcatgggcttcatcagcaaggagcgagagcgtgccctgttgaaggaccagcagccggggaccttcctgctgcggttcagtgagagctcccgggaaggggccatcacattcacatgggtggagcggtcccagaacggaggcgaacctgacttccatgcggttgaaccctacacgaagaaagaactttctgctgttactttccctgacatcattcgcaattacaaagtcatggctgctgagaatattcctgagaatcccctgaagtatctgtatccaaatattgacaaagaccatgcctttggaaagtattactccaggccaaaggaagcaccagagccaatggaacttgatggccctaaaggaactggatatatcaagactgagttgatttctgtgtctgaagttcacccttctagacttcagaccacagacaacctgctccccatgtctcctgaggagtttgacgaggtgtctcggatagtgggctctgtagaattcgacagtatgatgaacacagtatagagcatgaatttttttcatcttctctggcgacagttttccttctcatctgtgattccctcctgctactctgttccttcacatcctgtgtttctagggaaatgaaagaaaggccagcaaattcgctgcaacctgttgatagcaagtgaatttttctctaactcagaaacatcagttactctgaagggcatcatgcatcttactgaaggtaaaattgaaaggcattctctgaagagtgggtttcacaagtgaaaaacatccagatacacccaaagtatcaggacgagaatgagggtcctttgggaaaggagaagttaagcaacatctagcaaatgttatgcataaagtcagtgcccaactgttataggttgttggataaatcagtggttatttagggaactgcttgacgtaggaacggtaaatttctgtgggagaattcttacatgttttctttgctttaagtgtaactggcagttttccattggtttacctgtgaaatagttcaaagccaagtttatatacaattatatcagtcctctttcaaaggtagccatcatggatctggtagggggaaaatgtgtattttattacatctttcacattggctatttaaagacaaagacaaattctgtttcttgagaagagaatattagctttactgtttgttatggcttaatgacactagctaatatcaatagaaggatgtacatttccaaattcacaagttgtgtttgatatccaaagctgaatacattctgctttcatcttggtcacatacaattatttttacagttctcccaagggagttaggctattcacaaccactcattcaaaagttgaaattaaccatagatgtagataaactcagaaatttaattcatgtttcttaaatgggctactttgtcctttttgttattagggtggtatttagtctattagccacaaaattgggaaaggagtagaaaaagcagtaactgacaacttgaataatacaccagagataatatgagaatcagatcatttcaaaactcatttcctatgtaactgcattgagaactgcatatgtttcgctgatatatgtgtttttcacatttgcgaatggttccattctctctcctgtactttttccagacacttttttgagtggatgatgtttcgtgaagtatactgtatttttacctttttccttccttatcactgacacaaaaagtagattaagagatgggtttgacaaggttcttcccttttacatactgctgtctatgtggctgtatcttgtttttccactactgctaccacaactatattatcatgcaaatgctgtattcttctttggtggagataaagatttcttgagttttgttttaaaattaaagctaaagtatctgtattgcattaaatataatatgcacacagtgctttccgtggcactgcatacaatctgaggcctcctctctcagtttttatatagatggcgagaacctaagtttcagttgattttacaattgaaatgactaaaaaacaaagaagacaacattaaaacaatattgtttctaaaaaaaaaaaaaacacaaaagaacacaacaccccaagaaacacgaaaaaaaattttgtgggggcccccccccccggagagtttttcaacccccctttgggggcgccgggccccaagtgagagaaaggtgcacggttcccaggagagcctgcggatcagacagaggggcggtgtcttccacccacaaaaaaacagcccggggcggccaaccgggggtttttggaacacccccggataggagggctcggggcgccaatcggcggctaacacaaagggggcacaggagagcaagaaaataatccccacgccccgtcgaggtgaaaacaacatcgacaaaaacgacagccagacatcacgaagccaggcagccacgccgcgacatcgtactaagaacagcaatgacaggaagccaacggaaggtcaggaagcaccacaacagcagcaatgcaacactaggatcaagagaacacaacagaaccacaacaaagtagcgtaccagcagctagcaagacaagcatgagacgtgcaac

SEQ ID NO: 376823 - DNA, 3487 bp, Homo sapiens
atacacacatatcacccaacccaaatataaacaacaacgaaaaaaagattcggctcagtcggggaatattcagagcacagtgatgttagacaaacagaaagagcttgacagtaaagtcagaaatgtgaaggacaaggttatgtgtatagagcatgaaatcaagagcctggaagatttacaagatgaatatgacttcaaatgcaaaaccttgcagaacagagaacacgagaccaatggtgtggcaaagagtgatcagaaacaagaacagctgttactcaagaagatgtatttaatgcttgacaataagagaaaggaagtagttcacaaaataatagagttgctgaatgtcactgaacttacccagaatgccctgattaatgatgaactagtggagtggaagcggagacagcagagcgcctgtattggggggccgcccaatgcttgcttggatcagctgcagaactggttcactatagttgcggagagtctgcagcaagttcggcagcagcttaaaaagttggaggaattggaacagaaatacacctacgaacatgaccctatcacaaaaaacaaacaagtgttatgggaccgcaccttcagtcttttccagcagctcattcagagctcgtttgtggtggaaagacagccctgcatgccaacgcaccctcagaggccgctggtcttgaagacaggggtccagttcactgtgaagttgagactgttggtgaaattgcaagagctgaattataatttgaaagtcaaagtcttatttgataaagatgtgaatgagagaaatacagtaaaaggatttaggaagttcaacattttgggcacgcacacaaaagtgatgaacatggaggagtccaccaatggcagtctggcggctgaatttcggcacctgcaattgaaagaacagaaaaatgctggcaccagaacgaatgagggtcctctcatcgttactgaagagcttcactcccttagttttgaaacccaattgtgccagcctggtttggtaattgacctcgagacgacctctctgcccgttgtggtgatctccaacgtcagccagctcccgagcggttgggcctccatcctttggtacaacatgctggtggcggaacccaggaatctgtccttcttcctgactccaccatgtgcacgatgggctcagctttcagaagtgctgagttggcagttttcttctgtcaccaaaagaggtctcaatgtggaccagctgaacatgttgggagagaagcttcttggtcctaacgccagccccgatggtctcattccgtggacgaggttttgtaaggaaaatataaatgataaaaattttcccttctggctttggattgaaagcatcctagaactcattaaaaaacacctgctccctctctggaatgatgggtgcatcatgggcttcatcagcaaggagcgagagcgtgccctgttgaaggaccagcagccggggaccttcctgctgcggttcagtgagagctcccgggaaggggccatcacattcacatgggtggagcggtcccagaacggaggcgaacctgacttccatgcggttgaaccctacacgaagaaagaactttctgctgttactttccctgacatcattcgcaattacaaagtcatggctgctgagaatattcctgagaatcccctgaagtatctgtatccaaatattgacaaagaccatgcctttggaaagtattactccaggccaaaggaagcaccagagccaatggaacttgatggccctaaaggaactggatatatcaagactgagttgatttctgtgtctgaagttcacccttctagacttcagaccacagacaacctgctccccatgtctcctgaggagtttgacgaggtgtctcggatagtgggctctgtagaattcgacagtatgatgaacacagtatagagcatgaatttttttcatcttctctggcgacagttttccttctcatctgtgattccctcctgctactctgttccttcacatcctgtgtttctagggaaatgaaagaaaggccagcaaattcgctgcaacctgttgatagcaagtgaatttttctctaactcagaaacatcagttactctgaagggcatcatgcatcttactgaaggtaaaattgaaaggcattctctgaagagtgggtttcacaagtgaaaaacatccagatacacccaaagtatcaggacgagaatgagggtcctttgggaaaggagaagttaagcaacatctagcaaatgttatgcataaagtcagtgcccaactgttataggttgttggataaatcagtggttatttagggaactgcttgacgtaggaacggtaaatttctgtgggagaattcttacatgttttctttgctttaagtgtaactggcagttttccattggtttacctgtgaaatagttcaaagccaagtttatatacaattatatcagtcctctttcaaaggtagccatcatggatctggtagggggaaaatgtgtattttattacatctttcacattggctatttaaagacaaagacaaattctgtttcttgagaagagaatattagctttactgtttgttatggcttaatgacactagctaatatcaatagaaggatgtacatttccaaattcacaagttgtgtttgatatccaaagctgaatacattctgctttcatcttggtcacatacaattatttttacagttctcccaagggagttaggctattcacaaccactcattcaaaagttgaaattaaccatagatgtagataaactcagaaatttaattcatgtttcttaaatgggctactttgtcctttttgttattagggtggtatttagtctattagccacaaaattgggaaaggagtagaaaaagcagtaactgacaacttgaataatacaccagagataatatgagaatcagatcatttcaaaactcatttcctatgtaactgcattgagaactgcatatgtttcgctgatatatgtgtttttcacatttgcgaatggttccattctctctcctgtactttttccagacacttttttgagtggatgatgtttcgtgaagtatactgtatttttacctttttccttccttatcactgacacaaaaagtagattaagagatgggtttgacaaggttcttcccttttacatactgctgtctatgtggctgtatcttgtttttccactactgctaccacaactatattatcatgcaaatgctgtattcttctttggtggagataaagatttcttgagttttgttttaaaattaaagctaaagtatctgtattgcattaaatataatatgcacacagtgctttccgtggcactgcatacaatctgaggcctcctctctcagtttttatatagatggcgagaacctaagtttcagttgattttacaattgaaatgactaaaaaacaaagaagacaacattaaaacaatattgtttctaa

SEQ ID NO: 376824 - DNA, 4290 bp, Homo sapiens
attggtgggggcggaagggggccgggcgccagcgctgccttttctcctgccgggtagtttcgctttcctgcgcagagtctgcggaggggctcggctgcaccggggggatcgcgcctggcagaccccagaccgagcagaggcgacccagcgcgctcgggagaggctgcaccgccgcgcccccgcctagcccttccggatcctgcgcgcagaaaagtttcatttgctgtatgccatcctcgagagctgtctaggttaacgttcgcactctgtgtatataacctcgacagtcttggcacctaacgtgctgtgcgtagctgctcctttggttgaatccccaggcccttgttggggcacaaggtggcaggatgtctcagtggtacgaacttcagcagcttgactcaaaattcctggagcaggttcaccagctttatgatgacagttttcccatggaaatcagacagtacctggcacagtggttagaaaagcaagactgggagcacgctgccaatgatgtttcatttgccaccatccgttttcatgacctcctgtcacagctggatgatcaatatagtcgcttttctttggagaataacttcttgctacagcataacataaggaaaagcaagcgtaatcttcaggataattttcaggaagacccaatccagatgtctatgatcatttacagctgtctgaaggaagaaaggaaaattctggaaaacgcccagagatttaatcaggctcagtcggggaatattcagagcacagtgatgttagacaaacagaaagagcttgacagtaaagtcagaaatgtgaaggacaaggttatgtgtatagagcatgaaatcaagagcctggaagatttacaagatgaatatgacttcaaatgcaaaaccttgcagaacagagaacacgagaccaatggtgtggcaaagagtgatcagaaacaagaacagctgttactcaagaagatgtatttaatgcttgacaataagagaaaggaagtagttcacaaaataatagagttgctgaatgtcactgaacttacccagaatgccctgattaatgatgaactagtggagtggaagcggagacagcagagcgcctgtattggggggccgcccaatgcttgcttggatcagctgcagaactggttcactatagttgcggagagtctgcagcaagttcggcagcagcttaaaaagttggaggaattggaacagaaatacacctacgaacatgaccctatcacaaaaaacaaacaagtgttatgggaccgcaccttcagtcttttccagcagctcattcagagctcgtttgtggtggaaagacagccctgcatgccaacgcaccctcagaggccgctggtcttgaagacaggggtccagttcactgtgaagttgagactgttggtgaaattgcaagagctgaattataatttgaaagtcaaagtcttatttgataaagatgtgaatgagagaaatacagtaaaaggatttaggaagttcaacattttgggcacgcacacaaaagtgatgaacatggaggagtccaccaatggcagtctggcggctgaatttcggcacctgcaattgaaagaacagaaaaatgctggcaccagaacgaatgagggtcctctcatcgttactgaagagcttcactcccttagttttgaaacccaattgtgccagcctggtttggtaattgacctcgagacgacctctctgcccgttgtggtgatctccaacgtcagccagctcccgagcggttgggcctccatcctttggtacaacatgctggtggcggaacccaggaatctgtccttcttcctgactccaccatgtgcacgatgggctcagctttcagaagtgctgagttggcagttttcttctgtcaccaaaagaggtctcaatgtggaccagctgaacatgttgggagagaagcttcttggtcctaacgccagccccgatggtctcattccgtggacgaggttttgtaaggaaaatataaatgataaaaattttcccttctggctttggattgaaagcatcctagaactcattaaaaaacacctgctccctctctggaatgatgggtgcatcatgggcttcatcagcaaggagcgagagcgtgccctgttgaaggaccagcagccggggaccttcctgctgcggttcagtgagagctcccgggaaggggccatcacattcacatgggtggagcggtcccagaacggaggcgaacctgacttccatgcggttgaaccctacacgaagaaagaactttctgctgttactttccctgacatcattcgcaattacaaagtcatggctgctgagaatattcctgagaatcccctgaagtatctgtatccaaatattgacaaagaccatgcctttggaaagtattactccaggccaaaggaagcaccagagccaatggaacttgatggccctaaaggaactggatatatcaagactgagttgatttctgtgtctgaagttcacccttctagacttcagaccacagacaacctgctccccatgtctcctgaggagtttgacgaggtgtctcggatagtgggctctgtagaattcgacagtatgatgaacacagtatagagcatgaatttttttcatcttctctggcgacagttttccttctcatctgtgattccctcctgctactctgttccttcacatcctgtgtttctagggaaatgaaagaaaggccagcaaattcgctgcaacctgttgatagcaagtgaatttttctctaactcagaaacatcagttactctgaagggcatcatgcatcttactgaaggtaaaattgaaaggcattctctgaagagtgggtttcacaagtgaaaaacatccagatacacccaaagtatcaggacgagaatgagggtcctttgggaaaggagaagttaagcaacatctagcaaatgttatgcataaagtcagtgcccaactgttataggttgttggataaatcagtggttatttagggaactgcttgacgtaggaacggtaaatttctgtgggagaattcttacatgttttctttgctttaagtgtaactggcagttttccattggtttacctgtgaaatagttcaaagccaagtttatatacaattatatcagtcctctttcaaaggtagccatcatggatctggtagggggaaaatgtgtattttattacatctttcacattggctatttaaagacaaagacaaattctgtttcttgagaagagaatattagctttactgtttgttatggcttaatgacactagctaatatcaatagaaggatgtacatttccaaattcacaagttgtgtttgatatccaaagctgaatacattctgctttcatcttggtcacatacaattatttttacagttctcccaagggagttaggctattcacaaccactcattcaaaagttgaaattaaccatagatgtagataaactcagaaatttaattcatgtttcttaaatgggctactttgtcctttttgttattagggtggtatttagtctattagccacaaaattgggaaaggagtagaaaaagcagtaactgacaacttgaataatacaccagagataatatgagaatcagatcatttcaaaactcatttcctatgtaactgcattgagaactgcatatgtttcgctgatatatgtgtttttcacatttgcgaatggttccattctctctcctgtactttttccagacacttttttgagtggatgatgtttcgtgaagtatactgtatttttacctttttccttccttatcactgacacaaaaagtagattaagagatgggtttgacaaggttcttcccttttacatactgctgtctatgtggctgtatcttgtttttccactactgctaccacaactatattatcatgcaaatgctgtattcttctttggtggagataaagatttcttgagttttgttttaaaattaaagctaaagtatctgtattgcattaaatataatatgcacacagtgctttccgtggcactgcatacaatctgaggcctcctctctcagtttttatatagatggcgagaacctaagtttcagttgattttacaattgaaatgactaaaaaacaaagaagacaacattaaaacaatattgtttctaaaattgctgaggtttagctgtcagttctttttgccctttgggaattcggcatggtttcattttactgcactagccaagagactttacttttaagaagtattaaaattctaaaattctat

SEQ ID NO: 376825 - DNA, 4481 bp, Homo sapiens
  misc_feature (4481)..(4481): n is a, c, g, or t
attggtgggggcggaagggggccgggcgccagcgctgccttttctcctgccgggtagtttcgctttcctgcgcagagtctgcggaggggctcggctgcaccggggggatcgcgcctggcagaccccagaccgagcagaggcgacccagcgcgctcgggagaggctgcaccgccgcgcccccgcctagcccttccggatcctgcgcgcagaaaagtttcatttgctgtatgccatcctcgagagctgtctaggttaacgttcgcactctgtgtatataacctcgacagtcttggcacctaacgtgctgtgcgtagctgctcctttggttgaatccccaggcccttgttggggcacaaggtggcaggatgtctcagtggtacgaacttcagcagcttgactcaaaattcctggagcaggttcaccagctttatgatgacagttttcccatggaaatcagacagtacctggcacagtggttagaaaagcaagactgggagcacgctgccaatgatgtttcatttgccaccatccgttttcatgacctcctgtcacagctggatgatcaatatagtcgcttttctttggagaataacttcttgctacagcataacataaggaaaagcaagcgtaatcttcaggataattttcaggaagacccaatccagatgtctatgatcatttacagctgtctgaaggaagaaaggaaaattctggaaaacgcccagagatttaatcaggctcagtcggggaatattcagagcacagtgatgttagacaaacagaaagagcttgacagtaaagtcagaaatgtgaaggacaaggttatgtgtatagagcatgaaatcaagagcctggaagatttacaagatgaatatgacttcaaatgcaaaaccttgcagaacagagaacacgagaccaatggtgtggcaaagagtgatcagaaacaagaacagctgttactcaagaagatgtatttaatgcttgacaataagagaaaggaagtagttcacaaaataatagagttgctgaatgtcactgaacttacccagaatgccctgattaatgatgaactagtggagtggaagcggagacagcagagcgcctgtattggggggccgcccaatgcttgcttggatcagctgcagaactggttcactatagttgcggagagtctgcagcaagttcggcagcagcttaaaaagttggaggaattggaacagaaatacacctacgaacatgaccctatcacaaaaaacaaacaagtgttatgggaccgcaccttcagtcttttccagcagctcattcagagctcgtttgtggtggaaagacagccctgcatgccaacgcaccctcagaggccgctggtcttgaagacaggggtccagttcactgtgaagttgagactgttggtgaaattgcaagagctgaattataatttgaaagtcaaagtcttatttgataaagatgtgaatgagagaaatacagtaaaaggatttaggaagttcaacattttgggcacgcacacaaaagtgatgaacatggaggagtccaccaatggcagtctggcggctgaatttcggcacctgcaattgaaagaacagaaaaatgctggcaccagaacgaatgagggtcctctcatcgttactgaagagcttcactcccttagttttgaaacccaattgtgccagcctggtttggtaattgacctcgagacgacctctctgcccgttgtggtgatctccaacgtcagccagctcccgagcggttgggcctccatcctttggtacaacatgctggtggcggaacccaggaatctgtccttcttcctgactccaccatgtgcacgatgggctcagctttcagaagtgctgagttggcagttttcttctgtcaccaaaagaggtctcaatgtggaccagctgaacatgttgggagagaagcttcttggtcctaacgccagccccgatggtctcattccgtggacgaggttttgtaaggaaaatataaatgataaaaattttcccttctggctttggattgaaagcatcctagaactcattaaaaaacacctgctccctctctggaatgatgggtgcatcatgggcttcatcagcaaggagcgagagcgtgccctgttgaaggaccagcagccggggaccttcctgctgcggttcagtgagagctcccgggaaggggccatcacattcacatgggtggagcggtcccagaacggaggcgaacctgacttccatgcggttgaaccctacacgaagaaagaactttctgctgttactttccctgacatcattcgcaattacaaagtcatggctgctgagaatattcctgagaatcccctgaagtatctgtatccaaatattgacaaagaccatgcctttggaaagtattactccaggccaaaggaagcaccagagccaatggaacttgatggccctaaaggaactggatatatcaagactgagttgatttctgtgtctgaagttcacccttctagacttcagaccacagacaacctgctccccatgtctcctgaggagtttgacgaggtgtctcggatagtgggctctgtagaattcgacagtatgatgaacacagtatagagcatgaatttttttcatcttctctggcgacagttttccttctcatctgtgattccctcctgctactctgttccttcacatcctgtgtttctagggaaatgaaagaaaggccagcaaattcgctgcaacctgttgatagcaagtgaatttttctctaactcagaaacatcagttactctgaagggcatcatgcatcttactgaaggtaaaattgaaaggcattctctgaagagtgggtttcacaagtgaaaaacatccagatacacccaaagtatcaggacgagaatgagggtcctttgggaaaggagaagttaagcaacatctagcaaatgttatgcataaagtcagtgcccaactgttataggttgttggataaatcagtggttatttagggaactgcttgacgtaggaacggtaaatttctgtgggagaattcttacatgttttctttgctttaagtgtaactggcagttttccattggtttacctgtgaaatagttcaaagccaagtttatatacaattatatcagtcctctttcaaaggtagccatcatggatctggtagggggaaaatgtgtattttattacatctttcacattggctatttaaagacaaagacaaattctgtttcttgagaagagaatattagctttactgtttgttatggcttaatgacactagctaatatcaatagaaggatgtacatttccaaattcacaagttgtgtttgatatccaaagctgaatacattctgctttcatcttggtcacatacaattatttttacagttctcccaagggagttaggctattcacaaccactcattcaaaagttgaaattaaccatagatgtagataaactcagaaatttaattcatgtttcttaaatgggctactttgtcctttttgttattagggtggtatttagtctattagccacaaaattgggaaaggagtagaaaaagcagtaactgacaacttgaataatacaccagagataatatgagaatcagatcatttcaaaactcatttcctatgtaactgcattgagaactgcatatgtttcgctgatatatgtgtttttcacatttgcgaatggttccattctctctcctgtactttttccagacacttttttgagtggatgatgtttcgtgaagtatactgtatttttacctttttccttccttatcactgacacaaaaagtagattaagagatgggtttgacaaggttcttcccttttacatactgctgtctatgtggctgtatcttgtttttccactactgctaccacaactatattatcatgcaaatgctgtattcttctttggtggagataaagatttcttgagttttgttttaaaattaaagctaaagtatctgtattgcattaaatataatatgcacacagtgctttccgtggcactgcatacaatctgaggcctcctctctcagtttttatatagatggcgagaacctaagtttcagttgattttacaattgaaatgactaaaaaacaaagaagacaacattaaaacaatattgtttctaacaacaaacaaccacaaccctcccacacccccccccccccaccccccaaaacttttggggcgccacacgccccataaacaccttctaaaaccctgatgggccacagcggggccacaagtgtgacagcgaaccagtgggcaccaacgactgccccaggaagacacctgtggacaacacacgcagggagaggcacccacacagataaaacaaccgccggggagaaacacgaggttctcaccaacaaccaaagggagctcgcgacacaaagagagacaacacagagggccaagcaggcccaaataaaacgcgn

SEQ ID NO: 376826 - DNA, 4118 bp, Homo sapiens
attggtgggggcggaagggggccgggcgccagcgctgccttttctcctgccgggtagtttcgctttcctgcgcagagtctgcggaggggctcggctgcaccggggggatcgcgcctggcagaccccagaccgagcagaggcgacccagcgcgctcgggagaggctgcaccgccgcgcccccgcctagcccttccggatcctgcgcgcagaaaagtttcatttgctgtatgccatcctcgagagctgtctaggttaacgttcgcactctgtgtatataacctcgacagtcttggcacctaacgtgctgtgcgtagctgctcctttggttgaatccccaggcccttgttggggcacaaggtggcaggatgtctcagtggtacgaacttcagcagcttgactcaaaattcctggagcaggttcaccagctttatgatgacagttttcccatggaaatcagacagtacctggcacagtggttagaaaagcaagactgggagcacgctgccaatgatgtttcatttgccaccatccgttttcatgacctcctgtcacagctggatgatcaatatagtcgcttttctttggagaataacttcttgctacagcataacataaggaaaagcaagcgtaatcttcaggataattttcaggaagacccaatccagatgtctatgatcatttacagctgtctgaaggaagaaaggaaaattctggaaaacgcccagagatttaatcaggctcagtcggggaatattcagagcacagtgatgttagacaaacagaaagagcttgacagtaaagtcagaaatgtgaaggacaaggttatgtgtatagagcatgaaatcaagagcctggaagatttacaagatgaatatgacttcaaatgcaaaaccttgcagaacagagaacacgagaccaatggtgtggcaaagagtgatcagaaacaagaacagctgttactcaagaagatgtatttaatgcttgacaataagagaaaggaagtagttcacaaaataatagagttgctgaatgtcactgaacttacccagaatgccctgattaatgatgaactagtggagtggaagcggagacagcagagcgcctgtattggggggccgcccaatgcttgcttggatcagctgcagaactggttcactatagttgcggagagtctgcagcaagttcggcagcagcttaaaaagttggaggaattggaacagaaatacacctacgaacatgaccctatcacaaaaaacaaacaagtgttatgggaccgcaccttcagtcttttccagcagctcattcagagctcgtttgtggtggaaagacagccctgcatgccaacgcaccctcagaggccgctggtcttgaagacaggggtccagttcactgtgaagttgagactgttggtgaaattgcaagagctgaattataatttgaaagtcaaagtcttatttgataaagatgtgaatgagagaaatacagtaaaaggatttaggaagttcaacattttgggcacgcacacaaaagtgatgaacatggaggagtccaccaatggcagtctggcggctgaatttcggcacctgcaattgaaagaacagaaaaatgctggcaccagaacgaatgagggtcctctcatcgttactgaagagcttcactcccttagttttgaaacccaattgtgccagcctggtttggtaattgacctcgagacgacctctctgcccgttgtggtgatctccaacgtcagccagctcccgagcggttgggcctccatcctttggtacaacatgctggtggcggaacccaggaatctgtccttcttcctgactccaccatgtgcacgatgggctcagctttcagaagtgctgagttggcagttttcttctgtcaccaaaagaggtctcaatgtggaccagctgaacatgttgggagagaagcttcttggtcctaacgccagccccgatggtctcattccgtggacgaggttttgtaaggaaaatataaatgataaaaattttcccttctggctttggattgaaagcatcctagaactcattaaggagcgagagcgtgccctgttgaaggaccagcagccggggaccttcctgctgcggttcagtgagagctcccgggaaggggccatcacattcacatgggtggagcggtcccagaacggaggcgaacctgacttccatgcggttgaaccctacacgaagaaagaactttctgctgttactttccctgacatcattcgcaattacaaagtcatggctgctgagaatattcctgagaatcccctgaagtatctgtatccaaatattgacaaagaccatgcctttggaaagtattactccaggccaaaggaagcaccagagccaatggaacttgatggccctaaaggaactggatatatcaagactgagttgatttctgtgtctgaagttcacccttctagacttcagaccacagacaacctgctccccatgtctcctgaggagtttgacgaggtgtctcggatagtgggctctgtagaattcgacagtatgatgaacacagtatagagcatgaatttttttcatcttctctggcgacagttttccttctcatctgtgattccctcctgctactctgttccttcacatcctgtgtttctagggaaatgaaagaaaggccagcaaattcgctgcaacctgttgatagcaagtgaatttttctctaactcagaaacatcagttactctgaagggcatcatgcatcttactgaaggtaaaattgaaaggcattctctgaagagtgggtttcacaagtgaaaaacatccagatacacccaaagtatcaggacgagaatgagggtcctttgggaaaggagaagttaagcaacatctagcaaatgttatgcataaagtcagtgcccaactgttataggttgttggataaatcagtggttatttagggaactgcttgacgtaggaacggtaaatttctgtgggagaattcttacatgttttctttgctttaagtgtaactggcagttttccattggtttacctgtgaaatagttcaaagccaagtttatatacaattatatcagtcctctttcaaaggtagccatcatggatctggtagggggaaaatgtgtattttattacatctttcacattggctatttaaagacaaagacaaattctgtttcttgagaagagaatattagctttactgtttgttatggcttaatgacactagctaatatcaatagaaggatgtacatttccaaattcacaagttgtgtttgatatccaaagctgaatacattctgctttcatcttggtcacatacaattatttttacagttctcccaagggagttaggctattcacaaccactcattcaaaagttgaaattaaccatagatgtagataaactcagaaatttaattcatgtttcttaaatgggctactttgtcctttttgttattagggtggtatttagtctattagccacaaaattgggaaaggagtagaaaaagcagtaactgacaacttgaataatacaccagagataatatgagaatcagatcatttcaaaactcatttcctatgtaactgcattgagaactgcatatgtttcgctgatatatgtgtttttcacatttgcgaatggttccattctctctcctgtactttttccagacacttttttgagtggatgatgtttcgtgaagtatactgtatttttacctttttccttccttatcactgacacaaaaagtagattaagagatgggtttgacaaggttcttcccttttacatactgctgtctatgtggctgtatcttgtttttccactactgctaccacaactatattatcatgcaaatgctgtattcttctttggtggagataaagatttcttgagttttgttttaaaattaaagctaaagtatctgtattgcattaaatataatatgcacacagtgctttccgtggcactgcatacaatctgaggcctcctctctcagtttttatatagatggcgagaacctaagtttcagttgattttacaattgaaatgactaaaaaacaaagaagacaacattaaaacaatattgtttctaa

SEQ ID NO: 376827 - DNA, 3795 bp, Homo sapiens
  misc_feature (3709)..(3709): n is a, c, g, or t
attggtgggggcggaagggggccgggcgccagcgctgccttttctcctgccgggtagtttcgctttcctgcgcagagtctgcggaggggctcggctgcaccggggggatcgcgcctggcagaccccagaccgagcagaggcgacccagcgcgctcgggagaggctgcaccgccgcgcccccgcctagcccttccggatcctgcgcgcagaaaagtttcatttgctgtatgccatcctcgagagctgtctaggttaacgttcgcactctgtgtatataacctcgacagtcttggcacctaacgtgctgtgcgtagctgctcctttggttgaatccccaggcccttgttggggcacaaggtggcaggatgtctcagtggtacgaacttcagcagcttgactcaaaattcctggagcaggttcaccagctttatgatgacagttttcccatggaaatcagacagtacctggcacagtggttagaaaagcaagactgggagcacgctgccaatgatgtttcatttgccaccatccgttttcatgacctcctgtcacagctggatgatcaatatagtcgcttttctttggagaataacttcttgctacagcataacataaggaaaagcaagcgtaatcttcaggataattttcaggaagacccaatccagatgtctatgatcatttacagctgtctgaaggaagaaaggaaaattctggaaaacgcccagagatttaatcaggctcagtcggggaatattcagagcacagtgatgttagacaaacagaaagagcttgacagtaaagtcagaaatgtgaaggacaaggttatgtgtatagagcatgaaatcaagagcctggaagatttacaagatgaatatgacttcaaatgcaaaaccttgcagaacagagaacacgagaccaatggtgtggcaaagagtgatcagaaacaagaacagctgttactcaagaagatgtatttaatgcttgacaataagagaaaggaagtagttcacaaaataatagagttgctgaatgtcactgaacttacccagaatgccctgattaatgatgaactagtggagtggaagcggagacagcagagcgcctgtattggggggccgcccaatgcttgcttggatcagctgcagaactggttcactatagttgcggagagtctgcagcaagttcggcagcagcttaaaaagttggaggaattggaacagaaatacacctacgaacatgaccctatcacaaaaaacaaacaagtgttatgggaccgcaccttcagtcttttccagcagctcattcagagctcgtttgtggtggaaagacagccctgcatgccaacgcaccctcagaggccgctggtcttgaagacaggggtccagttcactgtgaagttgagactgttggtgaaattgcaagagctgaattataatttgaaagtcaaagtcttatttgataaagatgtgaatgagagaaatacagtaaaaggatttaggaagttcaacattttgggcacgcacacaaaagtgatgaacatggaggagtccaccaatggcagtctggcggctgaatttcggcacctgcaattgaaagaacagaaaaatgctggcaccagaacgaatgagggtcctctcatcgttactgaagagcttcactcccttagttttgaaacccaattgtgccagcctggtttggtaattgacctcgagacgacctctctgcccgttgtggtgatctccaacgtcagccagctcccgagcggttgggcctccatcctttggtacaacatgctggtggcggaacccaggaatctgtccttcttcctgactccaccatgtgcacgatgggctcagctttcagaagtgctgagttggcagttttcttctgtcaccaaaagaggtctcaatgtggaccagctgaacatgttgggagagaagcttcttggtcctaacgccagccccgatggtctcattccgtggacgaggttttgtaaggaaaatataaatgataaaaattttcccttctggctttggattgaaagcatcctagaactcattaaaaaacacctgctccctctctggaatgatgggtgcatcatgggcttcatcagcaaggagcgagagcgtgccctgttgaaggaccagcagccggggaccttcctgctgcggttcagtgagagctcccgggaaggggccatcacattcacatgggtggagcggtcccagaacggaggcgaacctgacttccatgcggttgaaccctacacgaagaaagaactttctgctgttactttccctgacatcattcgcaattacaaagtcatggctgctgagaatattcctgagaatcccctgaagtatctgtatccaaatattgacaaagaccatgcctttggaaagtattactccaggccaaaggaagcaccagagccaatggaacttgatggccctaaaggaactggatatatcaagactgagttgatttctgtgtctgaagttcacccttctagacttcagaccacagacaacctgctccccatgtctcctgaggagtttgacgaggtgtctcggatagtgggctctgtagaattcgacagtatgatgaacacagtatagagcatgaatttttttcatcttctctggcgacagttttccttctcatctgtgattccctcctgctactctgttccttcacatcctgtgtttctagggaaatgaaagaaaggccagcaaattcgctgcaacctgttgatagcaagtgaatttttctctaactcagaaacatcagttactctgaagggcatcatgcatcttactgaaggtaaaattgaaaggcattctctgaagagtgggtttcacaagtgaaaaacatccagatacacccaaagtatcaggacgagaatgagggtcctttgggaaaggagaagttaagcaacatctagcaaatgttatgcataaagtcagtgcccaactgttataggttgttggataaatcagtggttatttagggaactgcttgacgtaggaacggtaaatttctgtgggagaattcttacatgttttctttgctttaagtgtaactggcagttttccattggtttacctgtgaaatagttcaaagccaagtttatatacaattatatcagtcctctttcaaaggtagccatcatggatctggtagggggaaaatgtgtattttattacatctttcacattggctatttaaagacaaagacaaattctgtttcttgagaagagaatattagctttactgtttgttatggcttaatgacactagctaatatcaatagaaggatgtacatttccaaattcacaagttgtgtttgatatccaaagctgaatacattctgctttcatcttggtcacatacaattatttttacagttctcccaagggagttaggctattcacaaccactcattcaaaagttgaaattaaccatagatgtagataaactcagaaatttaattcatgtttcttaaatgggctactttgtcctttttgttattagggtggtatttagtctattagccacaaaattgggaaaggagtagaaaaagcagtaactgacaacttgaataatacaccagagataatatgagaatcagatcatttcaaaactcatttcctatgtaactgcattgagaactgcatatgtttcgctgatatatgtgtttcccttgganggtcctctccccgtgtttccgacctttggggtggtgtgcgaggtgtcttctctttgccgtagggggggcccagggggggggggtcc

SEQ ID NO: 376828 - DNA, 3819 bp, Homo sapiens
attggtgggggcggaagggggccgggcgccagcgctgccttttctcctgccgggtagtttcgctttcctgcgcagagtctgcggaggggctcggctgcaccggggggatcgcgcctggcagaccccagaccgagcagaggcgacccagcgcgctcgggagaggctgcaccgccgcgcccccgcctagcccttccggatcctgcgcgcagaaaagtttcatttgctgtatgccatcctcgagagctgtctaggttaacgttcgcactctgtgtatataacctcgacagtcttggcacctaacgtgctgtgcgtagctgctcctttggttgaatccccaggcccttgttggggcacaaggtggcaggatgtctcagtggtacgaacttcagcagcttgactcaaaattcctggagcaggttcaccagctttatgatgacagttttcccatggaaatcagacagtacctggcacagtggttagaaaagcaagactgggagcacgctgccaatgatgtttcatttgccaccatccgttttcatgacctcctgtcacagctggatgatcaatatagtcgcttttctttggagaataacttcttgctacagcataacataaggaaaagcaagcgtaatcttcaggataattttcaggaagacccaatccagatgtctatgatcatttacagctgtctgaaggaagaaaggaaaattctggaaaacgcccagagatttaatcaggctcagtcggggaatattcagagcacagtgatgttagacaaacagaaagagcttgacagtaaagtcagaaatgtgaaggacaaggttatgtgtatagagcatgaaatcaagagcctggaagatttacaagatgaatatgacttcaaatgcaaaaccttgcagaacagagaacacgagaccaatggtgtggcaaagagtgatcagaaacaagaacagctgttactcaagaagatgtatttaatgcttgacaataagagaaaggaagtagttcacaaaataatagagttgctgaatgtcactgaacttacccagaatgccctgattaatgatgaactagtggagtggaagcggagacagcagagcgcctgtattggggggccgcccaatgcttgcttggatcagctgcagaactggttcactatagttgcggagagtctgcagcaagttcggcagcagcttaaaaagttggaggaattggaacagaaatacacctacgaacatgaccctatcacaaaaaacaaacaagtgttatgggaccgcaccttcagtcttttccagcagctcattcagagctcgtttgtggtggaaagacagccctgcatgccaacgcaccctcagaggccgctggtcttgaagacaggggtccagttcactgtgaagttgagactgttggtgaaattgcaagagctgaattataatttgaaagtcaaagtcttatttgataaagatgtgaatgagagaaatacagtaaaaggatttaggaagttcaacattttgggcacgcacacaaaagtgatgaacatggaggagtccaccaatggcagtctggcggctgaatttcggcacctgcaattgaaagaacagaaaaatgctggcaccagaacgaatgagggtcctctcatcgttactgaagagcttcactcccttagttttgaaacccaattgtgccagcctggtttggtaattgacctcgagacgacctctctgcccgttgtggtgatctccaacgtcagccagctcccgagcggttgggcctccatcctttggtacaacatgctggtggcggaacccaggaatctgtccttcttcctgactccaccatgtgcacgatgggctcagctttcagaagtgctgagttggcagttttcttctgtcaccaaaagaggtctcaatgtggaccagctgaacatgttgggagagaagcttcttggtcctaacgccagccccgatggtctcattccgtggacgaggttttgtaaggaaaatataaatgataaaaattttcccttctggctttggattgaaagcatcctagaactcattaaaaaacacctgctccctctctggaatgatgggtgcatcatgggcttcatcagcaaggagcgagagcgtgccctgttgaaggaccagcagccggggaccttcctgctgcggttcagtgagagctcccgggaaggggccatcacattcacatgggtggagcggtcccagaacggaggcgaacctgacttccatgcggttgaaccctacacgaagaaagaactttctgctgttactttccctgacatcattcgcaattacaaagtcatggctgctgagaatattcctgagaatcccctgaagtatctgtatccaaatattgacaaagaccatgcctttggaaagtattactccaggccaaaggaagcaccagagccaatggaacttgatggccctaaaggaactggatatatcaagactgagttgatttctgtgtctgaagttcacccttctagacttcagaccacagacaacctgctccccatgtctcctgaggagtttgacgaggtgtctcggatagtgggctctgtagaattcgacagtatgatgaacacagtatagagcatgaatttttttcatcttctctggcgacagttttccttctcatctgtgattccctcctgctactctgttccttcacatcctgtgtttctagggaaatgaaagaaaggccagcaaattcgctgcaacctgttgatagcaagtgaatttttctctaactcagaaacatcagttactctgaagggcatcatgcatcttactgaaggtaaaattgaaaggcattctctgaagagtgggtttcacaagtgaaaaacatccagatacacccaaagtatcaggacgagaatgagggtcctttgggaaaggagaagttaagcaacatctagcaaatgttatgcataaagtcagtgcccaactgttataggttgttggataaatcagtggttatttagggaactgcttgacgtaggaacggtaaatttctgtgggagaattcttacatgttttctttgctttaagtgtaactggcagttttccattggtttacctgtgaaatagttcaaagccaagtttatatacaattatatcagtcctctttcaaaggtagccatcatggatctggtagggggaaaatgtgtattttattacatctttcacattggctatttaaagacaaagacaaattctgtttcttgagaagagaatattagctttactgtttgttatggcttaatgacactagctaatatcaatagaaggatgtacatttccaaattcacaagttgtgtttgatatccaaagctgaatacattctgctttcatcttggtcacatacaattatttttacagttctcccaagggagttaggctattcacaaccactcattcaaaagttgaaattaaccatagatgtagataaactcagaaatttaattcatgtttcttaaatgggctactttgtcctttttgttattagggtggtatttagtctattagccacaaaattgggaaaggagtagaaaaagcagtaactgacaacttgaataatacaccagagataatatgagaatcagatcatttcaaaactcatttcctatgtaactgcattgagaactgcatatgtttcgctgatatatgtgtttcccattggaagggcactctcccggcttccgccttttgggggcggtcgggcatcggtttcctctctctttccaaattaaagtgggggcccccagggtgggtgttcgcccaatacgctggg

SEQ ID NO: 376829 - DNA, 1083 bp, Homo sapiens
ttgcatatggcaaggccaaggtcagaagatgaaccacgtgacgaaatagaaaaagctacctatggagttgtttgcatatggcaaggccaagtttagggaaaatgtgtattttattacatctttcacattggctatttaaagacaaagacaaattctgtttcttgagaagagaatattagctttactgtttgttatggcttaatgacactagctaatatcaatagaaggatgtacatttccaaattcacaagttgtgtttgatatccaaagctgaatacattctgctttcatcttggtcacatacaattatttttacagttctcccaagggagttaggctattcacaaccactcattcaaaagttgaaattaaccatagatgtagataaactcagaaatttaattcatgtttcttaaatgggctactttgtcctttttgttattagggtggtatttagtctattagccacaaaattgggaaaggagtagaaaaagcagtaactgacaacttgaataatacaccagagataatatgagaatcagatcatttcaaaactcatttcctatgtaactgcattgagaactgcatatgtttcgctgatatatgtgtttttcacatttgcgaatggttccattctctctcctgtactttttccagacacttttttgagtggatgatgtttcgtgaagtatactgtatttttacctttttccttccttatcactgacacaaaaagtagattaagagatgggtttgacaaggttcttcccttttacatactgctgtctatgtggctgtatcttgtttttccactactgctaccacaactatattatcatgcaaatgctgtattcttctttggtggagataaagatttcttgagttttgttttaaaattaaagctaaagtatctgtattgcattaaatataatatgcacacagtgctttccgtggcactgcatacaatctgaggcctcctctctcagtttttatatagatggcgagaacctaagtttcagttgattttacaattgaaatgactaaaaaacaaagaagacaacattaaaacaatattgtttctaa

SEQ ID NO: 376830 - DNA, 3671 bp, Homo sapiens
attggtgggggcggaagggggccgggcgccagcgctgccttttctcctgccgggtagtttcgctttcctgcgcagagtctgcggaggggctcggctgcaccggggggatcgcgcctggcagaccccagaccgagcagaggcgacccagcgcgctcgggagaggctgcaccgccgcgcccccgcctagcccttccggatcctgcgcgcagaaaagtttcatttgctgtatgccatcctcgagagctgtctaggttaacgttcgcactctgtgtatataacctcgacagtcttggcacctaacgtgctgtgcgtagctgctcctttggttgaatccccaggcccttgttggggcacaaggtggcaggatgtctcagtggtacgaacttcagcagcttgactcaaaattcctggagcaggttcaccagctttatgatgacagttttcccatggaaatcagacagtacctggcacagtggttagaaaagcaagactgggagcacgctgccaatgatgtttcatttgccaccatccgttttcatgacctcctgtcacagctggatgatcaatatagtcgcttttctttggagaataacttcttgctacagcataacataaggaaaagcaagcgtaatcttcaggataattttcaggaagacccaatccagatgtctatgatcatttacagctgtctgaaggaagaaaggaaaattctggaaaacgcccagagatttaatcaggctcagtcggggaatattcagagcacagtgatgttagacaaacagaaagagcttgacagtaaagtcagaaatgtgaaggacaaggttatgtgtatagagcatgaaatcaagagcctggaagatttacaagatgaatatgacttcaaatgcaaaaccttgcagaacagagaacacgagaccaatggtgtggcaaagagtgatcagaaacaagaacagctgttactcaagaagatgtatttaatgcttgacaataagagaaaggaagtagttcacaaaataatagagttgctgaatgtcactgaacttacccagaatgccctgattaatgatgaactagtggagtggaagcggagacagcagagcgcctgtattggggggccgcccaatgcttgcttggatcagctgcagaactggttcactatagttgcggagagtctgcagcaagttcggcagcagcttaaaaagttggaggaattggaacagaaatacacctacgaacatgaccctatcacaaaaaacaaacaagtgttatgggaccgcaccttcagtcttttccagcagctcattcagagctcgtttgtggtggaaagacagccctgcatgccaacgcaccctcagaggccgctggtcttgaagacaggggtccagttcactgtgaagttgagactgttggtgaaattgcaagagctgaattataatttgaaagtcaaagtcttatttgataaagatgtgaatgagagaaatacagtaaaaggatttaggaagttcaacattttgggcacgcacacaaaagtgatgaacatggaggagtccaccaatggcagtctggcggctgaatttcggcacctgcaattgaaagaacagaaaaatgctggcaccagaacgaatgagggtcctctcatcgttactgaagagcttcactcccttagttttgaaacccaattgtgccagcctggtttggtaattgacctcgagacgacctctctgcccgttgtggtgatctccaacgtcagccagctcccgagcggttgggcctccatcctttggtacaacatgctggtggcggaacccaggaatctgtccttcttcctgactccaccatgtgcacgatgggctcagctttcagaagtgctgagttggcagttttcttctgtcaccaaaagaggtctcaatgtggaccagctgaacatgttgggagagaagcttcttggtcctaacgccagccccgatggtctcattccgtggacgaggttttgtaaggaaaatataaatgataaaaattttcccttctggctttggattgaaagcatcctagaactcattaaaaaacacctgctccctctctggaatgatgggtgcatcatgggcttcatcagcaaggagcgagagcgtgccctgttgaaggaccagcagccggggaccttcctgctgcggttcagtgagagctcccgggaaggggccatcacattcacatgggtggagcggtcccagaacggaggcgaacctgacttccatgcggttgaaccctacacgaagaaagaactttctgctgttactttccctgacatcattcgcaattacaaagtcatggctgctgagaatattcctgagaatcccctgaagtatctgtatccaaatattgacaaagaccatgcctttggaaagtattactccaggccaaaggaagcaccagagccaatggaacttgatggccctaaaggaactggatatatcaagactgagttgatttctgtgtctgaagttcacccttctagacttcagaccacagacaacctgctccccatgtctcctgaggagtttgacgaggtgtctcggatagtgggctctgtagaattcgacagtatgatgaacacagtatagagcatgaatttttttcatcttctctggcgacagttttccttctcatctgtgattccctcctgctactctgttccttcacatcctgtgtttctagggaaatgaaagaaaggccagcaaattcgctgcaacctgttgatagcaagtgaatttttctctaactcagaaacatcagttactctgaagggcatcatgcatcttactgaagatccacggggtaggaaactgctcactcagcatcctccccatggaagctcaagcatgggaacagcttcgggcctggtgcagctaaggaacattggccgtggtttcaccaaaggaggtgccatctaggtaatgggagggcagtggcaggagccactggcttagactggaagtgaaaatgaaagcacctggaggctgctggagtaaggtgccatcaggcatgtaaagtttagaagcagcagagtgtgctcatagaaaaagaaaaaaaaaggaatttgctgtatgtgataacaactaacattcatgtacttgagctcatttcactaaacacagcttcagagaagtccatttgtgtgcatgtgtgtgtgtgcttaatatcagaactcctcactaacatgccactttatctcgaggtatgacaggataaaatgtatgtgtaactcctagaaaatcctgttctatccgttttttgaagccccttttacccactttccaaatgaatcctgaattaccaacccaagacaaagaattataggtcacaatttaaaatgaaatggcctttttcttattattaaactacagagcccaccaagaattacacaatagaaaaatcacaagaaatctggaatgatccagtggtcccccaaggaggacaaatctcttgatgcagactcttaatgacaggcttggaaacaaatgtttgttagttgtagcagttcccatactttcagaataactttggtagcttagagcatttctgaatttatctttaccctagaagctaaaaaaaaaaacttcttaaagagctgcagttgcacatcccttcgttttttagactgataaacttgacta

SEQ ID NO: 376831 - DNA, 841 bp, Homo sapiens
ggaaaggagtagaaaaagcagtaactgacaacttgaataatacaccagagataatagactaaataccaccctaataacaaaaaggacaaattaggctattcacaaccactcattcaaaagttgaaattaaccatagatgtagataaactcagaaatttaattcatgtttcttaaatgggctactttgtcctttttgttattagggtggtatttagtctattagccacaaaattgggaaaggagtagaaaaagcagtaactgacaacttgaataatacaccagagataatatgagaatcagatcatttcaaaactcatttcctatgtaactgcattgagaactgcatatgtttcgctgatatatgtgtttttcacatttgcgaatggttccattctctctcctgtactttttccagacacttttttgagtggatgatgtttcgtgaagtatactgtatttttacctttttccttccttatcactgacacaaaaagtagattaagagatgggtttgacaaggttcttcccttttacatactgctgtctatgtggctgtatcttgtttttccactactgctaccacaactatattatcatgcaaatgctgtattcttctttggtggagataaagatttcttgagttttgttttaaaattaaagctaaagtatctgtattgcattaaatataatatgcacacagtgctttccgtggcactgcatacaatctgaggcctcctctctcagtttttatatagatggcgagaacctaagtttcagttgattttacaattgaaatgactaaaaaacaaagaagacaacattaaaacaatattgtttctaa

SEQ ID NO: 376832 - DNA, 818 bp, Homo sapiens
ttcatccgccaactaatatttcactttacatccaaacatcactttggcttcgaagccgccgcctgatactggcattttgtagatgtggtttgactatttctgtatgtctccatctatggttaatttcagaaatttaattcatgtttcttaaatgggctactttgtcctttttgttattagggtggtatttagtctattagccacaaaattgggaaaggagtagaaaaagcagtaactgacaacttgaataatacaccagagataatatgagaatcagatcatttcaaaactcatttcctatgtaactgcattgagaactgcatatgtttcgctgatatatgtgtttttcacatttgcgaatggttccattctctctcctgtactttttccagacacttttttgagtggatgatgtttcgtgaagtatactgtatttttacctttttccttccttatcactgacacaaaaagtagattaagagatgggtttgacaaggttcttcccttttacatactgctgtctatgtggctgtatcttgtttttccactactgctaccacaactatattatcatgcaaatgctgtattcttctttggtggagataaagatttcttgagttttgttttaaaattaaagctaaagtatctgtattgcattaaatataatatgcacacagtgctttccgtggcactgcatacaatctgaggcctcctctctcagtttttatatagatggcgagaacctaagtttcagttgattttacaattgaaatgactaaaaaacaaagaagacaacattaaaacaatattgtttctaa

SEQ ID NO: 376833 - DNA, 501 bp, Homo sapiens
ttttttttctcacattccagccattttcttggtttgtaagttagcatgaaaatggaaatcatgattgaactaaaagcccatccgtccatctcttcgatatccaggtgcatcatgggcttcatcagcaaggagcgagagcgtgccctgttgaaggaccagcagccggggaccttcctgctgcggttcagtgagagctcccgggaaggggccatcacattcacatgggtggagcggtcccagaacggaggcggtgagtgggagtttgagcacatagtcccaccattccatgtgtgtgaagtccctcttcatcgccgccagtcagctcatacagatagtgcgtttgggacatgaaattgcagatcttatacttaccccaaatgagcccccgataggatttaataaaccaccacaaatgtttgtggttgtggttcactctctggaacatattgtggaaatgatggttttggatgtgagtcaatgtaatctgcaacccgttcttgg

SEQ ID NO: 376834 - DNA, 358 bp, Homo sapiens
cccgtttcacatgagcagatttgacacgttgctctgtccccagacttgcataacagcaaaaagctttatgcagtctggatggattcacaaaattaagccagtgggcagcagagtaataatccgtcagcttaggtgatataaaaggtcttgattagcccaggataatacatagtacatgctgaaggccctcttattccacggtatttatttgccattgcaagtatcttcctactacttcattctagaatagacaagcaatgtttaatgtatgagtctgcatttcacaagatcagtgtaataaacttaaccacattttgtctttttacagatgaacacagtatagagcatgaattttttt

SEQ ID NO: 376835 - DNA, 305 bp, Homo sapiens
cagcgtggtaccatgcaactgtatgaattaatggaaactcccagaaatactgtttattttagacatgaattgagcctagtttttttgtaaccttgttaacagtttgccagcattttccagggccttgggaaaaatttcatattgacacataagcaggaagcctgtagtacatgtcagaagatctggaaggcaagtggggacttgactttggagtgtaaccagcaagtacacaccctgaagaaaacgatggctataatcatgcccttcccattacaggctcagtcggggaatattcagagcacagt

SEQ ID NO: 376836 - DNA, 750 bp, Homo sapiens
ctcggctgcaccggggggatcgcgcctggcagaccccagaccgagcagaggcgacccagcgcgctcgggagaggctgcaccgccgcgcccccgcctagcccttccggatcctgcgcgcagagtgagtggccgtgaggttccgggtgccgggggtgggacgcgcagggacagagtcctcgggccgtgcagttggacgccgggcgaggacgggccgtctgtgctgacccgcgaatagtgatcccagaggaagaacgcgtcctgagtattccaagtgcgagcagtgccacctgttctcggagatggcactgctcagcacgattgtccttgccagtcgtgctctggcagtgaagaggacttgtgaaatataattttcctctagaaggcactgcaccttcccatttaccgtcactttctcccgtttccacccctttccatcagtcacgttttcttcttttcgcagaaagtttcatttgctgtatgccatcctcgagagctgtctaggttaacgttcgcactctgtgtatataacctcgacagtcttggcacctaacgtgctgtgcgtagctgctcctttggttgaatccccaggcccttgttggggcacaaggtggcaggtcagtaaatgttcatggaatcagatgaatgagtacatgacttcggaatcttaattatgtttctatgttcaaagatggaagggcttaatgtcttcctagagtttaaaagtgatgtttagtttttgcagacccccca

SEQ ID NO: 376837 - DNA, 308 bp, Homo sapiens
ctctgaatctataacccttgccgtaacttcagacacttatctttcagagcacactgagatactaagaatcattaaatctgggagagattgaatattgagtcttcagacttgccactgattgggcccaggatctctgtggcctgttgcaatgttaattgggcttttgaaagttttaggatctgtgaataattatattcttttcttctttccttttctcttccaagggtcctctcatcgttactgaagagcttcactcccttagttttgaaacccaattgtgccagcctggtttggtaattgacctcgag

SEQ ID NO: 376838 - DNA, 387 bp, Homo sapiens
ttgcctcaaccttaatggaaatgctaacttatctatcctttgctgggtatttgcagctcgtttgtggtggaaagacagccctgcatgccaacgcaccctcagaggccgctggtcttgaagacaggggtccagttcactgtgaagttgaggtaacaagggaaagatggcatcccatacatcacctgtcacgtagtttgtacccctagtttccttttataaaaactgttatatagggtgcttttgaggaaataatttttcagggggcactttaatatgaactcttactgagaatatctgagagtcttttattaatatattcatagtagaaatgtaactgatatacatatatgtacacactcctggtttttttccaatcataaatgtaat

SEQ ID NO: 376839 - DNA, 493 bp, Homo sapiens
agcgtgttaagagactcgaattctttgctgctgtgtgctgctgtgtgtgcacgggtgtgtcttcaaatgaccccaaagatgccatgtatttagattttggagttacaagtaaattttagtgagtaaacaagttcacaaatgtgcatctgtaaataatgaaaattgactgtatttctcttcccctactgtgaaagcacctgtgtgtcatataaactagaattgaactttgggatggacatatgttttagtgccacacttgtgactggtgtctctgtagtaacccttagattttgggtgttttctctctagaatctgtccttcttcctgactccaccatgtgcacgatgggctcagctttcagaagtgctgagttggcagttttcttctgtcaccaaaagaggtctcaatgtggaccagctgaacatgttgggagagaagcttcttggtatatgcatattaacttgttatgtttataaaaattgaaattcataaa

SEQ ID NO: 376840 - DNA, 443 bp, Homo sapiens
ttgctgtgctgaatgggacagttccatccttggcacctggggagtctttgcaaatgatggtgggaggggccatggtaagtcattgttttagatttttgttcataatgtctgcatttgtatactttcaggaaaatataaatgataaaaattttcccttctggctttggattgaaagcatcctagaactcattaaaaaacacctgctccctctctggaatgatgggtaagggccaccgatagatgtattttgaaacatatttttagtgctgcgaggttgagacaaggcctgagtccagcttcagtatttgactaggcgtgtgtgaatctcacaggagtgcgcatttataggctgccccttcagggcttcagaagagtagaacctcataacattaaccttacactttcttagtacaagtatatgtattggcaaagctaaattaaaa

SEQ ID NO: 376841 - DNA, 4003 bp, Homo sapiens
attaaacctctcgccgagcccctccgcagactctgcgccggaaagtttcatttgctgtatgccatcctcgagagctgtctaggttaacgttcgcactctgtgtatataacctcgacagtcttggcacctaacgtgctgtgcgtagctgctcctttggttgaatccccaggcccttgttggggcacaaggtggcaggatgtctcagtggtacgaacttcagcagcttgactcaaaattcctggagcaggttcaccagctttatgatgacagttttcccatggaaatcagacagtacctggcacagtggttagaaaagcaagactgggagcacgctgccaatgatgtttcatttgccaccatccgttttcatgacctcctgtcacagctggatgatcaatatagtcgcttttctttggagaataacttcttgctacagcataacataaggaaaagcaagcgtaatcttcaggataattttcaggaagacccaatccagatgtctatgatcatttacagctgtctgaaggaagaaaggaaaattctggaaaacgcccagagatttaatcaggctcagtcggggaatattcagagcacagtgatgttagacaaacagaaagagcttgacagtaaagtcagaaatgtgaaggacaaggttatgtgtatagagcatgaaatcaagagcctggaagatttacaagatgaatatgacttcaaatgcaaaaccttgcagaacagagaacacgagaccaatggtgtggcaaagagtgatcagaaacaagaacagctgttactcaagaagatgtatttaatgcttgacaataagagaaaggaagtagttcacaaaataatagagttgctgaatgtcactgaacttacccagaatgccctgattaatgatgaactagtggagtggaagcggagacagcagagcgcctgtattggggggccgcccaatgcttgcttggatcagctgcagaactggttcactatagttgcggagagtctgcagcaagttcggcagcagcttaaaaagttggaggaattggaacagaaatacacctacgaacatgaccctatcacaaaaaacaaacaagtgttatgggaccgcaccttcagtcttttccagcagctcattcagagctcgtttgtggtggaaagacagccctgcatgccaacgcaccctcagaggccgctggtcttgaagacaggggtccagttcactgtgaagttgagactgttggtgaaattgcaagagctgaattataatttgaaagtcaaagtcttatttgataaagatgtgaatgagagaaatacagtaaaaggatttaggaagttcaacattttgggcacgcacacaaaagtgatgaacatggaggagtccaccaatggcagtctggcggctgaatttcggcacctgcaattgaaagaacagaaaaatgctggcaccagaacgaatgagggtcctctcatcgttactgaagagcttcactcccttagttttgaaacccaattgtgccagcctggtttggtaattgacctcgagacgacctctctgcccgttgtggtgatctccaacgtcagccagctcccgagcggttgggcctccatcctttggtacaacatgctggtggcggaacccaggaatctgtccttcttcctgactccaccatgtgcacgatgggctcagctttcagaagtgctgagttggcagttttcttctgtcaccaaaagaggtctcaatgtggaccagctgaacatgttgggagagaagcttcttggtcctaacgccagccccgatggtctcattccgtggacgaggttttgtaaggaaaatataaatgataaaaattttcccttctggctttggattgaaagcatcctagaactcattaaaaaacacctgctccctctctggaatgatgggtgcatcatgggcttcatcagcaaggagcgagagcgtgccctgttgaaggaccagcagccggggaccttcctgctgcggttcagtgagagctcccgggaaggggccatcacattcacatgggtggagcggtcccagaacggaggcgaacctgacttccatgcggttgaaccctacacgaagaaagaactttctgctgttactttccctgacatcattcgcaattacaaagtcatggctgctgagaatattcctgagaatcccctgaagtatctgtatccaaatattgacaaagaccatgcctttggaaagtattactccaggccaaaggaagcaccagagccaatggaacttgatggccctaaaggaactggatatatcaagactgagttgatttctgtgtctgaagttcacccttctagacttcagaccacagacaacctgctccccatgtctcctgaggagtttgacgaggtgtctcggatagtgggctctgtagaattcgacagtatgatgaacacagtatagagcatgaatttttttcatcttctctggcgacagttttccttctcatctgtgattccctcctgctactctgttccttcacatcctgtgtttctagggaaatgaaagaaaggccagcaaattcgctgcaacctgttgatagcaagtgaatttttctctaactcagaaacatcagttactctgaagggcatcatgcatcttactgaaggtaaaattgaaaggcattctctgaagagtgggtttcacaagtgaaaaacatccagatacacccaaagtatcaggacgagaatgagggtcctttgggaaaggagaagttaagcaacatctagcaaatgttatgcataaagtcagtgcccaactgttataggttgttggataaatcagtggttatttagggaactgcttgacgtaggaacggtaaatttctgtgggagaattcttacatgttttctttgctttaagtgtaactggcagttttccattggtttacctgtgaaatagttcaaagccaagtttatatacaattatatcagtcctctttcaaaggtagccatcatggatctggtagggggaaaatgtgtattttattacatctttcacattggctatttaaagacaaagacaaattctgtttcttgagaagagaatattagctttactgtttgttatggcttaatgacactagctaatatcaatagaaggatgtacatttccaaattcacaagttgtgtttgatatccaaagctgaatacattctgctttcatcttggtcacatacaattatttttacagttctcccaagggagttaggctattcacaaccactcattcaaaagttgaaattaaccatagatgtagataaactcagaaatttaattcatgtttcttaaatgggctactttgtcctttttgttattagggtggtatttagtctattagccacaaaattgggaaaggagtagaaaaagcagtaactgacaacttgaataatacaccagagataatatgagaatcagatcatttcaaaactcatttcctatgtaactgcattgagaactgcatatgtttcgctgatatatgtgtttttcacatttgcgaatggttccattctctctcctgtactttttccagacacttttttgagtggatgatgtttcgtgaagtatactgtatttttacctttttccttccttatcactgacacaaaaagtagattaagagatgggtttgacaaggttcttcccttttacatactgctgtctatgtggctgtatcttgtttttccactactgctaccacaactatattatcatgcaaatgctgtattcttctttggtggagataaagatttcttgagttttgttttaaaattaaagctaaagtatctgtattgcattaaatataatatgcacacagtgctttccgtggcactgcatacaatctgaggcctcctctctcagtttttatatagatggcgagaacctaagtttcagttgattttacaattgaaatgactaaaaaacaaagaagacaacattaaaacaatattgtttctaa

SEQ ID NO: 376842 - DNA, 4172 bp, Homo sapiens
attggtgggggcggaagggggccgggcgccagcgctgccttttctcctgccgggtagtttcgctttcctgcgcagagtctgcggaggggctcggctgcaccggggggatcgcgcctggcagaccccagaccgagcagaggcgacccagcgcgctcgggagaggctgcaccgccgcgcccccgcctagcccttccggatcctgcgcgcagaaaagtttcatttgctgtatgccatcctcgagagctgtctaggttaacgttcgcactctgtgtatataacctcgacagtcttggcacctaacgtgctgtgcgtagctgctcctttggttgaatccccaggcccttgttggggcacaaggtggcaggatgtctcagtggtacgaacttcagcagcttgactcaaaattcctggagcaggttcaccagctttatgatgacagttttcccatggaaatcagacagtacctggcacagtggttagaaaagcaagactgggagcacgctgccaatgatgtttcatttgccaccatccgttttcatgacctcctgtcacagctggatgatcaatatagtcgcttttctttggagaataacttcttgctacagcataacataaggaaaagcaagcgtaatcttcaggataattttcaggaagacccaatccagatgtctatgatcatttacagctgtctgaaggaagaaaggaaaattctggaaaacgcccagagatttaatcaggctcagtcggggaatattcagagcacagtgatgttagacaaacagaaagagcttgacagtaaagtcagaaatgtgaaggacaaggttatgtgtatagagcatgaaatcaagagcctggaagatttacaagatgaatatgacttcaaatgcaaaaccttgcagaacagagaacacgagaccaatggtgtggcaaagagtgatcagaaacaagaacagctgttactcaagaagatgtatttaatgcttgacaataagagaaaggaagtagttcacaaaataatagagttgctgaatgtcactgaacttacccagaatgccctgattaatgatgaactagtggagtggaagcggagacagcagagcgcctgtattggggggccgcccaatgcttgcttggatcagctgcagaactggttcactatagttgcggagagtctgcagcaagttcggcagcagcttaaaaagttggaggaattggaacagaaatacacctacgaacatgaccctatcacaaaaaacaaacaagtgttatgggaccgcaccttcagtcttttccagcagctcattcagagctcgtttgtggtggaaagacagccctgcatgccaacgcaccctcagaggccgctggtcttgaagacaggggtccagttcactgtgaagttgagactgttggtgaaattgcaagagctgaattataatttgaaagtcaaagtcttatttgataaagatgtgaatgagagaaatacagtaaaaggatttaggaagttcaacattttgggcacgcacacaaaagtgatgaacatggaggagtccaccaatggcagtctggcggctgaatttcggcacctgcaattgaaagaacagaaaaatgctggcaccagaacgaatgagggtcctctcatcgttactgaagagcttcactcccttagttttgaaacccaattgtgccagcctggtttggtaattgacctcgagacgacctctctgcccgttgtggtgatctccaacgtcagccagctcccgagcggttgggcctccatcctttggtacaacatgctggtggcggaacccaggaatctgtccttcttcctgactccaccatgtgcacgatgggctcagctttcagaagtgctgagttggcagttttcttctgtcaccaaaagaggtctcaatgtggaccagctgaacatgttgggagagaagcttcttggtcctaacgccagccccgatggtctcattccgtggacgaggttttgtaaggaaaatataaatgataaaaattttcccttctggctttggattgaaagcatcctagaactcattaaaaaacacctgctccctctctggaatgatgggtgcatcatgggcttcatcagcaaggagcgagagcgtgccctgttgaaggaccagcagccggggaccttcctgctgcggttcagtgagagctcccgggaaggggccatcacattcacatgggtggagcggtcccagaacggaggcgaacctgacttccatgcggttgaaccctacacgaagaaagaactttctgctgttactttccctgacatcattcgcaattacaaagtcatggctgctgagaatattcctgagaatcccctgaagtatctgtatccaaatattgacaaagaccatgcctttggaaagtattactccaggccaaaggaagcaccagagccaatggaacttgatggccctaaaggaactggatatatcaagactgagttgatttctgtgtctgaagttcacccttctagacttcagaccacagacaacctgctccccatgtctcctgaggagtttgacgaggtgtctcggatagtgggctctgtagaattcgacagtatgatgaacacagtatagagcatgaatttttttcatcttctctggcgacagttttccttctcatctgtgattccctcctgctactctgttccttcacatcctgtgtttctagggaaatgaaagaaaggccagcaaattcgctgcaacctgttgatagcaagtgaatttttctctaactcagaaacatcagttactctgaagggcatcatgcatcttactgaaggtaaaattgaaaggcattctctgaagagtgggtttcacaagtgaaaaacatccagatacacccaaagtatcaggacgagaatgagggtcctttgggaaaggagaagttaagcaacatctagcaaatgttatgcataaagtcagtgcccaactgttataggttgttggataaatcagtggttatttagggaactgcttgacgtaggaacggtaaatttctgtgggagaattcttacatgttttctttgctttaagtgtaactggcagttttccattggtttacctgtgaaatagttcaaagccaagtttatatacaattatatcagtcctctttcaaaggtagccatcatggatctggtagggggaaaatgtgtattttattacatctttcacattggctatttaaagacaaagacaaattctgtttcttgagaagagaatattagctttactgtttgttatggcttaatgacactagctaatatcaatagaaggatgtacatttccaaattcacaagttgtgtttgatatccaaagctgaatacattctgctttcatcttggtcacatacaattatttttacagttctcccaagggagttaggctattcacaaccactcattcaaaagttgaaattaaccatagatgtagataaactcagaaatttaattcatgtttcttaaatgggctactttgtcctttttgttattagggtggtatttagtctattagccacaaaattgggaaaggagtagaaaaagcagtaactgacaacttgaataatacaccagagataatatgagaatcagatcatttcaaaactcatttcctatgtaactgcattgagaactgcatatgtttcgctgatatatgtgtttttcacatttgcgaatggttccattctctctcctgtactttttccagacacttttttgagtggatgatgtttcgtgaagtatactgtatttttacctttttccttccttatcactgacacaaaaagtagattaagagatgggtttgacaaggttcttcccttttacatactgctgtctatgtggctgtatcttgtttttccactactgctaccacaactatattatcatgcaaatgctgtattcttctttggtggagataaagatttcttgagttttgttttaaaattaaagctaaagtatctgtattgcattaaatataatatgcacacagtgctttccgtggcactgcatacaatctgaggcctcctctctcagtttttatatagatggcgagaacctaagtttcagttgattttacaattgaaatgactaaaaaacaaagaagacaacattaaaacaatattgtttctaa

SEQ ID NO: 376843 - DNA, 3670 bp, Homo sapiens
  misc_feature (43)..(43): n is a, c, g, or t
  misc_feature (93)..(93): n is a, c, g, or t
  misc_feature (120)..(120): n is a, c, g, or t
  misc_feature (129)..(129): n is a, c, g, or t
  misc_feature (132)..(132): n is a, c, g, or t
  misc_feature (140)..(140): n is a, c, g, or t
  misc_feature (143)..(143): n is a, c, g, or t
  misc_feature (156)..(156): n is a, c, g, or t
  misc_feature (160)..(160): n is a, c, g, or t
  misc_feature (164)..(164): n is a, c, g, or t
  misc_feature (168)..(169): n is a, c, g, or t
  misc_feature (171)..(171): n is a, c, g, or t
  misc_feature (176)..(177): n is a, c, g, or t
  misc_feature (179)..(180): n is a, c, g, or t
  misc_feature (187)..(187): n is a, c, g, or t
  misc_feature (195)..(195): n is a, c, g, or t
  misc_feature (204)..(205): n is a, c, g, or t
  misc_feature (208)..(209): n is a, c, g, or t
  misc_feature (214)..(214): n is a, c, g, or t
  misc_feature (224)..(226): n is a, c, g, or t
  misc_feature (242)..(242): n is a, c, g, or t
  misc_feature (247)..(247): n is a, c, g, or t
  misc_feature (250)..(250): n is a, c, g, or t
  misc_feature (253)..(253): n is a, c, g, or t
  misc_feature (262)..(263): n is a, c, g, or t
  misc_feature (265)..(265): n is a, c, g, or t
  misc_feature (267)..(267): n is a, c, g, or t
caaacagcggctggtccggccggattccgggtcgtttctgccncctgtcacagctggatgtccatatagtcgcctctccttggagaataaccnctctgcccccgcccccccccggcccancccgccccnccnccggctcnccnccggccccccccncccnctgncccnnanccccnncnnccgcccnacggcagncaggccaannccnnccccngccccccccnnncctccggccccgcccnggccnatnccnccgccccgnncngnccgccccacacgccagcgccctccccgcccagtcagaaatgtgaaggacaaggttatgtgtatagagcatgaaatcaagagcctggaagatttacaagatgaatatgacttcaaatgcaaaaccttgcagaacagagaacacgagaccaatggtgtggcaaagagtgatcagaaacaagaacagctgttactcaagaagatgtatttaatgcttgacaataagagaaaggaagtagttcacaaaataatagagttgctgaatgtcactgaacttacccagaatgccctgattaatgatgaactagtggagtggaagcggagacagcagagcgcctgtattggggggccgcccaatgcttgcttggatcagctgcagaactggttcactatagttgcggagagtctgcagcaagttcggcagcagcttaaaaagttggaggaattggaacagaaatacacctacgaacatgaccctatcacaaaaaacaaacaagtgttatgggaccgcaccttcagtcttttccagcagctcattcagagctcgtttgtggtggaaagacagccctgcatgccaacgcaccctcagaggccgctggtcttgaagacaggggtccagttcactgtgaagttgagactgttggtgaaattgcaagagctgaattataatttgaaagtcaaagtcttatttgataaagatgtgaatgagagaaatacagtaaaaggatttaggaagttcaacattttgggcacgcacacaaaagtgatgaacatggaggagtccaccaatggcagtctggcggctgaatttcggcacctgcaattgaaagaacagaaaaatgctggcaccagaacgaatgagggtcctctcatcgttactgaagagcttcactcccttagttttgaaacccaattgtgccagcctggtttggtaattgacctcgagacgacctctctgcccgttgtggtgatctccaacgtcagccagctcccgagcggttgggcctccatcctttggtacaacatgctggtggcggaacccaggaatctgtccttcttcctgactccaccatgtgcacgatgggctcagctttcagaagtgctgagttggcagttttcttctgtcaccaaaagaggtctcaatgtggaccagctgaacatgttgggagagaagcttcttggtcctaacgccagccccgatggtctcattccgtggacgaggttttgtaaggaaaatataaatgataaaaattttcccttctggctttggattgaaagcatcctagaactcattaaaaaacacctgctccctctctggaatgatgggtgcatcatgggcttcatcagcaaggagcgagagcgtgccctgttgaaggaccagcagccggggaccttcctgctgcggttcagtgagagctcccgggaaggggccatcacattcacatgggtggagcggtcccagaacggaggcgaacctgacttccatgcggttgaaccctacacgaagaaagaactttctgctgttactttccctgacatcattcgcaattacaaagtcatggctgctgagaatattcctgagaatcccctgaagtatctgtatccaaatattgacaaagaccatgcctttggaaagtattactccaggccaaaggaagcaccagagccaatggaacttgatggccctaaaggaactggatatatcaagactgagttgatttctgtgtctgaagttcacccttctagacttcagaccacagacaacctgctccccatgtctcctgaggagtttgacgaggtgtctcggatagtgggctctgtagaattcgacagtatgatgaacacagtatagagcatgaatttttttcatcttctctggcgacagttttccttctcatctgtgattccctcctgctactctgttccttcacatcctgtgtttctagggaaatgaaagaaaggccagcaaattcgctgcaacctgttgatagcaagtgaatttttctctaactcagaaacatcagttactctgaagggcatcatgcatcttactgaaggtaaaattgaaaggcattctctgaagagtgggtttcacaagtgaaaaacatccagatacacccaaagtatcaggacgagaatgagggtcctttgggaaaggagaagttaagcaacatctagcaaatgttatgcataaagtcagtgcccaactgttataggttgttggataaatcagtggttatttagggaactgcttgacgtaggaacggtaaatttctgtgggagaattcttacatgttttctttgctttaagtgtaactggcagttttccattggtttacctgtgaaatagttcaaagccaagtttatatacaattatatcagtcctctttcaaaggtagccatcatggatctggtagggggaaaatgtgtattttattacatctttcacattggctatttaaagacaaagacaaattctgtttcttgagaagagaatattagctttactgtttgttatggcttaatgacactagctaatatcaatagaaggatgtacatttccaaattcacaagttgtgtttgatatccaaagctgaatacattctgctttcatcttggtcacatacaattatttttacagttctcccaagggagttaggctattcacaaccactcattcaaaagttgaaattaaccatagatgtagataaactcagaaatttaattcatgtttcttaaatgggctactttgtcctttttgttattagggtggtatttagtctattagccacaaaattgggaaaggagtagaaaaagcagtaactgacaacttgaataatacaccagagataatatgagaatcagatcatttcaaaactcatttcctatgtaactgcattgagaactgcatatgtttcgctgatatatgtgtttttcacatttgcgaatggttccattctctctcctgtactttttccagacacttttttgagtggatgatgtttcgtgaagtatactgtatttttacctttttccttccttatcactgacacaaaaagtagattaagagatgggtttgacaaggttcttcccttttacatactgctgtctatgtggctgtatcttgtttttccactactgctaccacaactatattatcatgcaaatgctgtattcttctttggtggagataaagatttcttgagttttgttttaaaattaaagctaaagtatctgtattgcattaaatataatatgcacacagtgctttccgtggcactgcatacaatctgaggcctcctctctcagtttttatatagatggcgagaacctaagtttcagttgattttacaattgaaatgactaaaaaacaaagaagacaacattaaaacaatattgtttctaa

SEQ ID NO: 376844 - DNA, 3244 bp, Homo sapiens
  misc_feature (2)..(2): n is a, c, g, or t
gncgactctagagcgaccccctcctaccccacgcaagaagatgtatttaatgcttgacaataagagaaaggaagtagttcacaaaataatagagttgctgaatgtcactgaacttacccagaatgccctgattaatgatgaactagtggagtggaagcggagacagcagagcgcctgtattggggggccgcccaatgcttgcttggatcagctgcagaactggttcactatagttgcggagagtctgcagcaagttcggcagcagcttaaaaagttggaggaattggaacagaaatacacctacgaacatgaccctatcacaaaaaacaaacaagtgttatgggaccgcaccttcagtcttttccagcagctcattcagagctcgtttgtggtggaaagacagccctgcatgccaacgcaccctcagaggccgctggtcttgaagacaggggtccagttcactgtgaagttgagactgttggtgaaattgcaagagctgaattataatttgaaagtcaaagtcttatttgataaagatgtgaatgagagaaatacagtaaaaggatttaggaagttcaacattttgggcacgcacacaaaagtgatgaacatggaggagtccaccaatggcagtctggcggctgaatttcggcacctgcaattgaaagaacagaaaaatgctggcaccagaacgaatgagggtcctctcatcgttactgaagagcttcactcccttagttttgaaacccaattgtgccagcctggtttggtaattgacctcgagacgacctctctgcccgttgtggtgatctccaacgtcagccagctcccgagcggttgggcctccatcctttggtacaacatgctggtggcggaacccaggaatctgtccttcttcctgactccaccatgtgcacgatgggctcagctttcagaagtgctgagttggcagttttcttctgtcaccaaaagaggtctcaatgtggaccagctgaacatgttgggagagaagcttcttggtcctaacgccagccccgatggtctcattccgtggacgaggttttgtaaggaaaatataaatgataaaaattttcccttctggctttggattgaaagcatcctagaactcattaaaaaacacctgctccctctctggaatgatgggtgcatcatgggcttcatcagcaaggagcgagagcgtgccctgttgaaggaccagcagccggggaccttcctgctgcggttcagtgagagctcccgggaaggggccatcacattcacatgggtggagcggtcccagaacggaggcgaacctgacttccatgcggttgaaccctacacgaagaaagaactttctgctgttactttccctgacatcattcgcaattacaaagtcatggctgctgagaatattcctgagaatcccctgaagtatctgtatccaaatattgacaaagaccatgcctttggaaagtattactccaggccaaaggaagcaccagagccaatggaacttgatggccctaaaggaactggatatatcaagactgagttgatttctgtgtctgaagttcacccttctagacttcagaccacagacaacctgctccccatgtctcctgaggagtttgacgaggtgtctcggatagtgggctctgtagaattcgacagtatgatgaacacagtatagagcatgaatttttttcatcttctctggcgacagttttccttctcatctgtgattccctcctgctactctgttccttcacatcctgtgtttctagggaaatgaaagaaaggccagcaaattcgctgcaacctgttgatagcaagtgaatttttctctaactcagaaacatcagttactctgaagggcatcatgcatcttactgaaggtaaaattgaaaggcattctctgaagagtgggtttcacaagtgaaaaacatccagatacacccaaagtatcaggacgagaatgagggtcctttgggaaaggagaagttaagcaacatctagcaaatgttatgcataaagtcagtgcccaactgttataggttgttggataaatcagtggttatttagggaactgcttgacgtaggaacggtaaatttctgtgggagaattcttacatgttttctttgctttaagtgtaactggcagttttccattggtttacctgtgaaatagttcaaagccaagtttatatacaattatatcagtcctctttcaaaggtagccatcatggatctggtagggggaaaatgtgtattttattacatctttcacattggctatttaaagacaaagacaaattctgtttcttgagaagagaatattagctttactgtttgttatggcttaatgacactagctaatatcaatagaaggatgtacatttccaaattcacaagttgtgtttgatatccaaagctgaatacattctgctttcatcttggtcacatacaattatttttacagttctcccaagggagttaggctattcacaaccactcattcaaaagttgaaattaaccatagatgtagataaactcagaaatttaattcatgtttcttaaatgggctactttgtcctttttgttattagggtggtatttagtctattagccacaaaattgggaaaggagtagaaaaagcagtaactgacaacttgaataatacaccagagataatatgagaatcagatcatttcaaaactcatttcctatgtaactgcattgagaactgcatatgtttcgctgatatatgtgtttttcacatttgcgaatggttccattctctctcctgtactttttccagacacttttttgagtggatgatgtttcgtgaagtatactgtatttttacctttttccttccttatcactgacacaaaaagtagattaagagatgggtttgacaaggttcttcccttttacatactgctgtctatgtggctgtatcttgtttttccactactgctaccacaactatattatcatgcaaatgctgtattcttctttggtggagataaagatttcttgagttttgttttaaaattaaagctaaagtatctgtattgcattaaatataatatgcacacagtgctttccgtggcactgcatacaatctgaggcctcctctctcagtttttatatagatggcgagaacctaagtttcagttgattttacaattgaaatgactaaaaaacaaagaagacaacattaaaacaatattgtttctaa

SEQ ID NO: 376845 - DNA, 2481 bp, Homo sapiens
aaggtctttgtcatcctttagacgacctctctgcccgttgtggtgatctccaacgtcagccagctcccgagcggttgggcctccatcctttggtacaacatgctggtggcggaacccaggaatctgtccttcttcctgactccaccatgtgcacgatgggctcagctttcagaagtgctgagttggcagttttcttctgtcaccaaaagaggtctcaatgtggaccagctgaacatgttgggagagaagcttcttggtcctaacgccagccccgatggtctcattccgtggacgaggttttgtaaggaaaatataaatgataaaaattttcccttctggctttggattgaaagcatcctagaactcattaaaaaacacctgctccctctctggaatgatgggtgcatcatgggcttcatcagcaaggagcgagagcgtgccctgttgaaggaccagcagccggggaccttcctgctgcggttcagtgagagctcccgggaaggggccatcacattcacatgggtggagcggtcccagaacggaggcgaacctgacttccatgcggttgaaccctacacgaagaaagaactttctgctgttactttccctgacatcattcgcaattacaaagtcatggctgctgagaatattcctgagaatcccctgaagtatctgtatccaaatattgacaaagaccatgcctttggaaagtattactccaggccaaaggaagcaccagagccaatggaacttgatggccctaaaggaactggatatatcaagactgagttgatttctgtgtctgaagttcacccttctagacttcagaccacagacaacctgctccccatgtctcctgaggagtttgacgaggtgtctcggatagtgggctctgtagaattcgacagtatgatgaacacagtatagagcatgaatttttttcatcttctctggcgacagttttccttctcatctgtgattccctcctgctactctgttccttcacatcctgtgtttctagggaaatgaaagaaaggccagcaaattcgctgcaacctgttgatagcaagtgaatttttctctaactcagaaacatcagttactctgaagggcatcatgcatcttactgaaggtaaaattgaaaggcattctctgaagagtgggtttcacaagtgaaaaacatccagatacacccaaagtatcaggacgagaatgagggtcctttgggaaaggagaagttaagcaacatctagcaaatgttatgcataaagtcagtgcccaactgttataggttgttggataaatcagtggttatttagggaactgcttgacgtaggaacggtaaatttctgtgggagaattcttacatgttttctttgctttaagtgtaactggcagttttccattggtttacctgtgaaatagttcaaagccaagtttatatacaattatatcagtcctctttcaaaggtagccatcatggatctggtagggggaaaatgtgtattttattacatctttcacattggctatttaaagacaaagacaaattctgtttcttgagaagagaatattagctttactgtttgttatggcttaatgacactagctaatatcaatagaaggatgtacatttccaaattcacaagttgtgtttgatatccaaagctgaatacattctgctttcatcttggtcacatacaattatttttacagttctcccaagggagttaggctattcacaaccactcattcaaaagttgaaattaaccatagatgtagataaactcagaaatttaattcatgtttcttaaatgggctactttgtcctttttgttattagggtggtatttagtctattagccacaaaattgggaaaggagtagaaaaagcagtaactgacaacttgaataatacaccagagataatatgagaatcagatcatttcaaaactcatttcctatgtaactgcattgagaactgcatatgtttcgctgatatatgtgtttttcacatttgcgaatggttccattctctctcctgtactttttccagacacttttttgagtggatgatgtttcgtgaagtatactgtatttttacctttttccttccttatcactgacacaaaaagtagattaagagatgggtttgacaaggttcttcccttttacatactgctgtctatgtggctgtatcttgtttttccactactgctaccacaactatattatcatgcaaatgctgtattcttctttggtggagataaagatttcttgagttttgttttaaaattaaagctaaagtatctgtattgcattaaatataatatgcacacagtgctttccgtggcactgcatacaatctgaggcctcctctctcagtttttatatagatggcgagaacctaagtttcagttgattttacaattgaaatgactaaaaaacaaagaagacaacattaaaacaatattgtttctaa

SEQ ID NO: 376846 - DNA, 4121 bp, Homo sapiens
attggtgggggcggaagggggccgggcgccagcgctgccttttctcctgccgggtagtttcgctttcctgcgcagagtctgcggaggggctcggctgcaccggggggatcgcgcctggcagaccccagaccgagcagaggcgacccagcgcgctcgggagaggctgcaccgccgcgcccccgcctagcccttccggatcctgcgcgcagaaaagtttcatttgctgtatgccatcctcgagagctgtctaggttaacgttcgcactctgtgtatataacctcgacagtcttggcacctaacgtgctgtgcgtagctgctcctttggttgaatccccaggcccttgttggggcacaaggtggcaggatgtctcagtggtacgaacttcagcagcttgactcaaaattcctggagcaggttcaccagctttatgatgacagttttcccatggaaatcagacagtacctggcacagtggttagaaaagcaagactgggagcacgctgccaatgatgtttcatttgccaccatccgttttcatgacctcctgtcacagctggatgatcaatatagtcgcttttctttggagaataacttcttgctacagcataacataaggaaaagcaagcgtaatcttcaggataattttcaggaagacccaatccagatgtctatgatcatttacagctgtctgaaggaagaaaggaaaattctggaaaacgcccagagatttaatcaggctcagtcggggaatattcagagcacagtgatgttagacaaacagaaagagcttgacagtaaagtcagaaatgtgaaggacaaggttatgtgtatagagcatgaaatcaagagcctggaagatttacaagatgaatatgacttcaaatgcaaaaccttgcagaacagagaacacgagaccaatggtgtggcaaagagtgatcagaaacaagaacagctgttactcaagaagatgtatttaatgcttgacaataagagaaaggaagtagttcacaaaataatagagttgctgaatgtcactgaacttacccagaatgccctgattaatgatgaactagtggagtggaagcggagacagcagagcgcctgtattggggggccgcccaatgcttgcttggatcagctgcagaactggttcactatagttgcggagagtctgcagcaagttcggcagcagcttaaaaagttggaggaattggaacagaaatacacctacgaacatgaccctatcacaaaaaacaaacaagtgttatgggaccgcaccttcagtcttttccagcagctcattcagagctcgtttgtggtggaaagacagccctgcatgccaacgcaccctcagaggccgctggtcttgaagacaggggtccagttcactgtgaagttgagactgttggtgaaattgcaagagctgaattataatttgaaagtcaaagtcttatttgataaagatgtgaatgagagaaatacagtaaaaggatttaggaagttcaacattttgggcacgcacacaaaagtgatgaacatggaggagtccaccaatggcagtctggcggctgaatttcggcacctgcaattgaaagaacagaaaaatgctggcaccagaacgaatgagggtcctctcatcgttactgaagagcttcactcccttagttttgaaacccaattgtgccagcctggtttggtaattgacctcgagacgacctctctgcccgttgtggtgatctccaacgtcagccagctcccgagcggttgggcctccatcctttggtacaacatgctggtggcggaacccaggaatctgtccttcttcctgactccaccatgtgcacgatgggctcagctttcagaagtgctgagttggcagttttcttctgtcaccaaaagaggtctcaatgtggaccagctgaacatgttgggagagaagcttcttggtcctaacgccagccccgatggtctcattccgtggacgaggttttgtaaggaaaatataaatgataaaaattttcccttctggctttggattgaaagcatcctagaactcattaaaaaacacctgctccctctctggaatgatgggtgcatcatgggcttcatcagcaaggagcgagagcgtgccctgttgaaggaccagcagccggggaccttcctgctgcggttcagtgagagctcccgggaaggggccatcacattcacatgggtggagcggtcccagaacggaggcgaacctgacttccatgcggttgaaccctacacgaagaaagaactttctgctgttactttccctgacatcattcgcaattacaaagtcatggctgctgagaatattcctgagaatcccctgaagtatctgtatccaaatattgacaaagaccatgcctttggaaagtattactccaggccaaaggaagcaccagagccaatggaacttgatggccctaaaggaactggatatatcaagactgagttgatttctgtgtctgaagttcacccttctagacttcagaccacagacaacctgctccccatgtctcctgaggagtttgacgaggtgtctcggatagtgggctctgtagaattcgacagtatgatgaacacagtatagagcatgaatttttttcatcttctctggcgacagttttccttctcatctgtgattccctcctgctactctgttccttcacatcctgtgtttctagggaaatgaaagaaaggccagcaaattcgctgcaacctgttgatagcaagtgaatttttctctaactcagaaacatcagttactctgaagggcatcatgcatcttactgaaggtaaaattgaaaggcattctctgaagagtgggtttcacaagtgaaaaaggagaagttaagcaacatctagcaaatgttatgcataaagtcagtgcccaactgttataggttgttggataaatcagtggttatttagggaactgcttgacgtaggaacggtaaatttctgtgggagaattcttacatgttttctttgctttaagtgtaactggcagttttccattggtttacctgtgaaatagttcaaagccaagtttatatacaattatatcagtcctctttcaaaggtagccatcatggatctggtagggggaaaatgtgtattttattacatctttcacattggctatttaaagacaaagacaaattctgtttcttgagaagagaatattagctttactgtttgttatggcttaatgacactagctaatatcaatagaaggatgtacatttccaaattcacaagttgtgtttgatatccaaagctgaatacattctgctttcatcttggtcacatacaattatttttacagttctcccaagggagttaggctattcacaaccactcattcaaaagttgaaattaaccatagatgtagataaactcagaaatttaattcatgtttcttaaatgggctactttgtcctttttgttattagggtggtatttagtctattagccacaaaattgggaaaggagtagaaaaagcagtaactgacaacttgaataatacaccagagataatatgagaatcagatcatttcaaaactcatttcctatgtaactgcattgagaactgcatatgtttcgctgatatatgtgtttttcacatttgcgaatggttccattctctctcctgtactttttccagacacttttttgagtggatgatgtttcgtgaagtatactgtatttttacctttttccttccttatcactgacacaaaaagtagattaagagatgggtttgacaaggttcttcccttttacatactgctgtctatgtggctgtatcttgtttttccactactgctaccacaactatattatcatgcaaatgctgtattcttctttggtggagataaagatttcttgagttttgttttaaaattaaagctaaagtatctgtattgcattaaatataatatgcacacagtgctttccgtggcactgcatacaatctgaggcctcctctctcagtttttatatagatggcgagaacctaagtttcagttgattttacaattgaaatgactaaaaaacaaagaagacaacattaaaacaatattgtttctaa

SEQ ID NO: 376847 - DNA, 3360 bp, Homo sapiens
attggtgggggcggaagggggccgggcgccagcgctgccttttctcctgccgggtagtttcgctttcctgcgcagagtctgcggaggggctcggctgcaccggggggatcgcgcctggcagaccccagaccgagcagaggcgacccagcgcgctcgggagaggctgcaccgccgcgcccccgcctagcccttccggatcctgcgcgcagaaaagtttcatttgctgtatgccatcctcgagagctgtctaggttaacgttcgcactctgtgtatataacctcgacagtcttggcacctaacgtgctgtgcgtagctgctcctttggttgaatccccaggcccttgttggggcacaaggtggcaggatgtctcagtggtacgaacttcagcagcttgactcaaaattcctggagcaggttcaccagctttatgatgacagttttcccatggaaatcagacagtacctggcacagtggttagaaaagcaagactgggagcacgctgccaatgatgtttcatttgccaccatccgttttcatgacctcctgtcacagctggatgatcaatatagtcgcttttctttggagaataacttcttgctacagcataacataaggaaaagcaagcgtaatcttcaggataattttcaggaagacccaatccagatgtctatgatcatttacagctgtctgaaggaagaaaggaaaattctggaaaacgcccagagatttaatcaggctcagtcggggaatattcagagcacagtgatgttagacaaacagaaagagcttgacagtaaagtcagaaatgtgaaggacaaggttatgtgtatagagcatgaaatcaagagcctggaagatttacaagatgaatatgacttcaaatgcaaaaccttgcagaacagagaacacgagaccaatggtgtggcaaagagtgatcagaaacaagaacagctgttactcaagaagatgtatttaatgcttgacaataagagaaaggaagtagttcacaaaataatagagttgctgaatgtcactgaacttacccagaatgccctgattaatgatgaactagtggagtggaagcggagacagcagagcgcctgtattggggggccgcccaatgcttgcttggatcagctgcagaactggttcactatagttgcggagagtctgcagcaagttcggcagcagcttaaaaagttggaggaattggaacagaaatacacctacgaacatgaccctatcacaaaaaacaaacaagtgttatgggaccgcaccttcagtcttttccagcagctcattcagagctcgtttgtggtggaaagacagccctgcatgccaacgcaccctcagaggccgctggtcttgaagacaggggtccagttcactgtgaagttgagactgttggtgaaattgcaagagctgaattataatttgaaagtcaaagtcttatttgataaagatgtgaatgagagaaatacagtaaaaggatttaggaagttcaacattttgggcacgcacacaaaagtgatgaacatggaggagtccaccaatggcagtctggcggctgaatttcggcacctgcaattgaaagaacagaaaaatgctggcaccagaacgaatgagggtcctctcatcgttactgaagagcttcactcccttagttttgaaacccaattgtgccagcctggtttggtaattgacctcgagacgacctctctgcccgttgtggtgatctccaacgtcagccagctcccgagcggttgggcctccatcctttggtacaacatgctggtggcggaacccaggaatctgtccttcttcctgactccaccatgtgcacgatgggctcagctttcagaagtgctgagttggcagttttcttctgtcaccaaaagaggtctcaatgtggaccagctgaacatgttgggagagaagcttcttggtcctaacgccagccccgatggtctcattccgtggacgaggttttgtaaggaaaatataaatgataaaaattttcccttctggctttggattgaaagcatcctagaactcattaaaaaacacctgctccctctctggaatgatgggtgcatcatgggcttcatcagcaaggagcgagagcgtgccctgttgaaggaccagcagccggggaccttcctgctgcggttcagtgagagctcccgggaaggggccatcacattcacatgggtggagcggtcccagaacggaggcgaacctgacttccatgcggttgaaccctacacgaagaaagaactttctgctgttactttccctgacatcattcgcaattacaaagtcatggctgctgagaatattcctgagaatcccctgaagtatctgtatccaaatattgacaaagaccatgcctttggaaagtattactccaggccaaaggaagcaccagagccaatggaacttgatggccctaaaggaactggatatatcaagactgagttgatttctgtgtctgaagttcacccttctagacttcagaccacagacaacctgctccccatgtctcctgaggagtttgacgaggtgtctcggatagtgggctctgtagaattcgacagtatgatgaacacagtatagagcatgaatttttttcatcttctctggcgacagttttccttctcatctgtgattccctcctgctactctgttccttcacatcctgtgtttctagggaaatgaaagaaaggccagcaaattcgctgcaacctgttgatagcaagtgaatttttctctaactcagaaacatcagttactctgaagggcatcatgcatcttactgaaggtaaaattgaaaggcattctctgaagagtgggtttcacaagtgaaaaacatccagatacacccaaagtatcaggacgagaatgagggtcctttgggaaaggagaagttaagcaacatctagcaaatgttatgcataaagtcagtgcccaactgttataggttgttggataaatcagtggttatttagggaactgcttgacgtaggaacggtaaatttctgtgggagaattcttacatgttttctttgctttaagtgtaactggcagttttccattggtttacctgtgaaatagttcaaagccaagtttatatacaattatatcagtcctctttcaaaggtagccatcatggatctggtagggtggagcacccatatgggtgctccatcccccatgggtgctccatcccccacactgccttgcacttagctttcaataaatgtttgcagaactgaaaagcattaaaaatacagcccggaaaatgttcatgccatttttttccttcctattggactgtagcacgttgccagaatgctcc

SEQ ID NO: 376848 - DNA, 3040 bp, Homo sapiens
attggtgggggcggaagggggccgggcgccagcgctgccttttctcctgccgggtagtttcgctttcctgcgcagagtctgcggaggggctcggctgcaccggggggatcgcgcctggcagaccccagaccgagcagaggcgacccagcgcgctcgggagaggctgcaccgccgcgcccccgcctagcccttccggatcctgcgcgcagaaaagtttcatttgctgtatgccatcctcgagagctgtctaggttaacgttcgcactctgtgtatataacctcgacagtcttggcacctaacgtgctgtgcgtagctgctcctttggttgaatccccaggcccttgttggggcacaaggtggcaggatgtctcagtggtacgaacttcagcagcttgactcaaaattcctggagcaggttcaccagctttatgatgacagttttcccatggaaatcagacagtacctggcacagtggttagaaaagcaagactgggagcacgctgccaatgatgtttcatttgccaccatccgttttcatgacctcctgtcacagctggatgatcaatatagtcgcttttctttggagaataacttcttgctacagcataacataaggaaaagcaagcgtaatcttcaggataattttcaggaagacccaatccagatgtctatgatcatttacagctgtctgaaggaagaaaggaaaattctggaaaacgcccagagatttaatcaggctcagtcggggaatattcagagcacagtgatgttagacaaacagaaagagcttgacagtaaagtcagaaatgtgaaggacaaggttatgtgtatagagcatgaaatcaagagcctggaagatttacaagatgaatatgacttcaaatgcaaaaccttgcagaacagagaacacgagaccaatggtgtggcaaagagtgatcagaaacaagaacagctgttactcaagaagatgtatttaatgcttgacaataagagaaaggaagtagttcacaaaataatagagttgctgaatgtcactgaacttacccagaatgccctgattaatgatgaactagtggagtggaagcggagacagcagagcgcctgtattggggggccgcccaatgcttgcttggatcagctgcagaactggttcactatagttgcggagagtctgcagcaagttcggcagcagcttaaaaagttggaggaattggaacagaaatacacctacgaacatgaccctatcacaaaaaacaaacaagtgttatgggaccgcaccttcagtcttttccagcagctcattcagagctcgtttgtggtggaaagacagccctgcatgccaacgcaccctcagaggccgctggtcttgaagacaggggtccagttcactgtgaagttgagactgttggtgaaattgcaagagctgaattataatttgaaagtcaaagtcttatttgataaagatgtgaatgagagaaatacagtaaaaggatttaggaagttcaacattttgggcacgcacacaaaagtgatgaacatggaggagtccaccaatggcagtctggcggctgaatttcggcacctgcaattgaaagaacagaaaaatgctggcaccagaacgaatgagggtcctctcatcgttactgaagagcttcactcccttagttttgaaacccaattgtgccagcctggtttggtaattgacctcgagacgacctctctgcccgttgtggtgatctccaacgtcagccagctcccgagcggttgggcctccatcctttggtacaacatgctggtggcggaacccaggaatctgtccttcttcctgactccaccatgtgcacgatgggctcagctttcagaagtgctgagttggcagttttcttctgtcaccaaaagaggtctcaatgtggaccagctgaacatgttgggagagaagcttcttggtcctaacgccagccccgatggtctcattccgtggacgaggttttgtaaggaaaatataaatgataaaaattttcccttctggctttggattgaaagcatcctagaactcattaaaaaacacctgctccctctctggaatgatgggtgcatcatgggcttcatcagcaaggagcgagagcgtgccctgttgaaggaccagcagccggggaccttcctgctgcggttcagtgagagctcccgggaaggggccatcacattcacatgggtggagcggtcccagaacggaggcgaacctgacttccatgcggttgaaccctacacgaagaaagaactttctgctgttactttccctgacatcattcgcaattacaaagtcatggctgctgagaatattcctgagaatcccctgaagtatctgtatccaaatattgacaaagaccatgcctttggaaagtattactccaggccaaaggaagcaccagagccaatggaacttgatggccctaaaggaactggatatatcaagactgagttgatttctgtgtctgaagttcacccttctagacttcagaccacagacaacctgctccccatgtctcctgaggagtttgacgaggtgtctcggatagtgggctctgtagaattcgacagtatgatgaacacagtatagagcatgaatttttttcatcttctctggcgacagttttccttctcatctgtgattccctcctgctactctgttccttcacatcctgtgtttctagggaaatgaaagaaaggccagcaaattcgctgcaacctgttgatagcaagtgaatttttctctaactcagaaacatcagttactctgaagggcatcatgcatcttactgaaggtaaaattgaaaggcattctctgaagagtgggtttcacaagtgaaaaacatccagatacacccaaagtatcaggacgagaatgagggtcctttgggagggcagttttcacttttcacgttggttataggccccgtctttttgtgtgaaaaaacgtattaggagagtgtaaagagaatggggaaaaatatttgttcggggaagagacgtgagcaattt

SEQ ID NO: 376849 - DNA, 2489 bp, Homo sapiens
attggtgggggcggaagggggccgggcgccagcgctgccttttctcctgccgggtagtttcgctttcctgcgcagagtctgcggaggggctcggctgcaccggggggatcgcgcctggcagaccccagaccgagcagaggcgacccagcgcgctcgggagaggctgcaccgccgcgcccccgcctagcccttccggatcctgcgcgcagaaaagtttcatttgctgtatgccatcctcgagagctgtctaggttaacgttcgcactctgtgtatataacctcgacagtcttggcacctaacgtgctgtgcgtagctgctcctttggttgaatccccaggcccttgttggggcacaaggtggcaggatgtctcagtggtacgaacttcagcagcttgactcaaaattcctggagcaggttcaccagctttatgatgacagttttcccatggaaatcagacagtacctggcacagtggttagaaaagcaagactgggagcacgctgccaatgatgtttcatttgccaccatccgttttcatgacctcctgtcacagctggatgatcaatatagtcgcttttctttggagaataacttcttgctacagcataacataaggaaaagcaagcgtaatcttcaggataattttcaggaagacccaatccagatgtctatgatcatttacagctgtctgaaggaagaaaggaaaattctggaaaacgcccagagatttaatcaggctcagtcggggaatattcagagcacagtgatgttagacaaacagaaagagcttgacagtaaagtcagaaatgtgaaggacaaggttatgtgtatagagcatgaaatcaagagcctggaagatttacaagatgaatatgacttcaaatgcaaaaccttgcagaacagagaacacgagaccaatggtgtggcaaagagtgatcagaaacaagaacagctgttactcaagaagatgtatttaatgcttgacaataagagaaaggaagtagttcacaaaataatagagttgctgaatgtcactgaacttacccagaatgccctgattaatgatgaactagtggagtggaagcggagacagcagagcgcctgtattggggggccgcccaatgcttgcttggatcagctgcagaactggttcactatagttgcggagagtctgcagcaagttcggcagcagcttaaaaagttggaggaattggaacagaaatacacctacgaacatgaccctatcacaaaaaacaaacaagtgttatgggaccgcaccttcagtcttttccagcagctcattcagagctcgtttgtggtggaaagacagccctgcatgccaacgcaccctcagaggccgctggtcttgaagacaggggtccagttcactgtgaagttgagactgttggtgaaattgcaagagctgaattataatttgaaagtcaaagtcttatttgataaagatgtgaatgagagaaatacagtaaaaggatttaggaagttcaacattttgggcacgcacacaaaagtgatgaacatggaggagtccaccaatggcagtctggcggctgaatttcggcacctgcaattgaaagaacagaaaaatgctggcaccagaacgaatgagggtcctctcatcgttactgaagagcttcactcccttagttttgaaacccaattgtgccagcctggtttggtaattgacctcgagacgacctctctgcccgttgtggtgatctccaacgtcagccagctcccgagcggttgggcctccatcctttggtacaacatgctggtggcggaacccaggaatctgtccttcttcctgactccaccatgtgcacgatgggctcagctttcagaagtgctgagttggcagttttcttctgtcaccaaaagaggtctcaatgtggaccagctgaacatgttgggagagaagcttcttggtcctaacgccagccccgatggtctcattccgtggacgaggttttgtaaggaaaatataaatgataaaaattttcccttctggctttggattgaaagcatcctagaactcattaaaaaacacctgctccctctctggaatgatgggtgcatcatgggcttcatcagcaaggagcgagagcgtgccctgttgaaggaccagcagccggggaccttcctgctgcggttcagtgagagctcccgggaaggggccatcacattcacatgggtggagcggtcccagaacggaggcggtgagtgggagtttgagcacatagtcccaccattccatgtgtgtgaagtccctcttcatcgccgccagtcagctcatacagatagtgcgtttgggacatgaaattgcagatcttatacttaccccaaatgagcccccgataggatttaataaaccaccacaaatgtttgtggttgtggttcactctctggaacatattgtggaaatgatggttttggatgtgagtcaatgtaatctgcaacccgttcttgg

SEQ ID NO: 376850 - DNA, 1359 bp, Homo sapiens
attggtgggggcggaagggggccgggcgccagcgctgccttttctcctgccgggtagtttcgctttcctgcgcagagtctgcggaggggctcggctgcaccggggggatcgcgcctggcagaccccagaccgagcagaggcgacccagcgcgctcgggagaggctgcaccgccgcgcccccgcctagcccttccggatcctgcgcgcagaaaagtttcatttgctgtatgccatcctcgagagctgtctaggttaacgttcgcactctgtgtatataacctcgacagtcttggcacctaacgtgctgtgcgtagctgctcctttggttgaatccccaggcccttgttggggcacaaggtggcaggatgtctcagtggtacgaacttcagcagcttgactcaaaattcctggagcaggttcaccagctttatgatgacagttttcccatggaaatcagacagtacctggcacagtggttagaaaagcaagactgggagcacgctgccaatgatgtttcatttgccaccatccgttttcatgacctcctgtcacagctggatgatcaatatagtcgcttttctttggagaataacttcttgctacagcataacataaggaaaagcaagcgtaatcttcaggataattttcaggaagacccaatccagatgtctatgatcatttacagctgtctgaaggaagaaaggaaaattctggaaaacgcccagagatttaatcaggctcagtcggggaatattcagagcacagtgatgttagacaaacagaaagagcttgacagtaaagtcagaaatgtgaaggacaaggttatgtgtatagagcatgaaatcaagagcctggaagatttacaagatgaatatgacttcaaatgcaaaaccttgcagaacagagaacacgagaccaatggtgtggcaaagagtgatcagaaacaagaacagctgttactcaagaagattgtatttttacctttttccttccttatcactgacacaaaaagtagattaagagatgggtttgacaaggttcttcccttttacatactgctgtctatgtggctgtatcttgtttttccactactgctaccacaactatattatcatgcaaatgctgtattcttctttggtggagataaagatttcttgagttttgttttaaaattaaagctaaagtatctgtattgcattaaatataatatgcacacagtgctttccgtggcactgcatacaatctgaggcctcctctctcagtttttatatagatggcgagaacctaagtttcagttgattttacaattgaaatgactaaaaaacaaagaagacaacattaaaacaatattgtttctaa

SEQ ID NO: 376851 - DNA, 785 bp, Homo sapiens
ccctgttgaaggaccagcagccggggaccttcctgctgcggttcagtgagagctcccgggaaggggccatcacattcacatgggtggagcggtcccagaacggaggcggtgagtgggagtttgagcacatagtcccaccattccatgtgtgtgaagtccctcttcatcgccgccagtcagctcatacagatagtgcgtttgggacatgaaattgcagatcttatacttaccccaaatgagcccccgataggatttaataaaccaccacaaatgtttgtggttgtggttcactctctggaacatattgtggaaatgatggttttgaaaagacaatgccaattctttcctttgcatcaggtttgttatctgcagatcaaggatgtgagtcaatgtaatctgcaacccgttcttggaaggaatcacatttcccacaggagtaagcatccacattctcttagggtcatcccagagtagagtgtgcagatgagacaggcttcgggagaagacttcatacacatcatcagccagggagttgatgcaggacctgttgggacgagtggcagcctctaccctgccttcaaacagagcagctgcaaatttatctttatcatatatggggtttctatttaatcaaatgagtccatggctaaaagactccagaaaccttggtgttatgaagcaggtttctgagggtgaagctcaacagcgtaaatgaaaaaatcataaagaccaactgattacttttcactgttgtttagagtttggtctgtttgaagggcaggagg

SEQ ID NO: 376852 - DNA, 285 bp, Homo sapiens
tggtctgtctcttcccaccttccatctgcacacacccccaaggtaagggtacagcccggctggcggcctccttgggaacgtgtaggccacggctctgccaccactaggtactgctgacctgggctggcctcccccagccctcccgtggcggagccggcagcgatgctacaggcctaagttattgtttgcataaaaagaatcatgttccctgtgtacatttaagaaaaaaacaaaaaaacggaaatgtcagaattgtatggaaataaaacttgtttgaaaatttgg

SEQ ID NO: 376853 - DNA, 3464 bp, Homo sapiens
gttcgagcccttggtggggacagctggggagatggcagtgcaggctggaacctgggctgccccagaacacagtccattacgatagaaacactaattgagcatgtgcgtggggtgggggtgtgtgtgcacatgtgagtgtgagtgtgtgtgggcgcttggtggggggttggggacagctggaaggtgccaggtgcacttggggttggggttggtgtgttgggtgttgaagtggaatcgtttcatcccagccatggaggccaccagcaggagtgttcatggggatgtgggcgaggtggggcactttgaaggaatggcggtctgctggtgccctcgaaggggcatccttcctggtcttcgctgacccagaggcgctgtgcctgcatatcatccaccaccaccctagcccagccttcccactgccccaggaaaagctcttctcctggccacctctgccccccagcacctcaaacttgcatggctgggctgtggcctctgcggccaggaagcctgacactaggcaccccccaggcgagagctagtggggtgcagagggccccatgccagacagcccttggggctcgttgcactttaagaaataggatctgtggtgtattccagggggcctgatggacacctttcccgggcgtctgcagctgccctgcccgtgcccgcctgcagtggttggagacgggagtggcccttcggctcccgagctccctctggggacggctggctcactgtctccagttctcaatggccaacgaaggtgcttggaaacacctaaccttgcaagttttaccgccttttgaggaacacaaatcggagaacaaacccagggttcaggcgtgttttctgtgaatgttggatgatgaatttttgtctcttctggtggagctgtgcctggccctgtaggcccagggttggctggaaggtgacatctgtgtttcgttttagctgaggttggcagaaacgttcccaaactcccccagccctgggaccccagcagatgaggaaacggccccatttactgaccccgcccccttttcgaggttatgctcacctggtcagctcctcacgtaattgggggtggagggaaagcatggtggtgccctgggccgtccctgtgtgaacgcaggcaaaagcagcccagtccccctcactgcttgagctaacactgccacctcttttgtgtgagcacaaaagccacgtcccaagccacctggcccgattccacagatgtatgtgcggccagtgacttccccaggagtgtggagggggtggtgaggaggagcacctgggctctctacccctctcctcacagaagtacctgaaactaggtctggggcactcccaatgcagcgccttgtcagccaaggtgggcaggcagggactgtggcagcttatgtccaaagggagcccccatgcacaggaagccacagggttcctcttgtttcccccgctaacttcagcctctcatctgctgctccgggctgagggactagaggacatctcggtcgtttgaggggcatggccagtcgtggcaggccggccttcagcgtccggtcagggaagcgtgcagcccaaatgggcacttgcatgggagccacagaggagcgtccctggggattgttgggaccatgctgcccccactcccgcttttgttggggctctaagttctggaaggtgtgtgcacagagggtgctcatgggactcgcatgcagctctcagcactgggtgggagggcgttggcttgtccagaatggggacgtggggcagccacccctgcccagcgagagcgcagacaccgtgtgaggggacagcagcccttggtgcaaagccagagactgatcctggctctgacggctgaagagggaagacccaaggctgggtggcgtggctcgtgaatccacttagaattcttggcttgtgtcgcatactgggtgtcacggcacacatttactctgcattgtccccgtctttcccatcgcctagcgtttggggaggaacagggagagagcttcggggcgtctgtctccgtgctctcctgcctccaccgccttggttttgcttcctgctggaggcagggcacctgctgcgacccagattcttctgcaggatgtgtctgtctttgtcacggtggacagagggtgacatcataggagcagctcgctggccagaaggggatgggggcatccctgtgcctcactcagctcctgctgctcttagggaaaggaggcctgggtcaagccagcatccccttggtaaagacccccgcaggccaccaggcattctggacacgcacacacacacacacacacacacacacacacacaaaacttcacagcaggccagctgcagtgacttgtcatcaagagtcacctcagctgcgcccccctcccatcctttcctatgagaagccactgctttgggggcgccggctagaaaaagtagggtgcggtggccaggagggcccctgccgcgcggggggctgggtctggttgagtcgctgctttcccgagggcagcgcagggatccggggaagctgcggcagggagcgggcgccggcttcgtggctctgaggtgtaacgggggtgggctccctccctcggaggacatcgtctgtgtccaggtcagaaagtggcccaggaagggggcagtttctgtcgcgggtccggtgggggcgcggccgcggtgcggtcggtgcagcgtggccaatgcgcggcgcgcgcgggggacagagcaggaggcggtctgtcacctcggccactgctgacctgggctggcctcccccagccctcccgtggcggagccggcagcgatgctacaggcctaagttattgtttgcataaaaagaatcatgttccctgtgtacatttaagaaaaaaacaaaaaaacggaaatgtcagaattgtatggaaataaaacttgtttgaaaatttggaatagtgctgctgccagcttatttttctggtacttgtattttcacatgttaaatgatctttatatatgttgaattaacaaatattttgagtttctgagaaaaaacaaaacatattaatggtattgaaatgtgttagtagtctggctgtgtgcccaaaattctgtttcgcagcaaaagtgaagacctgtatgtaaagaaagtataacaattatttctttgtattttaggggctttaaccggaacatcgtctagctggtgttaggaatgtttgcttaatttccagacttttttttaaaaacacatcgtgggttttttgaggctccaacctgattagtgcatggtcagccctcaatgaaggctgaggcatctctgactgaggtgtttttgtttggttttgttttttaaaatcatgtatttgctacaaagtattgtacttgtctcaatgggaatggtgtaaaaaacaaaaggccttatgtgatctgtatcatagttaataaatgaatcttgtaaaaaaccaaaaaaa

SEQ ID NO: 376854 - DNA, 808 bp, Homo sapiens
tggtctgtctcttcccaccttccatctgcacacacccccaaggtaagggtacagcccggctggcggcctccttgggaacgtgtaggccacggctctgccaccactaggtactgctgacctgggctggcctcccccagccctcccgtggcggagccggcagcgatgctacaggcctaagttattgtttgcataaaaagaatcatgttccctgtgtacatttaagaaaaaaacaaaaaaacggaaatgtcagaattgtatggaaataaaacttgtttgaaaatttggaatagtgctgctgccagcttatttttctggtacttgtattttcacatgttaaatgatctttatatatgttgaattaacaaatattttgagtttctgagaaaaaacaaaacatattaatggtattgaaatgtgttagtagtctggctgtgtgcccaaaattctgtttcgcagcaaaagtgaagacctgtatgtaaagaaagtataacaattatttctttgtattttaggggctttaaccggaacatcgtctagctggtgttaggaatgtttgcttaatttccagacttttttttaaaaacacatcgtgggttttttgaggctccaacctgattagtgcatggtcagccctcaatgaaggctgaggcatctctgactgaggtgtttttgtttggttttgttttttaaaatcatgtatttgctacaaagtattgtacttgtctcaatgggaatggtgtaaaaaacaaaaggccttatgtgatctgtatcatagttaataaatgaatcttgtaaaaaaccaaaaaaa

SEQ ID NO: 376855 - DNA, 2941 bp, Homo sapiens
gttcgagcccttggtggggacagctggggagatggcagtgcaggctggaacctgggctgccccagaacacagtccattacgatagaaacactaattgagcatgtgcgtggggtgggggtgtgtgtgcacatgtgagtgtgagtgtgtgtgggcgcttggtggggggttggggacagctggaaggtgccaggtgcacttggggttggggttggtgtgttgggtgttgaagtggaatcgtttcatcccagccatggaggccaccagcaggagtgttcatggggatgtgggcgaggtggggcactttgaaggaatggcggtctgctggtgccctcgaaggggcatccttcctggtcttcgctgacccagaggcgctgtgcctgcatatcatccaccaccaccctagcccagccttcccactgccccaggaaaagctcttctcctggccacctctgccccccagcacctcaaacttgcatggctgggctgtggcctctgcggccaggaagcctgacactaggcaccccccaggcgagagctagtggggtgcagagggccccatgccagacagcccttggggctcgttgcactttaagaaataggatctgtggtgtattccagggggcctgatggacacctttcccgggcgtctgcagctgccctgcccgtgcccgcctgcagtggttggagacgggagtggcccttcggctcccgagctccctctggggacggctggctcactgtctccagttctcaatggccaacgaaggtgcttggaaacacctaaccttgcaagttttaccgccttttgaggaacacaaatcggagaacaaacccagggttcaggcgtgttttctgtgaatgttggatgatgaatttttgtctcttctggtggagctgtgcctggccctgtaggcccagggttggctggaaggtgacatctgtgtttcgttttagctgaggttggcagaaacgttcccaaactcccccagccctgggaccccagcagatgaggaaacggccccatttactgaccccgcccccttttcgaggttatgctcacctggtcagctcctcacgtaattgggggtggagggaaagcatggtggtgccctgggccgtccctgtgtgaacgcaggcaaaagcagcccagtccccctcactgcttgagctaacactgccacctcttttgtgtgagcacaaaagccacgtcccaagccacctggcccgattccacagatgtatgtgcggccagtgacttccccaggagtgtggagggggtggtgaggaggagcacctgggctctctacccctctcctcacagaagtacctgaaactaggtctggggcactcccaatgcagcgccttgtcagccaaggtgggcaggcagggactgtggcagcttatgtccaaagggagcccccatgcacaggaagccacagggttcctcttgtttcccccgctaacttcagcctctcatctgctgctccgggctgagggactagaggacatctcggtcgtttgaggggcatggccagtcgtggcaggccggccttcagcgtccggtcagggaagcgtgcagcccaaatgggcacttgcatgggagccacagaggagcgtccctggggattgttgggaccatgctgcccccactcccgcttttgttggggctctaagttctggaaggtgtgtgcacagagggtgctcatgggactcgcatgcagctctcagcactgggtgggagggcgttggcttgtccagaatggggacgtggggcagccacccctgcccagcgagagcgcagacaccgtgtgaggggacagcagcccttggtgcaaagccagagactgatcctggctctgacggctgaagagggaagacccaaggctgggtggcgtggctcgtgaatccacttagaattcttggcttgtgtcgcatactgggtgtcacggcacacatttactctgcattgtccccgtctttcccatcgcctagcgtttggggaggaacagggagagagcttcggggcgtctgtctccgtgctctcctgcctccaccgccttggttttgcttcctgctggaggcagggcacctgctgcgacccagattcttctgcaggatgtgtctgtctttgtcacggtggacagagggtgacatcataggagcagctcgctggccagaaggggatgggggcatccctgtgcctcactcagctcctgctgctcttagggaaaggaggcctgggtcaagccagcatccccttggtaaagacccccgcaggccaccaggcattctggacacgcacacacacacacacacacacacacacacacacaaaacttcacagcaggccagctgcagtgacttgtcatcaagagtcacctcagctgcgcccccctcccatcctttcctatgagaagccactgctttgggggcgccggctagaaaaagtagggtgcggtggccaggagggcccctgccgcgcggggggctgggtctggttgagtcgctgctttcccgagggcagcgcagggatccggggaagctgcggcagggagcgggcgccggcttcgtggctctgaggtgtaacgggggtgggctccctccctcggaggacatcgtctgtgtccaggtcagaaagtggcccaggaagggggcagtttctgtcgcgggtccggtgggggcgcggccgcggtgcggtcggtgcagcgtggccaatgcgcggcgcgcgcgggggacagagcaggaggcggtctgtcacctcggccactgctgacctgggctggcctcccccagccctcccgtggcggagccggcagcgatgctacaggcctaagttattgtttgcataaaaagaatcatgttccctgtgtacatttaagaaaaaaacaaaaaaacggaaatgtcagaattgtatggaaataaaacttgtttgaaaatttgg

SEQ ID NO: 376856 - DNA, 1057 bp, Homo sapiens
ctgcagatggagagaaagaaagacatctcagaagtctatggggacagcctacagctccccacagggttgctccaggtaacgctggaaggtgaaagctgagcaggctccagtccccatcctaggtatggaacagatcaaaccaccacaggcctatgtctgaccttgttcccaccccatgctcctctcccacctgtgtccttctctttgcaggagaagggacagacagaggttctcagtgatgagctcaggctctggaagggcacttgaagtttggctttagttcttcctttcccatataggggagctcagcttccagggtcctgggcctgctgtgacccaggttgttactcctgatataactgcttcctgggctctcatgatctcagctgagcctggctttctgctgatgatatttgtttgttgcttgccaggcaccagggtagataaaaagatcaccaagacccgcacctttttccttaggagggtctgagtcttcaggagacggagacatatggaatgtgtcggggttggaaggagcaggactggagggtcggggtgaggggggcagagggaaacagggccgtcagggttgcctgaggccagatcatacagggtctccaatgcagccaaggagagtggctttttgtgaatgtgcagtgcaacttttttttttttttgagactctgtcgaaaaagaaaaaaaagatgaaatgccttgaaaaagtaaggccaatgggtagggtcagaatatggcctgcaaatgcactgtactatttgtgtaacttatatgtaaatctgaaattatttcaaaataaatacaaaaagaaaaaaaggcaatatcccagaaccttgtgaaaacctggccgtagcaggtcctttttcctcctgctgagctgagcaggcatgctcacagatcctcaaggtttcttgaatggctactgtcctccccactggcccctctgccaacacctctgcccctcagcttttctgatgcccatgccccctcaccagctaactgtggcttgcacctttacctgttcccttcattttcccttctc

SEQ ID NO: 376857 - DNA, 435 bp, Homo sapiens
gtagggacagggtctcattatgttgcccaggctggtctgaaactcctggcctcaagtgatccttctgcctcagcctcccaaagtgcggacattataggcatgagccacgggaccaggacagaaaacaattttaaaatgacaacctccctgtgaaataaaacttgactggcacctgggtttgtatgactgtaaggattaaaaatggtcaagacaccctataaatagattaaggttccaacctaagtagaaacaatctggaaaacagaagtgtgtaagtttggacctcaattctgaaaatatactttttaaaaaacccgattttccaactcccaaacagattttagaaaccttaagagtatttttatgctggcttccaaaggttaaaacaaaatacactcatttcacctatgaatactgtcaaagcattataaatgc

SEQ ID NO: 376858 - DNA, 586 bp, Homo sapiens
atgttcttgaactgtaaaatgaaattataaagtatttacccattggtgtctgtcttcttgtactaaatattatgtgtgatttttccatattgttatatgtaccagtagtcttttaattttttgtgtacataatattcaaggttaaaacaccaaaatatatttatacattcttttgttgatgagcctttgggttgtttctagtttggatctattagaattagtgtacagaatattcttgtattcttcggctatattttaatacacatctggtatctatttcctattctggcaatatggtggtaagggtggggaattaagttatgtagggatgtgcttgttcagctctattttacaccattacaaagttatccttgcagttatgctaatattgacttctactatcagagtatgagaattccagttgttctacaccctcaccaacacttgaagttgtcagcctatttacatttagcacttctagtgagaatgtaattctaaaaaatgtttgttttgtttttaattttcttgatggtccattgaattgagcactttttaaataaaatgtttcttgtttcttggccattta

SEQ ID NO: 376859 - DNA, 2471 bp, Homo sapiens
  misc_feature (18)..(18): n is a, c, g, or t
aaaagggcattgagaccntgggaggtgacttcatcaatgctcctaccccgagttcttgagacagacctggaccgatcccctaccttgggtgtgcactcttgggagaacgaggggcggagggtccgaatctcctctcagcctttaagctcacctggtcagaatccttggatgagcctgtgggaccgttcctcctagcccggtggtttggaaccagtggctttgggactgtaagaggatggacaaaggtagtatgaggccgggacagctccccaaatgctcgggcgccaagcatctgctgattccactctgtgcctggcacgtgtgtctttcggtcctggctaggccttgccacctccccctgggccagcaccacccatgtacctgtcggcagagccacagttgactgacttgctgttgagctgctgctctttagcacggctgcattttgatggcagagggagcagttatgcccagagcccagcgtgtcggcatcaccagtctgacctgagcaccatgtgctgcacgacatgacacgtggcaccgggggaactgcccagcgtggaaggtctgggccaggtctgagcccagatgggatctggatggccaaggaactctaccttaaaacctcaagtgtcaaggaggcaggggaggggccaagagggctggcaggggaagggggctggggaggggtcccatttgcagaggctctaggatcttaggaggcccgaatccaccatttctctcttgctagattctcaggggctgctagattcatccctgatggcatcaggcactgccagccgctcagaggatgaggagtcactggcagggcagaagcgagcctcctcccaggccttgggcaccatccctaaacggagaagctcctccaggttcatcaagaggaagaagttcgatgatgagctggtggagagcagcctggcaaaatcttctacccgggcaaagggggccagtggggtggaaccagggcgctgttcggggagtgaaccctcctccagtgagaagaagaaggtatccaaagcccccagcactcctgtgccacccagcccagccccagcccctggactcaccaagcgtgtgaagaagagtaaacagccacttcaggtgaccaaggatctgggccgctggaagcctgcagatgacctcctgctcataaatgctgtgttgcagaccaacgacctgacctccgtccacctgggcgtgaaattcagctgccgcttcacccttcgggaggtccaggagcgttggtacgccctgctctacgatcctgtcatctccaagttggcctgtcaggccatgaggcagctgcacccagaggctattgcagccatccagagcaaggccctgtttagcaaggctgaggagcagctgctgagcaaagtgggatcgaccagccagcccaccttggagaccttccaggacctgctgcacagacaccctgatgccttctacctggcccgtaccgcgaaggccctgcaggcccactggcagctcatgaagcagtattacctgctggaggaccagacagtgcagccgctgcccaaaggggaccaagtgctgaacttctctgatgcagaggacctgattgatgacagtaagctcaaggacatgcgagatgaggtcctggaacatgagctgatggtggctgaccggcgccagaagcgagagattcggcagctggaacaggaactgcataagtggcaggtgctagtggacagcatcacaggcatgagctctccggacttcgacaaccagacactggcagtgctgcggggccgcatggtgcggtacctgatgcgctcgcgtgagatcaccctgggcagagcaaccaaggataaccagattgatgtggacctgtctctggagggtccggcctggaagatatcccggaaacaaggtgtcatcaagctgaagaacaacggtgatttcttcattgccaatgagggtcgacggcccatctacatcgatggacggccggtgctctgtggctccaaatggcgcctcagcaacaactctgtggtggagatcgccagcctgcgattcgtcttccttatcaaccaggacctcattgccctcatcagggctgaggctgccaagatcacaccacagtgaggagtggtggcaggactcgtgggccctctccggcctgtttcccctgccactccagcccccttgagctgggaactcaggctcctggaaaaacctgggcagtgggaggctcagctgcgggccattgatttgagcctttgagggaggatagggctggcctttgtgaagccagcagaggctgagaacctcaggcttccctagatccagagcccctccccatcttcctctctctaaaaacaaccctaccccccattgccaccttcactcctgtgtctccagctgattagcctcagactcttcttttattgtttttcttttgtaaataaaaagcaccaggttccaaa

SEQ ID NO: 376860 - DNA, 555 bp, Homo sapiens
gaccgtggggtgagaatgggcttgcgagtttacccccacctccccagccaccagcctgtgggtctcaaaccaaggctacttggtgctctgctttgagttgcagaggtgacttcatcaatgctcctaccccgagttcttgagacagacctggaccgatcccctaccttgggtgtgcactcttgggagaacgaggggcggagggtccggtaaggaaggggcacagaccctacctcagtttgccggcaagctcgggccccttcgccctctcctcagatgtcaagattcttagtcgtagcctatggagcggagagcgacaggctcacctggggacagggctagaacactgagctaagagccaccctggttagaagtggggactcacgagaggagcgccccgagaaagtccagtacctgggttctctaggggttgttggggcacagcgtggttgataatcacgcagttcccaaacagtggtttttggtttccacgagatggtatctcatggaaataccacttactaaatcttcagtaaaaaccccaaatggaaaagaaaa

SEQ ID NO: 376861 - DNA, 1953 bp, Homo sapiens
ctagtcgtgaaccggaagtagacgtacctcacgtacctcacggaagccggctttggccctgcggctgctaccgtcgccgcggagaaattgttggatctggcagtctaggaatgaatctcctctcagcctttaagctcacctggtcagaatccttggatgagcctgtgggaccgttcctcctagcccggtggtttggaaccagtggctttgggactgtaagaggatggacaaagattctcaggggctgctagattcatccctgatggcatcaggcactgccagccgctcagaggatgaggagtcactggcagggcagaagcgagcctcctcccaggccttgggcaccatccctaaacggagaagctcctccaggttcatcaagaggaagaagttcgatgatgagctggtggagagcagcctggcaaaatcttctacccgggcaaagggggccagtggggtggaaccagggcgctgttcggggagtgaaccctcctccagtgagaagaagaaggtatccaaagcccccagcactcctgtgccacccagcccagccccagcccctggactcaccaagcgtgtgaagaagagtaaacagccacttcaggtgaccaaggatctgggccgctggaagcctgcagatgacctcctgctcataaatgctgtgttgcagaccaacgacctgacctccgtccacctgggcgtgaaattcagctgccgcttcacccttcgggaggtccaggagcgttggtacgccctgctctacgatcctgtcatctccaagttggcctgtcaggccatgaggcagctgcacccagaggctattgcagccatccagagcaaggccctgtttagcaaggctgaggagcagctgctgagcaaagtgggatcgaccagccagcccaccttggagaccttccaggacctgctgcacagacaccctgatgccttctacctggcccgtaccgcgaaggccctgcaggcccactggcagctcatgaagcagtattacctgctggaggaccagacagtgcagccgctgcccaaaggggaccaagtgctgaacttctctgatgcagaggacctgattgatgacagtaagctcaaggacatgcgagatgaggtcctggaacatgagctgatggtggctgaccggcgccagaagcgagagattcggcagctggaacaggaactgcataagtggcaggtgctagtggacagcatcacaggcatgagctctccggacttcgacaaccagacactggcagtgctgcggggccgcatggtgcggtacctgatgcgctcgcgtgagatcaccctgggcagagcaaccaaggataaccagattgatgtggacctgtctctggagggtccggcctggaagatatcccggaaacaaggtgtcatcaagctgaagaacaacggtgatttcttcattgccaatgagggtcgacggcccatctacatcgatggacggccggtgctctgtggctccaaatggcgcctcagcaacaactctgtggtggagatcgccagcctgcgattcgtcttccttatcaaccaggacctcattgccctcatcagggctgaggctgccaagatcacaccacagtgaggagtggtggcaggactcgtgggccctctccggcctgtttcccctgccactccagcccccttgagctgggaactcaggctcctggaaaaacctgggcagtgggaggctcagctgcgggccattgatttgagcctttgagggaggatagggctggcctttgtgaagccagcagaggctgagaacctcaggcttccctagatccagagcccctccccatcttcctctctctaaaaacaaccctaccccccattgccaccttcactcctgtgtctccagctgattagcctcagactcttcttttattgtttttcttttgtaaataaaaagcaccaggttccaaa

SEQ ID NO: 376862 - DNA, 1748 bp, Homo sapiens
ctagtcgtgaaccggaagtagacgtacctcacgtacctcacggaagccggctttggccctgcggctgctaccgtcgccgcggagaaattgttggatctggcagtctaggaatgaatctcctctcagcctttaagctcacctggtcagaatccttggatgagcctgtgggaccgttcctcctagcccggtggtttggaaccagtggctttgggactgtaagaggatggacaaagattctcaggggctgctagattcatccctgatggcatcaggcactgccagccgctcagaggatgaggagtcactggcagggcagaagcgagcctcctcccaggccttgggcaccatccctaaacggagaagctcctccaggttcatcaagaggaagaagttcgatgatgagctggtggagagcagcctggcaaaatcttctacccgggcaaagggggccagtggggtggaaccagggcgctgttcggggagtgaaccctcctccagtgagaagaagaaggtatccaaagcccccagcactcctgtgccacccagcccagccccagcccctggactcaccaagcgtgtgaagaagagtaaacagccacttcaggtgaccaaggatctgggccgctggaagcctgcagatgacctcctgctcataaatgctgtgttgcagaccaacgacctgacctccgtccacctgggcgtgaaattcagctgccgcttcacccttcgggaggtccaggagcgttggtacgccctgctctacgatcctgtcatctccaagttggcctgtcaggccatgaggcagctgcacccagaggctattgcagccatccagagcaaggccctgtttagcaaggctgaggagcagctgctgagcaaagtgggatcgaccagccagcccaccttggagaccttccaggacctgctgcacagacaccctgatgccttctacctggcccgtaccgcgaaggccctgcaggcccactggcagctcatgaagcagtattacctgctggaggaccagacagtgcagccgctgcccaaaggggaccaagtgctgaacttctctgatgcagaggacctgattgatgacagtaagctcaaatcaccctgggcagagcaaccaaggataaccagattgatgtggacctgtctctggagggtccggcctggaagatatcccggaaacaaggtgtcatcaagctgaagaacaacggtgatttcttcattgccaatgagggtcgacggcccatctacatcgatggacggccggtgctctgtggctccaaatggcgcctcagcaacaactctgtggtggagatcgccagcctgcgattcgtcttccttatcaaccaggacctcattgccctcatcagggctgaggctgccaagatcacaccacagtgaggagtggtggcaggactcgtgggccctctccggcctgtttcccctgccactccagcccccttgagctgggaactcaggctcctggaaaaacctgggcagtgggaggctcagctgcgggccattgatttgagcctttgagggaggatagggctggcctttgtgaagccagcagaggctgagaacctcaggcttccctagatccagagcccctccccatcttcctctctctaaaaacaaccctaccccccattgccaccttcactcctgtgtctccagctgattagcctcagactcttcttttattgtttttcttttgtaaataaaaagcaccaggttccaaa

SEQ ID NO: 376863 - DNA, 2056 bp, Homo sapiens
ctagtcgtgaaccggaagtagacgtacctcacgtacctcacggaagccggctttggccctgcggctgctaccgtcgccgcggagaaattgttggatctggcagtctaggaatgaggtgacttcatcaatgctcctaccccgagttcttgagacagacctggaccgatcccctaccttgggtgtgcactcttgggagaacgaggggcggagggtccgaatctcctctcagcctttaagctcacctggtcagaatccttggatgagcctgtgggaccgttcctcctagcccggtggtttggaaccagtggctttgggactgtaagaggatggacaaagattctcaggggctgctagattcatccctgatggcatcaggcactgccagccgctcagaggatgaggagtcactggcagggcagaagcgagcctcctcccaggccttgggcaccatccctaaacggagaagctcctccaggttcatcaagaggaagaagttcgatgatgagctggtggagagcagcctggcaaaatcttctacccgggcaaagggggccagtggggtggaaccagggcgctgttcggggagtgaaccctcctccagtgagaagaagaaggtatccaaagcccccagcactcctgtgccacccagcccagccccagcccctggactcaccaagcgtgtgaagaagagtaaacagccacttcaggtgaccaaggatctgggccgctggaagcctgcagatgacctcctgctcataaatgctgtgttgcagaccaacgacctgacctccgtccacctgggcgtgaaattcagctgccgcttcacccttcgggaggtccaggagcgttggtacgccctgctctacgatcctgtcatctccaagttggcctgtcaggccatgaggcagctgcacccagaggctattgcagccatccagagcaaggccctgtttagcaaggctgaggagcagctgctgagcaaagtgggatcgaccagccagcccaccttggagaccttccaggacctgctgcacagacaccctgatgccttctacctggcccgtaccgcgaaggccctgcaggcccactggcagctcatgaagcagtattacctgctggaggaccagacagtgcagccgctgcccaaaggggaccaagtgctgaacttctctgatgcagaggacctgattgatgacagtaagctcaaggacatgcgagatgaggtcctggaacatgagctgatggtggctgaccggcgccagaagcgagagattcggcagctggaacaggaactgcataagtggcaggtgctagtggacagcatcacaggcatgagctctccggacttcgacaaccagacactggcagtgctgcggggccgcatggtgcggtacctgatgcgctcgcgtgagatcaccctgggcagagcaaccaaggataaccagattgatgtggacctgtctctggagggtccggcctggaagatatcccggaaacaaggtgtcatcaagctgaagaacaacggtgatttcttcattgccaatgagggtcgacggcccatctacatcgatggacggccggtgctctgtggctccaaatggcgcctcagcaacaactctgtggtggagatcgccagcctgcgattcgtcttccttatcaaccaggacctcattgccctcatcagggctgaggctgccaagatcacaccacagtgaggagtggtggcaggactcgtgggccctctccggcctgtttcccctgccactccagcccccttgagctgggaactcaggctcctggaaaaacctgggcagtgggaggctcagctgcgggccattgatttgagcctttgagggaggatagggctggcctttgtgaagccagcagaggctgagaacctcaggcttccctagatccagagcccctccccatcttcctctctctaaaaacaaccctaccccccattgccaccttcactcctgtgtctccagctgattagcctcagactcttcttttattgtttttcttttgtaaataaaaagcaccaggttccaaa

SEQ ID NO: 376864 - DNA, 2009 bp, Homo sapiens
gaccgtggggtgagaatgggcttgcgagtttacccccacctccccagccaccagcctgtgggtctcaaaccaaggctacttggtgctctgctttgagttgcagaggtgacttcatcaatgctcctaccccgagttcttgagacagacctggaccgatcccctaccttggaatctcctctcagcctttaagctcacctggtcagaatccttggatgagcctgtgggaccgttcctcctagcccggtggtttggaaccagtggctttgggactgtaagaggatggacaaagattctcaggggctgctagattcatccctgatggcatcaggcactgccagccgctcagaggatgaggagtcactggcagggcagaagcgagcctcctcccaggccttgggcaccatccctaaacggagaagctcctccaggttcatcaagaggaagaagttcgatgatgagctggtggagagcagcctggcaaaatcttctacccgggcaaagggggccagtggggtggaaccagggcgctgttcggggagtgaaccctcctccagtgagaagaagaaggtatccaaagcccccagcactcctgtgccacccagcccagccccagcccctggactcaccaagcgtgtgaagaagagtaaacagccacttcaggtgaccaaggatctgggccgctggaagcctgcagatgacctcctgctcataaatgctgtgttgcagaccaacgacctgacctccgtccacctgggcgtgaaattcagctgccgcttcacccttcgggaggtccaggagcgttggtacgccctgctctacgatcctgtcatctccaagttggcctgtcaggccatgaggcagctgcacccagaggctattgcagccatccagagcaaggccctgtttagcaaggctgaggagcagctgctgagcaaagtgggatcgaccagccagcccaccttggagaccttccaggacctgctgcacagacaccctgatgccttctacctggcccgtaccgcgaaggccctgcaggcccactggcagctcatgaagcagtattacctgctggaggaccagacagtgcagccgctgcccaaaggggaccaagtgctgaacttctctgatgcagaggacctgattgatgacagtaagctcaaggacatgcgagatgaggtcctggaacatgagctgatggtggctgaccggcgccagaagcgagagattcggcagctggaacaggaactgcataagtggcaggtgctagtggacagcatcacaggcatgagctctccggacttcgacaaccagacactggcagtgctgcggggccgcatggtgcggtacctgatgcgctcgcgtgagatcaccctgggcagagcaaccaaggataaccagattgatgtggacctgtctctggagggtccggcctggaagatatcccggaaacaaggtgtcatcaagctgaagaacaacggtgatttcttcattgccaatgagggtcgacggcccatctacatcgatggacggccggtgctctgtggctccaaatggcgcctcagcaacaactctgtggtggagatcgccagcctgcgattcgtcttccttatcaaccaggacctcattgccctcatcagggctgaggctgccaagatcacaccacagtgaggagtggtggcaggactcgtgggccctctccggcctgtttcccctgccactccagcccccttgagctgggaactcaggctcctggaaaaacctgggcagtgggaggctcagctgcgggccattgatttgagcctttgagggaggatagggctggcctttgtgaagccagcagaggctgagaacctcaggcttccctagatccagagcccctccccatcttcctctctctaaaaacaaccctaccccccattgccaccttcactcctgtgtctccagctgattagcctcagactcttcttttattgtttttcttttgtaaataaaaagcaccaggttccaaa

SEQ ID NO: 376865 - DNA, 2046 bp, Homo sapiens
gaccgtggggtgagaatgggcttgcgagtttacccccacctccccagccaccagcctgtgggtctcaaaccaaggctacttggtgctctgctttgagttgcagaggtgacttcatcaatgctcctaccccgagttcttgagacagacctggaccgatcccctaccttgggtgtgcactcttgggagaacgaggggcggagggtccgaatctcctctcagcctttaagctcacctggtcagaatccttggatgagcctgtgggaccgttcctcctagcccggtggtttggaaccagtggctttgggactgtaagaggatggacaaagattctcaggggctgctagattcatccctgatggcatcaggcactgccagccgctcagaggatgaggagtcactggcagggcagaagcgagcctcctcccaggccttgggcaccatccctaaacggagaagctcctccaggttcatcaagaggaagaagttcgatgatgagctggtggagagcagcctggcaaaatcttctacccgggcaaagggggccagtggggtggaaccagggcgctgttcggggagtgaaccctcctccagtgagaagaagaaggtatccaaagcccccagcactcctgtgccacccagcccagccccagcccctggactcaccaagcgtgtgaagaagagtaaacagccacttcaggtgaccaaggatctgggccgctggaagcctgcagatgacctcctgctcataaatgctgtgttgcagaccaacgacctgacctccgtccacctgggcgtgaaattcagctgccgcttcacccttcgggaggtccaggagcgttggtacgccctgctctacgatcctgtcatctccaagttggcctgtcaggccatgaggcagctgcacccagaggctattgcagccatccagagcaaggccctgtttagcaaggctgaggagcagctgctgagcaaagtgggatcgaccagccagcccaccttggagaccttccaggacctgctgcacagacaccctgatgccttctacctggcccgtaccgcgaaggccctgcaggcccactggcagctcatgaagcagtattacctgctggaggaccagacagtgcagccgctgcccaaaggggaccaagtgctgaacttctctgatgcagaggacctgattgatgacagtaagctcaaggacatgcgagatgaggtcctggaacatgagctgatggtggctgaccggcgccagaagcgagagattcggcagctggaacaggaactgcataagtggcaggtgctagtggacagcatcacaggcatgagctctccggacttcgacaaccagacactggcagtgctgcggggccgcatggtgcggtacctgatgcgctcgcgtgagatcaccctgggcagagcaaccaaggataaccagattgatgtggacctgtctctggagggtccggcctggaagatatcccggaaacaaggtgtcatcaagctgaagaacaacggtgatttcttcattgccaatgagggtcgacggcccatctacatcgatggacggccggtgctctgtggctccaaatggcgcctcagcaacaactctgtggtggagatcgccagcctgcgattcgtcttccttatcaaccaggacctcattgccctcatcagggctgaggctgccaagatcacaccacagtgaggagtggtggcaggactcgtgggccctctccggcctgtttcccctgccactccagcccccttgagctgggaactcaggctcctggaaaaacctgggcagtgggaggctcagctgcgggccattgatttgagcctttgagggaggatagggctggcctttgtgaagccagcagaggctgagaacctcaggcttccctagatccagagcccctccccatcttcctctctctaaaaacaaccctaccccccattgccaccttcactcctgtgtctccagctgattagcctcagactcttcttttattgtttttcttttgtaaataaaaagcaccaggttccaaa

SEQ ID NO: 376866 - DNA, 1833 bp, Homo sapiens
ctagtcgtgaaccggaagtagacgtacctcacgtacctcacggaagccggctttggccctgcggctgctaccgtcgccgcggagaaattgttggatctggcagtctaggaatgattctcaggggctgctagattcatccctgatggcatcaggcactgccagccgctcagaggatgaggagtcactggcagggcagaagcgagcctcctcccaggccttgggcaccatccctaaacggagaagctcctccaggttcatcaagaggaagaagttcgatgatgagctggtggagagcagcctggcaaaatcttctacccgggcaaagggggccagtggggtggaaccagggcgctgttcggggagtgaaccctcctccagtgagaagaagaaggtatccaaagcccccagcactcctgtgccacccagcccagccccagcccctggactcaccaagcgtgtgaagaagagtaaacagccacttcaggtgaccaaggatctgggccgctggaagcctgcagatgacctcctgctcataaatgctgtgttgcagaccaacgacctgacctccgtccacctgggcgtgaaattcagctgccgcttcacccttcgggaggtccaggagcgttggtacgccctgctctacgatcctgtcatctccaagttggcctgtcaggccatgaggcagctgcacccagaggctattgcagccatccagagcaaggccctgtttagcaaggctgaggagcagctgctgagcaaagtgggatcgaccagccagcccaccttggagaccttccaggacctgctgcacagacaccctgatgccttctacctggcccgtaccgcgaaggccctgcaggcccactggcagctcatgaagcagtattacctgctggaggaccagacagtgcagccgctgcccaaaggggaccaagtgctgaacttctctgatgcagaggacctgattgatgacagtaagctcaaggacatgcgagatgaggtcctggaacatgagctgatggtggctgaccggcgccagaagcgagagattcggcagctggaacaggaactgcataagtggcaggtgctagtggacagcatcacaggcatgagctctccggacttcgacaaccagacactggcagtgctgcggggccgcatggtgcggtacctgatgcgctcgcgtgagatcaccctgggcagagcaaccaaggataaccagattgatgtggacctgtctctggagggtccggcctggaagatatcccggaaacaaggtgtcatcaagctgaagaacaacggtgatttcttcattgccaatgagggtcgacggcccatctacatcgatggacggccggtgctctgtggctccaaatggcgcctcagcaacaactctgtggtggagatcgccagcctgcgattcgtcttccttatcaaccaggacctcattgccctcatcagggctgaggctgccaagatcacaccacagtgaggagtggtggcaggactcgtgggccctctccggcctgtttcccctgccactccagcccccttgagctgggaactcaggctcctggaaaaacctgggcagtgggaggctcagctgcgggccattgatttgagcctttgagggaggatagggctggcctttgtgaagccagcagaggctgagaacctcaggcttccctagatccagagcccctccccatcttcctctctctaaaaacaaccctaccccccattgccaccttcactcctgtgtctccagctgattagcctcagactcttcttttattgtttttcttttgtaaataaaaagcaccaggttccaaa

SEQ ID NO: 376867 - DNA, 1418 bp, Homo sapiens
aactttcaacccaaagggcctggttgtttgaacacggaacaggacgttaaaaaccaagggccacttcaggtgaccaaggatctgggccgctggaagcctgcagatgacctcctgctcataaatgctgtgttgcagaccaacgacctgacctccgtccacctgggcgtgaaattcagctgccgcttcacccttcgggaggtccaggagcgttggtacgccctgctctacgatcctgtcatctccaagttggcctgtcaggccatgaggcagctgcacccagaggctattgcagccatccagagcaaggccctgtttagcaaggctgaggagcagctgctgagcaaagtgggatcgaccagccagcccaccttggagaccttccaggacctgctgcacagacaccctgatgccttctacctggcccgtaccgcgaaggccctgcaggcccactggcagctcatgaagcagtattacctgctggaggaccagacagtgcagccgctgcccaaaggggaccaagtgctgaacttctctgatgcagaggacctgattgatgacagtaagctcaaggacatgcgagatgaggtcctggaacatgagctgatggtggctgaccggcgccagaagcgagagattcggcagctggaacaggaactgcataagtggcaggtgctagtggacagcatcacaggcatgagctctccggacttcgacaaccagacactggcagtgctgcggggccgcatggtgcggtacctgatgcgctcgcgtgagatcaccctgggcagagcaaccaaggataaccagattgatgtggacctgtctctggagggtccggcctggaagatatcccggaaacaaggtgtcatcaagctgaagaacaacggtgatttcttcattgccaatgagggtcgacggcccatctacatcgatggacggccggtgctctgtggctccaaatggcgcctcagcaacaactctgtggtggagatcgccagcctgcgattcgtcttccttatcaaccaggacctcattgccctcatcagggctgaggctgccaagatcacaccacagtgaggagtggtggcaggactcgtgggccctctccggcctgtttcccctgccactccagcccccttgagctgggaactcaggctcctggaaaaacctgggcagtgggaggctcagctgcgggccattgatttgagcctttgagggaggatagggctggcctttgtgaagccagcagaggctgagaacctcaggcttccctagatccagagcccctccccatcttcctctctctaaaaacaaccctaccccccattgccaccttcactcctgtgtctccagctgattagcctcagactcttcttttattgtttttcttttgtaaataaaaagcaccaggttccaaa

SEQ ID NO: 376868 - DNA, 636 bp, Homo sapiens
taatcagatcattgagagtcttggtttcaatgtctcgggcatgataaattctcccgtcgcataggactggccgtcctttagtgtcatcaagctgaagaacaacggtgatttcttcattgccaatgagggtcgacggcccatctacatcgatggacggccggtgctctgtggctccaaatggcgcctcagcaacaactctgtggtggagatcgccagcctgcgattcgtcttccttatcaaccaggacctcattgccctcatcagggctgaggctgccaagatcacaccacagtgaggagtggtggcaggactcgtgggccctctccggcctgtttcccctgccactccagcccccttgagctgggaactcaggctcctggaaaaacctgggcagtgggaggctcagctgcgggccattgatttgagcctttgagggaggatagggctggcctttgtgaagccagcagaggctgagaacctcaggcttccctagatccagagcccctccccatcttcctctctctaaaaacaaccctaccccccattgccaccttcactcctgtgtctccagctgattagcctcagactcttcttttattgtttttcttttgtaaataaaaagcaccaggttccaaa

SEQ ID NO: 376869 - DNA, 622 bp, Homo sapiens
  misc_feature (49)..(49): n is a, c, g, or t
  misc_feature (74)..(74): n is a, c, g, or t
  misc_feature (76)..(76): n is a, c, g, or t
  misc_feature (87)..(87): n is a, c, g, or t
  misc_feature (116)..(116): n is a, c, g, or t
  misc_feature (118)..(118): n is a, c, g, or t
  misc_feature (125)..(125): n is a, c, g, or t
  misc_feature (136)..(136): n is a, c, g, or t
  misc_feature (141)..(141): n is a, c, g, or t
  misc_feature (144)..(144): n is a, c, g, or t
  misc_feature (147)..(147): n is a, c, g, or t
  misc_feature (149)..(149): n is a, c, g, or t
  misc_feature (180)..(182): n is a, c, g, or t
  misc_feature (186)..(186): n is a, c, g, or t
  misc_feature (188)..(188): n is a, c, g, or t
  misc_feature (191)..(192): n is a, c, g, or t
  misc_feature (194)..(194): n is a, c, g, or t
ataaccatatttattttttccttttttttttattttccttcttttaatntatcccttaaataatttttcatcantnttaataacatnttttatttcttctatttccaattattttntncttcccnttttacatttnttttnttncgntnctctgtggcaccaaatggcgcctcagcaacnnntttntnttnnanatcgccagcctgcgattcgtcttccttatcaaccaggacctcattgccctcatcagggctgaggctgccaagatcacaccacagtgaggagtggtggcaggactcgtgggccctctccggcctgtttcccctgccactccagcccccttgagctgggaactcaggctcctggaaaaacctgggcagtgggaggctcagctgcgggccattgatttgagcctttgagggaggatagggctggcctttgtgaagccagcagaggctgagaacctcaggcttccctagatccagagcccctccccatcttcctctctctaaaaacaaccctaccccccattgccaccttcactcctgtgtctccagctgattagcctcagactcttcttttattgtttttcttttgtaaataaaaagcaccaggttccaaa

SEQ ID NO: 376870 - DNA, 1503 bp, Homo sapiens
ctagtcgtgaaccggaagtagacgtacctcacgtacctcacggaagccggctttggccctgcggctgctaccgtcgccgcggagaaattgttggatctggcagtctaggaatgaatctcctctcagcctttaagctcacctggtcagaatccttggatgagcctgtgggaccgttcctcctagcccggtggtttggaaccagtggctttgggactgtaagaggatggacaaaggtagtatgaggccgggacagctccccaaatgctcgggcgccaagcatctgctgattccactctgtgcctggcacgtgtgtctttcggtcctggctaggccttgccacctccccctgggccagcaccacccatgtacctgtcggcagagccacagttgactgacttgctgttgagctgctgctctttagcacggctgcattttgatggcagagggagcagttatgcccagagcccagcgtgtcggcatcaccagtctgacctgagcaccatgtgctgcacgacatgacacgtggcaccgggggaactgcccagcgtggaaggtctgggccaggtctgagcccagatgggatctggatggccaaggaactctaccttaaaacctcaagtgtcaaggaggcaggggaggggccaagagggctggcaggggaagggggctggggaggggtcccatttgcagaggctctaggatcttaggaggcccgaatccaccatttctctcttgctagattctcaggggctgctagattcatccctgatggcatcaggcactgccagccgctcagaggatgaggagtcactggcagggcagaagcgagcctcctcccaggccttgggcaccatccctaaacggagaagctcctccaggttcatcaagaggaagaagttcgatgatgagctggtggagagcagcctggcggggagtgaaccctcctccagtgagaagaagaaggtgaggaattgggagacttaggggatgggaggtagtgccagatttcatgtttccccagaacctttgccagctgccaagagccctgcagagcaggctggtgagaggaccaagctgccccagccctcatctcagatgcccccctcctgggaacacacctctccctactccccatttcttgctgcagcccccacccccaaccctgccattgcatcctgtatcacattccgtgtgggaggcatggagcatgcatctattctgggagcagacagcctgttcccagcattgcagagtgtaaaaataacccccaggtggcattgctgtggccctagacactgcaccagcaagagtgatttcccggtatcctccccacccaactttcactctggggtcggggatactgccagcaaagagaagaccccgtatggtcaaggactatatagaagtaacttggtgggatgggggtgggtattagaaactgattagcctcagactcttcttttattgtttttcttttgtaaataaaaagcaccaggttccaaa

SEQ ID NO: 376871 - DNA, 221 bp, Homo sapiens
ctagtcgtgaaccggaagtagacgtacctcacgtacctcacggaagccggctttggccctgcggctgctaccgtcgccgcggagaaattgttggatctggcagtctaggaatggtgagacctcgcggttcgcctctgagggttctcagaggagttggggatgaaatggagttttgcagagtgccgccggggacgaccaccccccaagtttggggccccgcc

SEQ ID NO: 376872 - DNA, 2104 bp, Homo sapiens
ctagtcgtgaaccggaagtagacgtacctcacgtacctcacggaagccggctttggccctgcggctgctaccgtcgccgcggagaaattgttggatctggcagtctaggaatgaatctcctctcagcctttaagctcacctggtcagaatccttggatgagcctgtgggaccgttcctcctagcccggtggtttggaaccagtggctttgggactgtaagaggatggacaaagattctcaggggctgctagattcatccctgatggcatcaggcactgccagccgctcagaggatgaggagtcactggcagggcagaagcgagcctcctcccaggccttgggcaccatccctaaacggagaagctcctccaggttcatcaagaggaagaagttcgatgatgagctggtggagagcagcctggcaaaatcttctacccgggcaaagggggccagtggggtggaaccagggcgctgttcggggagtgaaccctcctccagtgagaagaagaaggtatccaaagcccccagcactcctgtgccacccagcccagccccagcccctggactcaccaagcgtgtgaagaagagtaaacagccacttcaggtgaccaaggatctgggccgctggaagcctgcagatgacctcctgctcataaatgctgtgttgcagaccaacgacctgacctccgtccacctgggcgtgaaattcagctgccgcttcacccttcgggaggtccaggagcgttggtacgccctgctctacgatcctgtcatctccaagttggcctgtcaggccatgaggcagctgcacccagaggctattgcagccatccagagcaaggccctgtttagcaaggctgaggagcagctgctgagcaaagtgggatcgaccagccagcccaccttggagaccttccaggacctgctgcacagacaccctgatgccttctacctggcccgtaccgcgaaggccctgcaggcccactggcagctcatgaagcagtattacctgctggaggaccagacagtgcagccgctgcccaaaggggaccaagtgctgaacttctctgatgcagaggacctgattgatgacagtaagctcaaggacatgcgagatgaggtcctggaacatgagctgatggtggctgaccggcgccagaagcgagagattcggcagctggaacaggaactgcataagtggcaggtgctagtggacagcatcacaggcatgagctctccggacttcgacaaccagacactggcagtgctgcggggccgcatggtgcggtacctgatgcgctcgcgtgaggtgaggcaggcccatccccgcccttcttaggctgcttcctctgtcagtgcctttctctgcgtagtccttggtttcccatctttctctggcctgcatagacctactcccccaattcttcaggtcccagccctcacctgccccatttccccagatcaccctgggcagagcaaccaaggataaccagattgatgtggacctgtctctggagggtccggcctggaagatatcccggaaacaaggtgtcatcaagctgaagaacaacggtgatttcttcattgccaatgagggtcgacggcccatctacatcgatggacggccggtgctctgtggctccaaatggcgcctcagcaacaactctgtggtggagatcgccagcctgcgattcgtcttccttatcaaccaggacctcattgccctcatcagggctgaggctgccaagatcacaccacagtgaggagtggtggcaggactcgtgggccctctccggcctgtttcccctgccactccagcccccttgagctgggaactcaggctcctggaaaaacctgggcagtgggaggctcagctgcgggccattgatttgagcctttgagggaggatagggctggcctttgtgaagccagcagaggctgagaacctcaggcttccctagatccagagcccctccccatcttcctctctctaaaaacaaccctaccccccattgccaccttcactcctgtgtctccagctgattagcctcagactcttcttttattgtttttcttttgtaaataaaaagcaccaggttccaaa

SEQ ID NO: 376873 - DNA, 1575 bp, Homo sapiens
ctagtcgtgaaccggaagtagacgtacctcacgtacctcacggaagccggctttggccctgcggctgctaccgtcgccgcggagaaattgttggatctggcagtctaggaatgaatctcctctcagcctttaagctcacctggtcagaatccttggatgagcctgtgggaccgttcctcctagcccggtggtttggaaccagtggctttgggactgtaagaggatggacaaagattctcaggggctgctagattcatccctgatggcatcaggcactgccagccgctcagaggatgaggagtcactggcagggcagaagcgagcctcctcccaggccttgggcaccatccctaaacggagaagctcctccaggttcatcaagaggaagaagttcgatgatgagctggtggagagcagcctggcaaaatcttctacccgggcaaagggggccagtggggtggaaccagggcgctgttcggggagtgaaccctcctccagtgagaagaagaaggtatccaaagcccccagcactcctgtgccacccagcccagccccagcccctggactcaccaagcgtgtgaagaagagtaaacagccacttcaggtgaccaaggatctgggccgctggaagcctgcagatgacctcctgctcataaatgctgtgttgcagaccaacgacctgacctccgtccacctgggcgtgaaattcagctgccgcttcacccttcgggaggtccaggagcgttggtacgccctgctctacgatcctgtcatctccaagttggcctgtcaggccatgaggcagctgcacccagaggctattgcagccatccagagcaaggccctgtttagcaaggctgaggagcagctgctgagcaaagtgggatcgaccagccagcccaccttggagaccttccaggacctgctgcacagacaccctgatgccttctacctggcccgtaccgcgaaggccctgcaggcccactggcagctcatgaagcagtattacctgctggaggaccagacagtgcagccgctgcccaaaggggaccaagtgctgaacttctctgatgcagaggacctgattgatgacagtaagctcaaggacatgcgagatgaggtcctggaacatgagctgatggtggctgaccggcgccagaagcgagagattcggcagctggaacaggaactgcataagtggcaggtgctagtggacagcatcacaggcatgagctctccggacttcgacaaccagacactggcagtgctgcggggccgcatggtgcggtacctgatgcgctcgcgtgagatccctgggcagagcaccatgtacctgatggttgtggccctgtctctggagggtcgcctggaggtttcccggaaccgtgtcttcagcttgaacacacggggttcttcttggcagtggtcccggcccttctgatggggcgggctgggtcaagggcccacactgtggggtccgccggctttcttaaaggcgtgcctcggggcgcgccccagtgggcgggctcccgccgccacgtgactgtccgcgctcggcgggggacccctctcctg

SEQ ID NO: 376874 - DNA, 2459 bp, Homo sapiens
ctagtcgtgaaccggaagtagacgtacctcacgtacctcacggaagccggctttggccctgcggctgctaccgtcgccgcggagaaattgttggatctggcagtctaggaatgaatctcctctcagcctttaagctcacctggtcagaatccttggatgagcctgtgggaccgttcctcctagcccggtggtttggaaccagtggctttgggactgtaagaggatggacaaaggtagtatgaggccgggacagctccccaaatgctcgggcgccaagcatctgctgattccactctgtgcctggcacgtgtgtctttcggtcctggctaggccttgccacctccccctgggccagcaccacccatgtacctgtcggcagagccacagttgactgacttgctgttgagctgctgctctttagcacggctgcattttgatggcagagggagcagttatgcccagagcccagcgtgtcggcatcaccagtctgacctgagcaccatgtgctgcacgacatgacacgtggcaccgggggaactgcccagcgtggaaggtctgggccaggtctgagcccagatgggatctggatggccaaggaactctaccttaaaacctcaagtgtcaaggaggcaggggaggggccaagagggctggcaggggaagggggctggggaggggtcccatttgcagaggctctaggatcttaggaggcccgaatccaccatttctctcttgctagattctcaggggctgctagattcatccctgatggcatcaggcactgccagccgctcagaggatgaggagtcactggcagggcagaagcgagcctcctcccaggccttgggcaccatccctaaacggagaagctcctccaggttcatcaagaggaagaagttcgatgatgagctggtggagagcagcctggcaaaatcttctacccgggcaaagggggccagtggggtggaaccagggcgctgttcggggagtgaaccctcctccagtgagaagaagaaggtatccaaagcccccagcactcctgtgccacccagcccagccccagcccctggactcaccaagcgtgtgaagaagagtaaacagccacttcaggtgaccaaggatctgggccgctggaagcctgcagatgacctcctgctcataaatgctgtgttgcagaccaacgacctgacctccgtccacctgggcgtgaaattcagctgccgcttcacccttcgggaggtccaggagcgttggtacgccctgctctacgatcctgtcatctccaagttggcctgtcaggccatgaggcagctgcacccagaggctattgcagccatccagagcaaggccctgtttagcaaggctgaggagcagctgctgagcaaagtgggatcgaccagccagcccaccttggagaccttccaggacctgctgcacagacaccctgatgccttctacctggcccgtaccgcgaaggccctgcaggcccactggcagctcatgaagcagtattacctgctggaggaccagacagtgcagccgctgcccaaaggggaccaagtgctgaacttctctgatgcagaggacctgattgatgacagtaagctcaaggacatgcgagatgaggtcctggaacatgagctgatggtggctgaccggcgccagaagcgagagattcggcagctggaacaggaactgcataagtggcaggtgctagtggacagcatcacaggcatgagctctccggacttcgacaaccagacactggcagtgctgcggggccgcatggtgcggtacctgatgcgctcgcgtgagatcaccctgggcagagcaaccaaggataaccagattgatgtggacctgtctctggagggtccggcctggaagatatcccggaaacaaggtgtcatcaagctgaagaacaacggtgatttcttcattgccaatgagggtcgacggcccatctacatcgatggacggccggtgctctgtggctccaaatggcgcctcagcaacaactctgtggtggagatcgccagcctgcgattcgtcttccttatcaaccaggacctcattgccctcatcagggctgaggctgccaagatcacaccacagtgaggagtggtggcaggactcgtgggccctctccggcctgtttcccctgccactccagcccccttgagctgggaactcaggctcctggaaaaacctgggcagtgggaggctcagctgcgggccattgatttgagcctttgagggaggatagggctggcctttgtgaagccagcagaggctgagaacctcaggcttccctagatccagagcccctccccatcttcctctctctaaaaacaaccctaccccccattgccaccttcactcctgtgtctccagctgattagcctcagactcttcttttattgtttttcttttgtaaataaaaagcaccaggttccaaa

SEQ ID NO: 376875 - DNA, 1943 bp, Homo sapiens
gaccgtggggtgagaatgggcttgcgagtttacccccacctccccagccaccagcctgtgggtctcaaaccaaggctacttggtgctctgctttgagttgcagaatctcctctcagcctttaagctcacctggtcagaatccttggatgagcctgtgggaccgttcctcctagcccggtggtttggaaccagtggctttgggactgtaagaggatggacaaagattctcaggggctgctagattcatccctgatggcatcaggcactgccagccgctcagaggatgaggagtcactggcagggcagaagcgagcctcctcccaggccttgggcaccatccctaaacggagaagctcctccaggttcatcaagaggaagaagttcgatgatgagctggtggagagcagcctggcaaaatcttctacccgggcaaagggggccagtggggtggaaccagggcgctgttcggggagtgaaccctcctccagtgagaagaagaaggtatccaaagcccccagcactcctgtgccacccagcccagccccagcccctggactcaccaagcgtgtgaagaagagtaaacagccacttcaggtgaccaaggatctgggccgctggaagcctgcagatgacctcctgctcataaatgctgtgttgcagaccaacgacctgacctccgtccacctgggcgtgaaattcagctgccgcttcacccttcgggaggtccaggagcgttggtacgccctgctctacgatcctgtcatctccaagttggcctgtcaggccatgaggcagctgcacccagaggctattgcagccatccagagcaaggccctgtttagcaaggctgaggagcagctgctgagcaaagtgggatcgaccagccagcccaccttggagaccttccaggacctgctgcacagacaccctgatgccttctacctggcccgtaccgcgaaggccctgcaggcccactggcagctcatgaagcagtattacctgctggaggaccagacagtgcagccgctgcccaaaggggaccaagtgctgaacttctctgatgcagaggacctgattgatgacagtaagctcaaggacatgcgagatgaggtcctggaacatgagctgatggtggctgaccggcgccagaagcgagagattcggcagctggaacaggaactgcataagtggcaggtgctagtggacagcatcacaggcatgagctctccggacttcgacaaccagacactggcagtgctgcggggccgcatggtgcggtacctgatgcgctcgcgtgagatcaccctgggcagagcaaccaaggataaccagattgatgtggacctgtctctggagggtccggcctggaagatatcccggaaacaaggtgtcatcaagctgaagaacaacggtgatttcttcattgccaatgagggtcgacggcccatctacatcgatggacggccggtgctctgtggctccaaatggcgcctcagcaacaactctgtggtggagatcgccagcctgcgattcgtcttccttatcaaccaggacctcattgccctcatcagggctgaggctgccaagatcacaccacagtgaggagtggtggcaggactcgtgggccctctccggcctgtttcccctgccactccagcccccttgagctgggaactcaggctcctggaaaaacctgggcagtgggaggctcagctgcgggccattgatttgagcctttgagggaggatagggctggcctttgtgaagccagcagaggctgagaacctcaggcttccctagatccagagcccctccccatcttcctctctctaaaaacaaccctaccccccattgccaccttcactcctgtgtctccagctgattagcctcagactcttcttttattgtttttcttttgtaaataaaaagcaccaggttccaaa

SEQ ID NO: 376876 - DNA, 1723 bp, Homo sapiens
aaagataggctagtagagcccggtgtatcggccgagggcctgccgtgcttcgtcgcgcggagaaattgttggatctggcagggcagaagcgagcctcctcccaggccttgggcaccatccctaaacggagaagctcctccaggttcatcaagaggaagaagttcgatgatgagctggtggagagcagcctggcaaaatcttctacccgggcaaagggggccagtggggtggaaccagggcgctgttcggggagtgaaccctcctccagtgagaagaagaaggtatccaaagcccccagcactcctgtgccacccagcccagccccagcccctggactcaccaagcgtgtgaagaagagtaaacagccacttcaggtgaccaaggatctgggccgctggaagcctgcagatgacctcctgctcataaatgctgtgttgcagaccaacgacctgacctccgtccacctgggcgtgaaattcagctgccgcttcacccttcgggaggtccaggagcgttggtacgccctgctctacgatcctgtcatctccaagttggcctgtcaggccatgaggcagctgcacccagaggctattgcagccatccagagcaaggccctgtttagcaaggctgaggagcagctgctgagcaaagtgggatcgaccagccagcccaccttggagaccttccaggacctgctgcacagacaccctgatgccttctacctggcccgtaccgcgaaggccctgcaggcccactggcagctcatgaagcagtattacctgctggaggaccagacagtgcagccgctgcccaaaggggaccaagtgctgaacttctctgatgcagaggacctgattgatgacagtaagctcaaggacatgcgagatgaggtcctggaacatgagctgatggtggctgaccggcgccagaagcgagagattcggcagctggaacaggaactgcataagtggcaggtgctagtggacagcatcacaggcatgagctctccggacttcgacaaccagacactggcagtgctgcggggccgcatggtgcggtacctgatgcgctcgcgtgagatcaccctgggcagagcaaccaaggataaccagattgatgtggacctgtctctggagggtccggcctggaagatatcccggaaacaaggtgtcatcaagctgaagaacaacggtgatttcttcattgccaatgagggtcgacggcccatctacatcgatggacggccggtgctctgtggctccaaatggcgcctcagcaacaactctgtggtggagatcgccagcctgcgattcgtcttccttatcaaccaggacctcattgccctcatcagggctgaggctgccaagatcacaccacagtgaggagtggtggcaggactcgtgggccctctccggcctgtttcccctgccactccagcccccttgagctgggaactcaggctcctggaaaaacctgggcagtgggaggctcagctgcgggccattgatttgagcctttgagggaggatagggctggcctttgtgaagccagcagaggctgagaacctcaggcttccctagatccagagcccctccccatcttcctctctctaaaaacaaccctaccccccattgccaccttcactcctgtgtctccagctgattagcctcagactcttcttttattgtttttcttttgtaaataaaaagcaccaggttccaaa

SEQ ID NO: 376877 - DNA, 1050 bp, Homo sapiens
  misc_feature (830)..(830): n is a, c, g, or t
ctagtcgtgaaccggaagtagacgtacctcacgtacctcacggaagccggctttggccctgcggctgctaccgtcgccgcggagaaattgttggatctggcagtctaggaatgaatctcctctcagcctttaagctcacctggtcagaatccttggatgagcctgtgggaccgttcctcctagcccggtggtttggaaccagtggctttgggactgtaagaggatggacaaagattctcaggggctgctagattcatccctgatggcatcaggcactgccagccgctcagaggatgaggagtcactggcagggcagaagcgagcctcctcccaggccttgggcaccatccctaaacggagaagctcctccaggttcatcaagaggaagaagttcgatgatgagctggtggagagcagcctggcaaaatcttctacccgggcaaagggggccagtggggtggaaccagggcgctgttcggggagtgaaccctcctccagtgagaagaagaaggtatccaaagcccccagcactcctgtgccacccagcccagccccagcccctggactcaccaagcgtgtgaagaagagtaaacagccacttcaggtgaccaaggatctgggccgctggaagcctgcagatgacctcctgctcataaatgctgtgttgcagaccaacgacctgacctccgtccacctgggcgtgaaattcagctgccgcttcacccttcgggaggtccaggagcgttggtacgccctgctctacgatcctgtcatctccaagtgggctgtcaggccatgaggcagttggaccaagaggtattggaggcatncagaagaaggcctgtttagaggtggggagcaggtggggcaagtggatcagacagccggcacctgggacttcgggccggtgggaaaccggggtttacggcgacggaggcgaggcctggtcttagagtttcgcgggccaggctgcacggcgctgtcttgggcgtgtttcccgtggtcgttgtgcgcatggataggtttcccaggggggcggccgctctgtgc

SEQ ID NO: 376878 - DNA, 1051 bp, Homo sapiens
ctagtcgtgaaccggaagtagacgtacctcacgtacctcacggaagccggctttggccctgcggctgctaccgtcgccgcggagaaattgttggatctggcagtctaggaatgaatctcctctcagcctttaagctcacctggtcagaatccttggatgagcctgtgggaccgttcctcctagcccggtggtttggaaccagtggctttgggactgtaagaggatggacaaagattctcaggggctgctagattcatccctgatggcatcaggcactgccagccgctcagaggatgaggagtcactggcagggcagaagcgagcctcctcccaggccttgggcaccatccctaaacggagaagctcctccaggttcatcaagaggaagaagttcgatgatgagctggtggagagcagcctggcaaaatcttctacccgggcaaagggggccagtggggtggaaccagggcgctgttcggggagtgaaccctcctccagtgagaagaagaaggtgaggaattgggagacttaggggatgggaggtagtgccagatttcatgtttccccagaacctttgccagctgccaagagccctgcagagcaggctggtgagaggaccaagctgccccagccctcatctcagatgcccccctcctgggaacacacctctccctactccccatttcttgctgcagcccccacccccaaccctgccattgcatcctgtatcacattccgtgtgggaggcatggagcatgcatctattctgggagcagacagcctgttcccagcattgcagagtgtaaaaataacccccaggtggcattgctgtggccctagacactgcaccagcaagagtgatttcccggtatcctccccacccaactttcactctggggtcggggatactgccagcaaagagaagaccccgtatggtcaaggactatatagaagtaacttggtgggatgggggtgggtattagaaactgattagcctcagactcttcttttattgtttttcttttgtaaataaaaagcaccaggttccaaa

SEQ ID NO: 376879 - DNA, 547 bp, Homo sapiens
  misc_feature (486)..(486): n is a, c, g, or t
  misc_feature (504)..(504): n is a, c, g, or t
  misc_feature (513)..(513): n is a, c, g, or t
  misc_feature (530)..(530): n is a, c, g, or t
ctagtcgtgaaccggaagtagacgtacctcacgtacctcacggaagccggctttggccctgcggctgctaccgtcgccgcggagaaattgttggatctggcagtctaggaatgaggtgacttcatcaatgctcctaccccgagttcttgagacagacctggaccgatcccctaccttgggtgtgcactcttgggagaacgaggggcggagggtccgaatctcctctcagcctttaagctcacctggtcagaatccttggatgagcctgtgggaccgttcctcctagcccggtggtttggaaccagtggctttgggactgtaagaggatggacaaagattctcaggggctgctagattcatccctgatggcatcaggcactgccagccgctcagaggatgaggagtcactggcagggcagaagcgagcctcctcccaggccttgggcaccatccctaaacggagaagctcctccagttcatcaagangaagaattcgatgatganctggtgganagcagctggcatttctncgggcggtcggcggcgg

SEQ ID NO: 376880 - DNA, 736 bp, Homo sapiens
tctgtagagacagggtatcaccatgttacccaggctgttctcaaactcatgagcgcaagccatccacctgccttgatctcccaaagtgctgggattgtgctggcaggagccaccacacctggcttaaatgctcctcttgatggttggcctctttctctggcaatggctggctccctctgctcctcaggcacagggggtgagatgcacagtaacaactctgatccaatccagctggttctttttagaggaaaaacctatagctggagcagtcaacagaggcaaggtcaccttgtggcagctgcagctgcaaacatgggaaggaagcagggggcaggggagggcaggagatcatattttggaagagggtgctgggcagaccatccaataagggctaatggcagcccttctctaagaatgagaaatgtcattctgaccagcagttgacagttaagggtcatccaaatgagctacatgcttatcctaaaaggattggctagagacaaaagaggaagtgggttacacacttatccaaaaaggattggttagagacaaaagaggaagaagaaataaaagggactggctcatttcttctgaacttcctgtctgtaactttgtcaggcagagcctgaagtgctctgtggttcctgggctattgcccggcattagcaggactggagtttggctgcagagggaggcgagagtacaaaagatactcgggaagctgattgaaagccat

SEQ ID NO: 376881 - DNA, 260 bp, Homo sapiens
aagggagcctttgaaggtggttgtttaattttataatttttaattttttaattagtaaggcatgttggagttagcataaaacaacggagaagggtattaaaaacaaatacccttttaagaaaagtatggaaagtaaaagccccttccctactttttccacttctgttttatcaactttagccagtatctctatttaatcattcccactgtaggccaagaggaattcttttctttcatatggagtctccctctgttgccag

SEQ ID NO: 376882 - DNA, 4497 bp, Homo sapiens
actgcccccagaactgccctctggacctccagggcttcccagccctccacttcctgaggaggcgctgggtacccggagtcctggggatgggcacaatgcccctgtggaaggacctgagggcgagtatgtggagctgttagaggtgacgctgcccgtgagggggagcccaacagatgctgaaggctccccaggcctctccagagtccggacggtacccacccgcaagggcgctggagggaagggccgccaccggagacaccgggcgtggatgcaccagaagggcctggggcctcggggccaggatggagcacgcccacccggcgaggggagcagcaccggagcctcccctgagtctcccccaggagctgaggctgtcccagaggcagcagtcttggaggtgtctgagcccccagcagaggctgtgggagaagcctccggatcttgccccctgaggccaggggagcttagaggaggaggaggaggaggccagggggctgaaggaccacctggtacccctcggagaacaggcaaaggaaacagaagaaagaagcgagctgcaggtcgaggggctcttagccgaggaggggacagtgccccactgagccctggggacaaggaagatgccagccaccaagaagcccttggcaatctgccctcaccaagtgagcacaagcttccagaatgccacctggttaaggaggaatatgaaggctcagggaagccagaatctgagccaaaagagctcaaaacagcaggcgagaaagagcctcagctctctgaagcctgtgggcctacagaagagggggccggagagagagagctggaggggccaggcctgctgtgtatggcaggacacacaggcccagaaggccccctgtctgacactccaacacctccgctggagactgtgcaggaaggaaaaggggacaacattccagaagaggcccttgcagtctccgtctctgatcaccctgatgtagcttgggacttgatggcatctggattcctcatcctgacgggaggggtggaccagagtgggcgagctctgctgaccattaccccaccgtgccctcctgaggagcccccaccctcccgagacacgctgaacacaactcttcattacctccactcactgctcaggcctgatctacagacactggggctgtccgtcctgctggaccttcgtcaggcacctccactgcctccagcactcattcctgccttgagccaacttcaggactcaggagatcctccccttgttcagcggctgctgattctcattcatgatgaccttccaactgaactctgtggatttcagggtgctgaggtgctgtcagagaatgatctgaaaagagtggccaagccagaggagctgcagtgggagttaggaggtcacagggacccctctcccagtcactgggtagagatacaccaggaagtggtaaggctatgtcgcctgtgccaaggtgtgctgggctcggtacggcaggccattgaggagctggagggagcagcagagccagaggaagaggaggcagtgggaatgcccaagccactgcagaaggtgctggcagatccccggctgacggcactgcagagggatgggggggccatcctgatgaggctgcgctccactcccagcagcaagctggagggccaaggcccagctacactgtatcaggaagtggacgaggccattcaccagcttgtgcgcctctccaacctgcacgtgcagcagcaagagcagcggcagtgcctgcggcgactccagcaggtgttgcagtggctctcgggcccaggggaggagcagctggcaagctttgctatgcctggggacaccttgtctgccctgcaggagacagagctgcgattccgtgctttcagcgctgaggtccaggagcgcctggcccaggcacgggaggccctggctctggaggagaatgccacctcccagaaggtgctggatatctttgaacagcggctggagcaggttgagagtggcctccatcgggccctgcggctacagcgcttcttccagcaggcacatgaatgggtggatgagggctttgctcggctggcaggagctgggccgggtcgggaggctgtgctggctgcactggccctgcggcgggccccagagcccagtgccggcaccttccaggagatgcgggccctggccctggacctgggcagcccagcagccctgcgagaatggggccgctgccaggcccgctgccaagagctagagaggaggatccagcaacacgtgggagaggaggcgagcccacggggctaccgacgacggcgggcagacggtgccagcagtggaggggcccagtgggggccccgcagcccctcgcccagcctcagctccttgctgctccccagcagccctgggccacggccagccccatcccattgctccctggccccatgtggagaggactatgaggaagagggccctgagctggctccagaagcagagggcaggcccccaagagctgtgctgatccgaggcctggaggtcaccagcactgaggtggtagacaggacgtgctcaccacgggaacacgtgctgctgggccgggctagggggccagacggaccctggggagtaggcaccccccggatggagcgcaagcgaagcatcagtgcccagcagcggctggtgtctgagctgattgcctgtgaacaagattacgtggccaccttgagtgagccagtgccaccccctgggcctgagctgacgcctgaacttcggggcacctgggctgctgccctgagtgcccgggaaaggcttcgcagcttccaccggacacactttctgcgggagcttcagggctgcgccacccaccccctacgcattggggcctgcttccttcgccacggggaccagttcagcctttatgcacagtacgtgaagcaccgacacaaactggagaatggtctggctgcgctcagtccctcaagcaagggctccatggaggctggcccttacctgccccgagccctgcagcagcctctggaacagctgactcggtatgggcggctcctggaggagctcctgagggaagctgggcctgagctcagttctgagtgccgggcccttggggctgctgtacagctgctccgggaacaagaggcccgtggcagagacctgctggccgtggaggcggtgcgtggctgtgagatagatctgaaggagcagggacagctcttgcatcgagaccccttcactgtcatctgtggccgaaagaagtgccttcgccatgtctttctcttcgagcatctcctcctgttcagcaagctcaagggccctgaaggggggtcagagatgtttgtttacaagcaggcctttaagactgctgatatggggctgacagaaaacatcggggacagcggactctgctttgagttgtggtttcggcggcggcgtgcacgagaggcatacactctgcaggcaacctcaccagagatcaaactcaagtggacaagttctattgcccagctgctgtggagacaggcagcccacaacaaggagctccgagtgcagcagatggtgtccatgggcattgggaataaacccttcctggacatcaaagcccttggggagcggacgctgagtgccctgctcactggaagagccgcccgcacccgggcctccgtggccgtgtcatcctttgagcatgccggcccctcccttcccggcctttcgccgggagcctgctccctgcctgcccgcgtcgaggaggaggcctgggatctggacgtcaagcaaatttccctggccccagaaacacttgactcttctggagatgtgtccccaggaccaagaaacagccccagcctgcaacccccccaccctgggagcagcactcccaccctggccagtcgagggatcttagggctatcccgacagagtcatgctcgagccctgagtgaccccaccacgcctctgtgacctggagaagatccagaacttgcgtgcagcttctcctctcagcacactttgggctgggatggcagtggggcataatggagccctgggcgatcgctgaatttcttccctctgcttcctggacacagaggaggtctaacgaccagagtattgccctgccaccactatctctagtctccctagcttggtgccttctcctgcaggagtcagagcagccacattgcttgccttcataccctggaggtggggaagttatccctcttccggtgctttcccatcctgggccactgtatccaggacatcactcccatgccagccctccctggcagcccatgttctcctcttttctcaccccctgactttccctgagaagaatcatctctgccaggtcaactggagtccctggtgactccattctgaggtgtcacaagcaatgaagctatgcaaacaataggagggtgtgacaggggaaccgtagactttatatatgtaattactgttattataatactattgttatattaaatgtatttactcac

SEQ ID NO: 376883 - DNA, 5060 bp, Homo sapiens
actgcccccagaactgccctctggacctccagggcttcccagccctccacttcctgaggaggcgctgggtacccggagtcctggggatgggcacaatgcccctgtggaaggacctgagggcgagtatgtggagctgttagaggtgacgctgcccgtgagggggagcccaacagatgctgaaggctccccaggcctctccagagtccggacggtacccacccgcaagggcgctggagggaagggccgccaccggagacaccgggcgtggatgcaccagaagggcctggggcctcggggccaggatggagcacgcccacccggcgaggggagcagcaccggagcctcccctgagtctcccccaggagctgaggctgtcccagaggcagcagtcttggaggtgtctgagcccccagcagaggctgtgggagaagcctccggatcttgccccctgaggccaggggagcttagaggaggaggaggaggaggccagggggctgaaggaccacctggtacccctcggagaacaggcaaaggaaacagaagaaagaagcgagctgcaggtcgaggggctcttagccgaggaggggacagtgccccactgagccctggggacaaggaagatgccagccaccaagaagcccttggcaatctgccctcaccaagtgagcacaagcttccagaatgccacctggttaaggaggaatatgaaggctcagggaagccagaatctgagccaaaagagctcaaaacagcaggcgagaaagagcctcagctctctgaagcctgtgggcctacagaagagggggccggagagagagagctggaggggccaggcctgctgtgtatggcaggacacacaggcccagaaggccccctgtctgacactccaacacctccgctggagactgtgcaggaaggaaaaggggacaacattccagaagaggcccttgcagtctccgtctctgatcaccctgatgtagcttgggacttgatggcatctggattcctcatcctgacgggaggggtggaccagagtgggcgagctctgctgaccattaccccaccgtgccctcctgaggagcccccaccctcccgagacacgctgaacacaactcttcattacctccactcactgctcaggcctgatctacagacactggggctgtccgtcctgctggaccttcgtcaggcacctccactgcctccagcactcattcctgccttgagccaacttcaggactcaggagatcctccccttgttcagcggctgctgattctcattcatgatgaccttccaactgaactctgtggatttcagggtgctgaggtgctgtcagagaatgatctgaaaagagtggccaagccagaggagctgcagtgggagttaggaggtcacagggacccctctcccagtcactgggtagagatacaccaggaagtggtaaggctatgtcgcctgtgccaaggtgtgctgggctcggtacggcaggccattgaggagctggagggagcagcagagccagaggaagaggaggcagtgggaatgcccaagccactgcagaaggtgctggcagatccccggctgacggcactgcagagggatgggggggccatcctgatgaggctgcgctccactcccagcagcaagctggagggccaaggcccagctacactgtatcaggaagtggacgaggccattcaccagcttgtgcgcctctccaacctgcacgtgcagcagcaagagcagcggcagtgcctgcggcgactccagcaggtgttgcagtggctctcgggcccaggggaggagcagctggcaagctttgctatgcctggggacaccttgtctgccctgcaggagacagagctgcgattccgtgctttcagcgctgaggtccaggagcgcctggcccaggcacgggaggccctggctctggaggagaatgccacctcccagaaggtgctggatatctttgaacagcggctggagcaggttgagagtggcctccatcgggccctgcggctacagcgcttcttccagcaggcacatgaatgggtggatgagggctttgctcggctggcaggagctgggccgggtcgggaggctgtgctggctgcactggccctgcggcgggccccagagcccagtgccggcaccttccaggagatgcgggccctggccctggacctgggcagcccagcagccctgcgagaatggggccgctgccaggcccgctgccaagagctagagaggaggatccagcaacacgtgggagaggaggcgagcccacggggctaccgacgacggcgggcagacggtgccagcagtggaggggcccagtgggggccccgcagcccctcgcccagcctcagctccttgctgctccccagcagccctgggccacggccagccccatcccattgctccctggccccatgtggagaggactatgaggaagagggccctgagctggctccagaagcagagggcaggcccccaagagctgtgctgatccgaggcctggaggtcaccagcactgaggtggtagacaggacgtgctcaccacgggaacacgtgctgctgggccgggctagggggccagacggaccctggggagtaggcaccccccggatggagcgcaagcgaagcatcagtgcccagcagcggctggtgtctgagctgattgcctgtgaacaagattacgtggccaccttgagtgagccagtgccaccccctgggcctgagctgacgcctgaacttcggggcacctgggctgctgccctgagtgcccgggaaaggcttcgcagcttccaccggacacactttctgcgggagcttcagggctgcgccacccaccccctacgcattggggcctgcttccttcgccacggggaccagttcagcctttatgcacagtacgtgaagcaccgacacaaactggagaatggtctggctgcgctcagtccctcaagcaagggctccatggaggctggcccttacctgccccgagccctgcagcagcctctggaacagctgactcggtatgggcggctcctggaggagctcctgagggaagctgggcctgagctcagttctgagtgccgggcccttggggctgctgtacagctgctccgggaacaagaggcccgtggcagagacctgctggccgtggaggcggtgcgtggctgtgagatagatctgaaggagcagggacagctcttgcatcgagaccccttcactgtcatctgtggccgaaagaagtgccttcgccatgtctttctcttcgagcatctcctcctgttcagcaagctcaagggccctgaaggggggtcagagatgtttgtttacaagcaggcctttaagactgctgatatggggctgacagaaaacatcggggacagcggactctgctttgagttgtggtttcggcggcggcgtgcacgagaggcatacactctgcaggcaacctcaccagagatcaaactcaagtggacaagttctattgcccagctgctgtggagacaggcagcccacaacaaggagctccgagtgcagcagatggtgtccatgggcattgggaataaacccttcctggacatcaaagcccttggggagcggacgctgagtgccctgctcactggaagagccccagaaacacttgactcttctggagatgtgtccccaggaccaagaaacagccccagcctgcaacccccccaccctgggagcagcactcccaccctggccagtcgagggatcttagggctatcccgacagagtcatgctcgagccctgagtgaccccaccacgcctctgtgacctggagaagatccagaacttgcgtgcagcttctcctctcagcacactttgggctgggatggcagtggggcataatggagccctgggcgatcgctgaatttcttccctctgcttcctggacacagaggaggtctaacgaccagagtattgccctgccaccactatctctagtctccctagcttggtgccttctcctgcaggagtcagagcagccacattgcttgccttcataccctggaggtggggaagttatccctcttccggtgctttcccatcctgggccactgtatccaggacatcactcccatgccagccctccctggcagcccatgttctcctcttttctcaccccctgactttccctgagaagaatcatctctgccaggtcaactggagtccctggtgactccattctgaggtgtcacaagcaatgaagctatgcaaacaataggagggtgtgacaggggaaccgtagactttatatatgtaattactgttattataatactattgttatattaaatgtatttactcacactttgcctctaaggagctagagtagtcctctggattaaggtgataaataacttgagcactttccctcaaccagcccttaactagaacacagaaaataaaaccaagactggaaggtcccctctacccctcccaggcccagagctagctgactgtgtatgagcctgggagaatgtgtctcctccacagtggctcccagaggttccacacactctctgaagctccttctcccacactgcacctactccttgaggctgaactggtcacagacaaactgggatccagcacagtccagcagttctcaaaatgaggtcctcaggccacagtgcgtgagaacttgcttggctgtttgttaaatgctaattcttgggccccatcagagctactgcatcgaaacctgggggtaaaacccaatattctgcatttcttatcaaactctttgggtgataactaagtgtctgaagaggtgactatttcctgacagaaggacccaaagagggaagcaggacataggtaggcagacagacacagggccctgtgcctcaagacacctgtttattggggacacgactctgcaatagggatgacaggaatcgtaccaaaaatagcgacgtctacagggcccctgatggggctagaagggtacagtgccccccaccctcaccccttgtacaaaaataaactctcacgcctatggaccagcaaaaaa

SEQ ID NO: 376884 - DNA, 5150 bp, Homo sapiens
actgcccccagaactgccctctggacctccagggcttcccagccctccacttcctgaggaggcgctgggtacccggagtcctggggatgggcacaatgcccctgtggaaggacctgagggcgagtatgtggagctgttagaggtgacgctgcccgtgagggggagcccaacagatgctgaaggctccccaggcctctccagagtccggacggtacccacccgcaagggcgctggagggaagggccgccaccggagacaccgggcgtggatgcaccagaagggcctggggcctcggggccaggatggagcacgcccacccggcgaggggagcagcaccggagcctcccctgagtctcccccaggagctgaggctgtcccagaggcagcagtcttggaggtgtctgagcccccagcagaggctgtgggagaagcctccggatcttgccccctgaggccaggggagcttagaggaggaggaggaggaggccagggggctgaaggaccacctggtacccctcggagaacaggcaaaggaaacagaagaaagaagcgagctgcaggtcgaggggctcttagccgaggaggggacagtgccccactgagccctggggacaaggaagatgccagccaccaagaagcccttggcaatctgccctcaccaagtgagcacaagcttccagaatgccacctggttaaggaggaatatgaaggctcagggaagccagaatctgagccaaaagagctcaaaacagcaggcgagaaagagcctcagctctctgaagcctgtgggcctacagaagagggggccggagagagagagctggaggggccaggcctgctgtgtatggcaggacacacaggcccagaaggccccctgtctgacactccaacacctccgctggagactgtgcaggaaggaaaaggggacaacattccagaagaggcccttgcagtctccgtctctgatcaccctgatgtagcttgggacttgatggcatctggattcctcatcctgacgggaggggtggaccagagtgggcgagctctgctgaccattaccccaccgtgccctcctgaggagcccccaccctcccgagacacgctgaacacaactcttcattacctccactcactgctcaggcctgatctacagacactggggctgtccgtcctgctggaccttcgtcaggcacctccactgcctccagcactcattcctgccttgagccaacttcaggactcaggagatcctccccttgttcagcggctgctgattctcattcatgatgaccttccaactgaactctgtggatttcagggtgctgaggtgctgtcagagaatgatctgaaaagagtggccaagccagaggagctgcagtgggagttaggaggtcacagggacccctctcccagtcactgggtagagatacaccaggaagtggtaaggctatgtcgcctgtgccaaggtgtgctgggctcggtacggcaggccattgaggagctggagggagcagcagagccagaggaagaggaggcagtgggaatgcccaagccactgcagaaggtgctggcagatccccggctgacggcactgcagagggatgggggggccatcctgatgaggctgcgctccactcccagcagcaagctggagggccaaggcccagctacactgtatcaggaagtggacgaggccattcaccagcttgtgcgcctctccaacctgcacgtgcagcagcaagagcagcggcagtgcctgcggcgactccagcaggtgttgcagtggctctcgggcccaggggaggagcagctggcaagctttgctatgcctggggacaccttgtctgccctgcaggagacagagctgcgattccgtgctttcagcgctgaggtccaggagcgcctggcccaggcacgggaggccctggctctggaggagaatgccacctcccagaaggtgctggatatctttgaacagcggctggagcaggttgagagtggcctccatcgggccctgcggctacagcgcttcttccagcaggcacatgaatgggtggatgagggctttgctcggctggcaggagctgggccgggtcgggaggctgtgctggctgcactggccctgcggcgggccccagagcccagtgccggcaccttccaggagatgcgggccctggccctggacctgggcagcccagcagccctgcgagaatggggccgctgccaggcccgctgccaagagctagagaggaggatccagcaacacgtgggagaggaggcgagcccacggggctaccgacgacggcgggcagacggtgccagcagtggaggggcccagtgggggccccgcagcccctcgcccagcctcagctccttgctgctccccagcagccctgggccacggccagccccatcccattgctccctggccccatgtggagaggactatgaggaagagggccctgagctggctccagaagcagagggcaggcccccaagagctgtgctgatccgaggcctggaggtcaccagcactgaggtggtagacaggacgtgctcaccacgggaacacgtgctgctgggccgggctagggggccagacggaccctggggagtaggcaccccccggatggagcgcaagcgaagcatcagtgcccagcagcggctggtgtctgagctgattgcctgtgaacaagattacgtggccaccttgagtgagccagtgccaccccctgggcctgagctgacgcctgaacttcggggcacctgggctgctgccctgagtgcccgggaaaggcttcgcagcttccaccggacacactttctgcgggagcttcagggctgcgccacccaccccctacgcattggggcctgcttccttcgccacggggaccagttcagcctttatgcacagtacgtgaagcaccgacacaaactggagaatggtctggctgcgctcagtccctcaagcaagggctccatggaggctggcccttacctgccccgagccctgcagcagcctctggaacagctgactcggtatgggcggctcctggaggagctcctgagggaagctgggcctgagctcagttctgagtgccgggcccttggggctgctgtacagctgctccgggaacaagaggcccgtggcagagacctgctggccgtggaggcggtgcgtggctgtgagatagatctgaaggagcagggacagctcttgcatcgagaccccttcactgtcatctgtggccgaaagaagtgccttcgccatgtctttctcttcgagcatctcctcctgttcagcaagctcaagggccctgaaggggggtcagagatgtttgtttacaagcaggcctttaagttgtggtttcggcggcggcgtgcacgagaggcatacactctgcaggcaacctcaccagagatcaaactcaagtggacaagttctattgcccagctgctgtggagacaggcagcccacaacaaggagctccgagtgcagcagatggtgtccatgggcattgggaataaacccttcctggacatcaaagcccttggggagcggacgctgagtgccctgctcactggaagagccgcccgcacccgggcctccgtggccgtgtcatcctttgagcatgccggcccctcccttcccggcctttcgccgggagcctgctccctgcctgcccgcgtcgaggaggaggcctgggatctggacgtcaagcaaatttccctggccccagaaacacttgactcttctggagatgtgtccccaggaccaagaaacagccccagcctgcaacccccccaccctgggagcagcactcccaccctggccagtcgagggatcttagggctatcccgacagagtcatgctcgagccctgagtgaccccaccacgcctctgtgacctggagaagatccagaacttgcgtgcagcttctcctctcagcacactttgggctgggatggcagtggggcataatggagccctgggcgatcgctgaatttcttccctctgcttcctggacacagaggaggtctaacgaccagagtattgccctgccaccactatctctagtctccctagcttggtgccttctcctgcaggagtcagagcagccacattgcttgccttcataccctggaggtggggaagttatccctcttccggtgctttcccatcctgggccactgtatccaggacatcactcccatgccagccctccctggcagcccatgttctcctcttttctcaccccctgactttccctgagaagaatcatctctgccaggtcaactggagtccctggtgactccattctgaggtgtcacaagcaatgaagctatgcaaacaataggagggtgtgacaggggaaccgtagactttatatatgtaattactgttattataatactattgttatattaaatgtatttactcacactttgcctctaaggagctagagtagtcctctggattaaggtgataaataacttgagcactttccctcaaccagcccttaactagaacacagaaaataaaaccaagactggaaggtcccctctacccctcccaggcccagagctagctgactgtgtatgagcctgggagaatgtgtctcctccacagtggctcccagaggttccacacactctctgaagctccttctcccacactgcacctactccttgaggctgaactggtcacagacaaactgggatccagcacagtccagcagttctcaaaatgaggtcctcaggccacagtgcgtgagaacttgcttggctgtttgttaaatgctaattcttgggccccatcagagctactgcatcgaaacctgggggtaaaacccaatattctgcatttcttatcaaactctttgggtgataactaagtgtctgaagaggtgactatttcctgacagaaggacccaaagagggaagcaggacataggtaggcagacagacacagggccctgtgcctcaagacacctgtttattggggacacgactctgcaatagggatgacaggaatcgtaccaaaaatagcgacgtctacagggcccctgatggggctagaagggtacagtgccccccaccctcaccccttgtacaaaaataaactctcacgcctatggaccagcaaaaaa

SEQ ID NO: 376885 - DNA, 5197 bp, Homo sapiens
actgcccccagaactgccctctggacctccagggcttcccagccctccacttcctgaggaggcgctgggtacccggagtcctggggatgggcacaatgcccctgtggaaggacctgagggcgagtatgtggagctgttagaggtgacgctgcccgtgagggggagcccaacagatgctgaaggctccccaggcctctccagagtccggacggtacccacccgcaagggcgctggagggaagggccgccaccggagacaccgggcgtggatgcaccagaagggcctggggcctcggggccaggatggagcacgcccacccggcgaggggagcagcaccggagcctcccctgagtctcccccaggagctgaggctgtcccagaggcagcagtcttggaggtgtctgagcccccagcagaggctgtgggagaagcctccggatcttgccccctgaggccaggggagcttagaggaggaggaggaggaggccagggggctgaaggaccacctggtacccctcggagaacaggcaaaggaaacagaagaaagaagcgagctgcaggtcgaggggctcttagccgaggaggggacagtgccccactgagccctggggacaaggaagatgccagccaccaagaagcccttggcaatctgccctcaccaagtgagcacaagcttccagaatgccacctggttaaggaggaatatgaaggctcagggaagccagaatctgagccaaaagagctcaaaacagcaggcgagaaagagcctcagctctctgaagcctgtgggcctacagaagagggggccggagagagagagctggaggggccaggcctgctgtgtatggcaggacacacaggcccagaaggccccctgtctgacactccaacacctccgctggagactgtgcaggaaggaaaaggggacaacattccagaagaggcccttgcagtctccgtctctgatcaccctgatgtagcttgggacttgatggcatctggattcctcatcctgacgggaggggtggaccagagtgggcgagctctgctgaccattaccccaccgtgccctcctgaggagcccccaccctcccgagacacgctgaacacaactcttcattacctccactcactgctcaggcctgatctacagacactggggctgtccgtcctgctggaccttcgtcaggcacctccactgcctccagcactcattcctgccttgagccaacttcaggactcaggagatcctccccttgttcagcggctgctgattctcattcatgatgaccttccaactgaactctgtggatttcagggtgctgaggtgctgtcagagaatgatctgaaaagagtggccaagccagaggagctgcagtgggagttaggaggtcacagggacccctctcccagtcactgggtagagatacaccaggaagtggtaaggctatgtcgcctgtgccaaggtgtgctgggctcggtacggcaggccattgaggagctggagggagcagcagagccagaggaagaggaggcagtgggaatgcccaagccactgcagaaggtgctggcagatccccggctgacggcactgcagagggatgggggggccatcctgatgaggctgcgctccactcccagcagcaagctggagggccaaggcccagctacactgtatcaggaagtggacgaggccattcaccagcttgtgcgcctctccaacctgcacgtgcagcagcaagagcagcggcagtgcctgcggcgactccagcaggtgttgcagtggctctcgggcccaggggaggagcagctggcaagctttgctatgcctggggacaccttgtctgccctgcaggagacagagctgcgattccgtgctttcagcgctgaggtccaggagcgcctggcccaggcacgggaggccctggctctggaggagaatgccacctcccagaaggtgctggatatctttgaacagcggctggagcaggttgagagtggcctccatcgggccctgcggctacagcgcttcttccagcaggcacatgaatgggtggatgagggctttgctcggctggcaggagctgggccgggtcgggaggctgtgctggctgcactggccctgcggcgggccccagagcccagtgccggcaccttccaggagatgcgggccctggccctggacctgggcagcccagcagccctgcgagaatggggccgctgccaggcccgctgccaagagctagagaggaggatccagcaacacgtgggagaggaggcgagcccacggggctaccgacgacggcgggcagacggtgccagcagtggaggggcccagtgggggccccgcagcccctcgcccagcctcagctccttgctgctccccagcagccctgggccacggccagccccatcccattgctccctggccccatgtggagaggactatgaggaagagggccctgagctggctccagaagcagagggcaggcccccaagagctgtgctgatccgaggcctggaggtcaccagcactgaggtggtagacaggacgtgctcaccacgggaacacgtgctgctgggccgggctagggggccagacggaccctggggagtaggcaccccccggatggagcgcaagcgaagcatcagtgcccagcagcggctggtgtctgagctgattgcctgtgaacaagattacgtggccaccttgagtgagccagtgccaccccctgggcctgagctgacgcctgaacttcggggcacctgggctgctgccctgagtgcccgggaaaggcttcgcagcttccaccggacacactttctgcgggagcttcagggctgcgccacccaccccctacgcattggggcctgcttccttcgccacggggaccagttcagcctttatgcacagtacgtgaagcaccgacacaaactggagaatggtctggctgcgctcagtccctcaagcaagggctccatggaggctggcccttacctgccccgagccctgcagcagcctctggaacagctgactcggtatgggcggctcctggaggagctcctgagggaagctgggcctgagctcagttctgagtgccgggcccttggggctgctgtacagctgctccgggaacaagaggcccgtggcagagacctgctggccgtggaggcggtgcgtggctgtgagatagatctgaaggagcagggacagctcttgcatcgagaccccttcactgtcatctgtggccgaaagaagtgccttcgccatgtctttctcttcgagcatctcctcctgttcagcaagctcaagggccctgaaggggggtcagagatgtttgtttacaagcaggcctttaagactgctgatatggggctgacagaaaacatcggggacagcggactctgctttgagttgtggtttcggcggcggcgtgcacgagaggcatacactctgcaggcaacctcaccagagatcaaactcaagtggacaagttctattgcccagctgctgtggagacaggcagcccacaacaaggagctccgagtgcagcagatggtgtccatgggcattgggaataaacccttcctggacatcaaagcccttggggagcggacgctgagtgccctgctcactggaagagccccagaaacacttgactcttctggagatgtgtccccaggaccaagaaacagccccagcctgcaacccccccaccctgggagcagcactcccaccctggccagtcgagggatcttagggctatcccgacagagtcatgctcgagccctgagtgaccccaccacgcctctgtgacctgggtgagtcagcatccccaatttctaccacatccagcactcctaccatcttgcatgtaccttccttcctgtccccggctacttgggagtcagcttcttccctctcccaactcatctccctcttctctcctggcttctagagaagatccagaacttgcgtgcagcttctcctctcagcacactttgggctgggatggcagtggggcataatggagccctgggcgatcgctgaatttcttccctctgcttcctggacacagaggaggtctaacgaccagagtattgccctgccaccactatctctagtctccctagcttggtgccttctcctgcaggagtcagagcagccacattgcttgccttcataccctggaggtggggaagttatccctcttccggtgctttcccatcctgggccactgtatccaggacatcactcccatgccagccctccctggcagcccatgttctcctcttttctcaccccctgactttccctgagaagaatcatctctgccaggtcaactggagtccctggtgactccattctgaggtgtcacaagcaatgaagctatgcaaacaataggagggtgtgacaggggaaccgtagactttatatatgtaattactgttattataatactattgttatattaaatgtatttactcacactttgcctctaaggagctagagtagtcctctggattaaggtgataaataacttgagcactttccctcaaccagcccttaactagaacacagaaaataaaaccaagactggaaggtcccctctacccctcccaggcccagagctagctgactgtgtatgagcctgggagaatgtgtctcctccacagtggctcccagaggttccacacactctctgaagctccttctcccacactgcacctactccttgaggctgaactggtcacagacaaactgggatccagcacagtccagcagttctcaaaatgaggtcctcaggccacagtgcgtgagaacttgcttggctgtttgttaaatgctaattcttgggccccatcagagctactgcatcgaaacctgggggtaaaacccaatattctgcatttcttatcaaactctttgggtgataactaagtgtctgaagaggtgactatttcctgacagaaggacccaaagagggaagcaggacataggtaggcagacagacacagggccctgtgcctcaagacacctgtttattggggacacgactctgcaatagggatgacaggaatcgtaccaaaaatagcgacgtctacagggcccctgatggggctagaagggtacagtgccccccaccctcaccccttgtacaaaaataaactctcacgcctatggaccagcaaaaaa

SEQ ID NO: 376886 - DNA, 3724 bp, Homo sapiens
  misc_feature (3651)..(3651): n is a, c, g, or t
  misc_feature (3698)..(3698): n is a, c, g, or t
  misc_feature (3704)..(3704): n is a, c, g, or t
actgcccccagaactgccctctggacctccagggcttcccagccctccacttcctgaggaggcgctgggtacccggagtcctggggatgggcacaatgcccctgtggaaggacctgagggcgagtatgtggagctgttagaggtgacgctgcccgtgagggggagcccaacagatgctgaaggctccccaggcctctccagagtccggacggtacccacccgcaagggcgctggagggaagggccgccaccggagacaccgggcgtggatgcaccagaagggcctggggcctcggggccaggatggagcacgcccacccggcgaggggagcagcaccggagcctcccctgagtctcccccaggagctgaggctgtcccagaggcagcagtcttggaggtgtctgagcccccagcagaggctgtgggagaagcctccggatcttgccccctgaggccaggggagcttagaggaggaggaggaggaggccagggggctgaaggaccacctggtacccctcggagaacaggcaaaggaaacagaagaaagaagcgagctgcaggtcgaggggctcttagccgaggaggggacagtgccccactgagccctggggacaaggaagatgccagccaccaagaagcccttggcaatctgccctcaccaagtgagcacaagcttccagaatgccacctggttaaggaggaatatgaaggctcagggaagccagaatctgagccaaaagagctcaaaacagcaggcgagaaagagcctcagctctctgaagcctgtgggcctacagaagagggggccggagagagagagctggaggggccaggcctgctgtgtatggcaggacacacaggcccagaaggccccctgtctgacactccaacacctccgctggagactgtgcaggaaggaaaaggggacaacattccagaagaggcccttgcagtctccgtctctgatcaccctgatgtagcttgggacttgatggcatctggattcctcatcctgacgggaggggtggaccagagtgggcgagctctgctgaccattaccccaccgtgccctcctgaggagcccccaccctcccgagacacgctgaacacaactcttcattacctccactcactgctcaggcctgatctacagacactggggctgtccgtcctgctggaccttcgtcaggcacctccactgcctccagcactcattcctgccttgagccaacttcaggactcaggagatcctccccttgttcagcggctgctgattctcattcatgatgaccttccaactgaactctgtggatttcagggtgctgaggtgctgtcagagaatgatctgaaaagagtggccaagccagaggagctgcagtgggagttaggaggtcacagggacccctctcccagtcactgggtagagatacaccaggaagtggtaaggctatgtcgcctgtgccaaggtgtgctgggctcggtacggcaggccattgaggagctggagggagcagcagagccagaggaagaggaggcagtgggaatgcccaagccactgcagaaggtgctggcagatccccggctgacggcactgcagagggatgggggggccatcctgatgaggctgcgctccactcccagcagcaagctggagggccaaggcccagctacactgtatcaggaagtggacgaggccattcaccagcttgtgcgcctctccaacctgcacgtgcagcagcaagagcagcggcagtgcctgcggcgactccagcaggtgttgcagtggctctcgggcccaggggaggagcagctggcaagctttgctatgcctggggacaccttgtctgccctgcaggagacagagctgcgattccgtgctttcagcgctgaggtccaggagcgcctggcccaggcacgggaggccctggctctggaggagaatgccacctcccagaaggtgctggatatctttgaacagcggctggagcaggttgagagtggcctccatcgggccctgcggctacagcgcttcttccagcaggcacatgaatgggtggatgagggctttgctcggctggcaggagctgggccgggtcgggaggctgtgctggctgcactggccctgcggcgggccccagagcccagtgccggcaccttccaggagatgcgggccctggccctggacctgggcagcccagcagccctgcgagaatggggccgctgccaggcccgctgccaagagctagagaggaggatccagcaacacgtgggagaggaggcgagcccacggggctaccgacgacggcgggcagacggtgccagcagtggaggggcccagtgggggccccgcagcccctcgcccagcctcagctccttgctgctccccagcagccctgggccacggccagccccatcccattgctccctggccccatgtggagaggactatgaggaagagggccctgagctggctccagaagcagagggcaggcccccaagagctgtgctgatccgaggcctggaggtcaccagcactgaggtggtagacaggacgtgctcaccacgggaacacgtgctgctgggccgggctagggggccagacggaccctggggagtaggcaccccccggatggagcgcaagcgaagcatcagtgcccagcagcggctggtgtctgagctgattgcctgtgaacaagattacgtggccaccttgagtgagccagtgccaccccctgggcctgagctgacgcctgaacttcggggcacctgggctgctgccctgagtgcccgggaaaggcttcgcagcttccaccggacacactttctgcgggagcttcagggctgcgccacccaccccctacgcattggggcctgcttccttcgccacggggaccagttcagcctttatgcacagtacgtgaagcaccgacacaaactggagaatggtctggctgcgctcagtccctcaagcaagggctccatggaggctggcccttacctgccccgagccctgcagcagcctctggaacagctgactcggtatgggcggctcctggaggagctcctgagggaagctgggcctgagctcagttctgagtgccgggcccttggggctgctgtacagctgctccgggaacaagaggcccgtggcagagacctgctggccgtggaggcggtgcgtggctgtgagatagatctgaaggagcagggacagctcttgcatcgagaccccttcactgtcatctgtggccgaaagaagtgccttcgccatgtctttctcttcgagcatctcctcctgttcagcaagctcaagggccctgaaggggggtcagagatgtttgtttacaagcaggcctttaagactgctgatatggggctgacagaaaacatcggggacagcggactctgctttgagttgtggtttcggcggcggcgtgcacgagaggcatacactctgcaggcaacctcaccagagatcaaactcaagtggacaagttctattgcccagctgctgtggagacaggcagcccacaacaaggagctccgagtgcagcagatggtgtccatgggcattgggaataaacccttcctggacatcaaagcccttggggagcggacgctgagtgccctgctcactggaagagctggttnaacttggaaagaagccccaagaaacactttggacttctttctggganaatggnggtcccccagggacccaaag

SEQ ID NO: 376887 - DNA, 465 bp, Homo sapiens
actcccaccctggccagtcgagggatcttagggctatcccgacaggtaagttcctacaacgaggctgggaacaatgtgatctctttggctgctttctggatgggcttttctgatcattcaaccccaggggggttgggggaaaactgtgaacttgtgctcccagctgaggctacagtctggatttattatcttgtctacctttctcctctccccgggacctggctaagaggcatcaaggtcataggttaaaaggaatcttaaataaggagtatagtgctggggtggatggaaaggggagaatgccaatggcctggcttggacttgggttaaaatggcaaaactcaggccaggtaaggtggctcatacctgtaatcccagactttcagaggctgaggtgggaggatcacttgagcccaggaattcaagaccagcctgggcaacatagtgagactccatctctacaaa

SEQ ID NO: 376888 - DNA, 123 bp, Homo sapiens
ccaccctcccgagacacgctgaacacaactcttcattacctccactcactgctcaggtaaccgaggcccagtcctggcaccctggacactaacctcctgattcatgaggaccctcacctcctt

SEQ ID NO: 376889 - DNA, 267 bp, Homo sapiens
tgctgtacagctgctccgggaacaagaggcccgtggcagagacctgctggccgtggaggcggtgcgtggctgtgaggtgaggccctagctccagtcactgctgctcaaactgcccagccctggcctcagaagccgtgtaggttggtgacaggagaaccaggctccaggtcagagggctccaggctctaatttctaaccagctgggtggccttgattgagtcactgaacttcactggacttcactttcctcatttgtaaataaagaag

SEQ ID NO: 376890 - DNA, 6078 bp, Homo sapiens
actgcccccagaactgccctctggacctccagggcttcccagccctccacttcctgaggaggcgctgggtacccggagtcctggggatgggcacaatgcccctgtggaaggacctgagggcgagtatgtggagctgttagaggtgacgctgcccgtgagggggagcccaacagatgctgaaggctccccaggcctctccagagtccggacggtacccacccgcaagggcgctggagggaagggccgccaccggagacaccgggcgtggatgcaccagaagggcctggggcctcggggccaggatggagcacgcccacccggcgaggggagcagcaccggagcctcccctgagtctcccccaggagctgaggctgtcccagaggcagcagtcttggaggtgtctgagcccccagcagaggctgtgggagaagcctccggatcttgccccctgaggccaggggagcttagaggaggaggaggaggaggccagggggctgaaggaccacctggtacccctcggagaacaggcaaaggaaacagaagaaagaagcgagctgcaggtcgaggggctcttagccgaggaggggacagtgccccactgagccctggggacaaggaagatgccagccaccaagaagcccttggcaatctgccctcaccaagtgagcacgcccacttcatcaaggaagttgaaatggaaaaagattatgtgttgtcaattcaggtgaaagtcaagaaacatcagtggaaacaaaaatcttccttttattgaaaccattctacactatggaacatttttataaatagtaccagcggcattgcatagctttattttgaagcaagaaagagacttcaaagatcagcttattcaaccctctataaaaggatttatagattccttttatttaatagggtgattttctcatgagttttcaccatgtttaaaagacactgtgccccactctcatcccaaggtctatggtcaacttgactcaatgctcataactttcctcgctgattcctgcttatcctgctcctccaagcacaactgcatttcccaaaggtagatccagtaagcaatactctcaaagcacccaccctatgcacaccagtttccctcaagggactcaaaaggaatcgaggtagacccttctcagaggctgtttaactacagacacatcaggatatgtactaatacccaaaaccaaaaccaccaccaatgactgcaatagattcactgtctagacccaaggtccaggcagtttcccttttttgcatttccccaacatataaagataatttccaacatatcagatgcacattcaccagggttatttctggaaggtgaaggggtcaggtgtagaagaggtggcaagaatgacaagtctgtggaaaactgttggccttgagaccacagtgaactggtggaaggggacttgctaagtgtggccacaaggtggcagtcacctcctgaaaccccgtgtgaaacgtcagcggggttgagaaaggccacgtctccaagtttccaggagagccaaaccaggactcaggaaaaccggccagctgatttgtatgggagattgatttgtaaaagaacaacaacaacatatggcagcaaggaaatgcaaagcaaacatctacaaatatttgaatccacctgtccctcacctaccaacttccccctctaccactcataaagtggtaggactcctaatgccccgcttccttccacctgagaaccaaccagcaccctgatatttcaaagccagacctaaagaaccatggttgccaataacctcaatgccaaaccaaacaatcctaatcacatttttacttttcaaatccagtctcagagcagagctgtagattaagggacaaaaagtcattgtggaatcttttcaaatagctcttgtaaaagcatcagttgggaaagagtttatgagttcctctttgtcctctcctctggagaaaagacagaacatgcaagaacactagatacaccaagctatgggtgttgaaatagactagctggtgacctggatttgcaaataccctagggacatgaaaacattttttctttttctttttcttttttgtaacctccacccagaatttcaggaaaggtggggccacatgcccaggatatatggtattctactgcttgctttcttatcaccagaatactagtcaatctgatttcttagttccatgtcttttcttccaaggaggtagggcatggggttgggggacactttccaccttccttgcatctcactgtccactcttaaatttttattaagaaacctctgaaagattcaaaattcagttcagtttcaataatcccaaagaagttgggataatttgttttcacttgcttcaaacttgccacggctgcaggaggagtctcaggacctcagaggaatggggcagatgtgtgaagtctgggagtctgcctcccacccagatgccaggagctgcatactcagctctgcctcacttccctgatggtctgctttcatccaggttaccatgacagagagggtctatcctctaaagaaagctgagttacaggctggcccctggggttgttcctgtagcctctctttgaccacattcctgaagatgtttagctgaatgcctcctcaaacctttgcttcttccataacccaatcctacacatatgtgataaagctttcttcaacaatactgggtcatttggacactaccagtccagatgagaactcacagaccaaatgaaaactttcaaaagcaagcagggaaagtaactcctatatgctttaagatgatgtattggtgtagattcaggtccaatttgaaaaaatgtctctggttctttctaattgtatccactctggatttgtttatgccagttctacattcatcaagccttgagaaacaggtggaaagaagaaaaatataaaattaagaagaagctgatggatcattggagattcaaaacaagccttctaccggtggcaccacactgaaaggcagagacaaggcaggagcggccatgggagaggaagcagcattggcttctcacgttctggcctccagcctcccaccagagcttctgccattcacccacttaacttgaggagaaactaaggcaccaaggcctgtcactgcaccgaaaaccagaagcagaaggactttctttctttgctcaaccagttctgcctggatctgacttttgcgtcaccagtagtcacaagcctgatttgtcatctccagcattctgtttatttttttaaggtcaatctttgcctgaaacatgacttcattgcacctgcagcacttcattgtccaaatgtccttggcaaacctcacagtctttggacagtgttgcattttctccaaaggggaaatcctctctccttcctcaagcttaataaggctcttgcagtgcatccaaataacacagctcttgttcctcagacacactcagccccctctgataacttcataaaacagctccttattgtctgggccatgaagccaggctaatgctaaagttccagttcaaaaacatttaactctattatccttatgaggccagctctcctgggtactggcactcactcactggcaccatggattcaggtcaggtggtgcaaacatcttccctgagaagcaagccatacacccaacaggtctagaacacctaggtcacaagaaagggtttcagtccagatgcactgtcagtaagtgaacacaaggacaagaatgcatgaactgttattttcttcccatcactggtttagcagcccctagggagaccctgtgttgctctttaatattctgacatggagcactaatatgctcaacactgcctccaacaggcaaatgttggaaatacactttcagagctggatgggactcaagatcatctaatataatcctctcattttatttcctctcaaggaaaccaagggcaagaaagtttaggcaatttgctcacattcacacaggcaattagtaacagagctgagttcgggtctggtataggctttttaatttgattctccacaaatgaacactaagataaatagcatttattgcatacccactatttaccagatactgtgcaaagggctttacatatattactttactaaatcctcaccataaactttaagtcaggtttaaccattttatagaagagggaagggagggccaggaaggttaagtaacatgctcaaagtcacacagctactaaatagagccataatctgaacctttgtctaattttgaagcccttgatttttccacttcatgaggctgctctttatatttatttagctgagtgaccaccatcttggattttactaatattcttacaagggggctttgatgccacttcttctgacttttaagaaaaggaaattcttgcattatttttgccatgtactccaggggaccctcaatctcatcatcatggggaataagaaacattctgacatctctttccttttctttctttttaaatttggtagacgagggagagggtccccaacagaatgagagggggaagataagaaccagaacataaacccaataccccccaccccactcttttgggaacatcccaacattagaagagtgggatatccagtcatttttttcaagctggagcaggcagtgtagccaggattgaggaaggagaagccacagaataaacatggcacatgttctcagagcatcaattttactccagaatttgggaagaaaggattatattattagtgtattcaaaccagtatggatagcacaaatgcagatatcctataaattttgaggctaactccagcaggttgtagactgatttaggctacctccttccagactcccaggggtacaaacaccttcacagtcccctgcgggagtacatcagtggaaatatttggggaatgaggctagaaggcaggagatacattcagtttacttatccccctggtttcttttccccactccttacctgccccacatccctagtgggtgggaaggcatcagaagacagttggctacaatatcagctttctctgctactttggggaatttagaaggaaatcagtacttggcaacctggtatttttagctgccaggccaaaactccagacataaaccccttccctttaattgaatgatgtttatatataaaggaatagatctccccaagaaagaaccccagaacactggttccattccagtgtgggggctgcttgggcagcagtgacacctgtgcattagatgcaatagacacttcaattcctgcaaaaatgtcggccaactaagtgctcctttaccaactgcggaggcccagactcacaccatggtcccacagactcaaggtttagaatctatgtgagtctattttggttaacacacaggctcctccttccaatcattcacacacacacacacacacacacacacacacatgcacacacacacatgcatgcacacatacacaggtgcacatgcacaaacacacacatctaatgattccaacctcgaatactccccaggcccatggggatgcccaagtaccctaagcaaatcactgtgacactgagggggtcattaactggggctccgagcagctgaaacccaccctggtggtctctagattgttgttctgagaaatcataaacaccaaatcctccaatccctttgaatttgagtttgtcattttaacctttaacagccttttcaggtaaaaataacaaagaccaatttattgactttgtagctacaatgagcttgaaaaagcgcttacttaaaagaaagactggaaggaagaaaaaaaaaagaaaatggagtacatactcctcagacgatgcacactttaattagctaaaataaaaataaaaatgtacagaggaagggagaggaaaaaccaacttctctgatcctttcatggcactgtagctcaaagactggaatctctgcttgttaaccattgttaactagtatttttagtcctggttgcttttagcctctgtatagttccttttttaaacacattttctatacgttaataaaagatcctgaaag

SEQ ID NO: 376891 - DNA, 3225 bp, Homo sapiens
ggacttatcgggaggacgcactgaggtacacgctggacttcctggtaccagccaagcacctgcttgccaaggtccagcaggaagcctgtgtgagtggccgtgcatcactattctcccagaaggtgctggatatctttgaacagcggctggagcaggttgagagtggcctccatcgggccctgcggctacagcgcttcttccagcaggcacatgaatgggtggatgagggctttgctcggctggcaggagctgggccgggtcgggaggctgtgctggctgcactggccctgcggcgggccccagagcccagtgccggcaccttccaggagatgcgggccctggccctggacctgggcagcccagcagccctgcgagaatggggccgctgccaggcccgctgccaagagctagagaggaggatccagcaacacgtgggagaggaggcgagcccacggggctaccgacgacggcgggcagacggtgccagcagtggaggggcccagtgggggccccgcagcccctcgcccagcctcagctccttgctgctccccagcagccctgggccacggccagccccatcccattgctccctggccccatgtggagaggactatgaggaagagggccctgagctggctccagaagcagagggcaggcccccaagagctgtgctgatccgaggcctggaggtcaccagcactgaggtggtagacaggacgtgctcaccacgggaacacgtgctgctgggccgggctagggggccagacggaccctggggagtaggcaccccccggatggagcgcaagcgaagcatcagtgcccagcagcggctggtgtctgagctgattgcctgtgaacaagattacgtggccaccttgagtgagccagtgccaccccctgggcctgagctgacgcctgaacttcggggcacctgggctgctgccctgagtgcccgggaaaggcttcgcagcttccaccggacacactttctgcgggagcttcagggctgcgccacccaccccctacgcattggggcctgcttccttcgccacggggaccagttcagcctttatgcacagtacgtgaagcaccgacacaaactggagaatggtctggctgcgctcagtccctcaagcaagggctccatggaggctggcccttacctgccccgagccctgcagcagcctctggaacagctgactcggtatgggcggctcctggaggagctcctgagggaagctgggcctgagctcagttctgagtgccgggcccttggggctgctgtacagctgctccgggaacaagaggcccgtggcagagacctgctggccgtggaggcggtgcgtggctgtgagatagatctgaaggagcagggacagctcttgcatcgagaccccttcactgtcatctgtggccgaaagaagtgccttcgccatgtctttctcttcgagcatctcctcctgttcagcaagctcaagggccctgaaggggggtcagagatgtttgtttacaagcaggcctttaagactgctgatatggggctgacagaaaacatcggggacagcggactctgctttgagttgtggtttcggcggcggcgtgcacgagaggcatacactctgcaggcaacctcaccagagatcaaactcaagtggacaagttctattgcccagctgctgtggagacaggcagcccacaacaaggagctccgagtgcagcagatggtgtccatgggcattgggaataaacccttcctggacatcaaagcccttggggagcggacgctgagtgccctgctcactggaagagccccagaaacacttgactcttctggagatgtgtccccaggaccaagaaacagccccagcctgcaacccccccaccctgggagcagcactcccaccctggccagtcgagggatcttagggctatcccgacagagtcatgctcgagccctgagtgaccccaccacgcctctgtgacctggagaagatccagaacttgcgtgcagcttctcctctcagcacactttgggctgggatggcagtggggcataatggagccctgggcgatcgctgaatttcttccctctgcttcctggacacagaggaggtctaacgaccagagtattgccctgccaccactatctctagtctccctagcttggtgccttctcctgcaggagtcagagcagccacattgcttgccttcataccctggaggtggggaagttatccctcttccggtgctttcccatcctgggccactgtatccaggacatcactcccatgccagccctccctggcagcccatgttctcctcttttctcaccccctgactttccctgagaagaatcatctctgccaggtcaactggagtccctggtgactccattctgaggtgtcacaagcaatgaagctatgcaaacaataggagggtgtgacaggggaaccgtagactttatatatgtaattactgttattataatactattgttatattaaatgtatttactcacactttgcctctaaggagctagagtagtcctctggattaaggtgataaataacttgagcactttccctcaaccagcccttaactagaacacagaaaataaaaccaagactggaaggtcccctctacccctcccaggcccagagctagctgactgtgtatgagcctgggagaatgtgtctcctccacagtggctcccagaggttccacacactctctgaagctccttctcccacactgcacctactccttgaggctgaactggtcacagacaaactgggatccagcacagtccagcagttctcaaaatgaggtcctcaggccacagtgcgtgagaacttgcttggctgtttgttaaatgctaattcttgggccccatcagagctactgcatcgaaacctgggggtaaaacccaatattctgcatttcttatcaaactctttgggtgataactaagtgtctgaagaggtgactatttcctgacagaaggacccaaagagggaagcaggacataggtaggcagacagacacagggccctgtgcctcaagacacctgtttattggggacacgactctgcaatagggatgacaggaatcgtaccaaaaatagcgacgtctacagggcccctgatggggctagaagggtacagtgccccccaccctcaccccttgtacaaaaataaactctcacgcctatggaccagcaaaaaa

SEQ ID NO: 376892 - DNA, 2498 bp, Homo sapiens
gacccacgcgtcgcggacgcgtgggtcgacccacgcggtcgcccacgcgtcgcggacgcgtgggcggatggagcgcaagcgaagcatcagtgcccagcagcggctggtgtctgagctgattgcctgtgaacaagattacgtggccaccttgagtgagccagtgccaccccctgggcctgagctgacgcctgaacttcggggcacctgggctgctgccctgagtgcccgggaaaggcttcgcagcttccaccggacacactttctgcgggagcttcagggctgcgccacccaccccctacgcattggggcctgcttccttcgccacggggaccagttcagcctttatgcacagtacgtgaagcaccgacacaaactggagaatggtctggctgcgctcagtccctcaagcaagggctccatggaggctggcccttacctgccccgagccctgcagcagcctctggaacagctgactcggtatgggcggctcctggaggagctcctgagggaagctgggcctgagctcagttctgagtgccgggcccttggggctgctgtacagctgctccgggaacaagaggcccgtggcagagacctgctggccgtggaggcggtgcgtggctgtgagatagatctgaaggagcagggacagctcttgcatcgagaccccttcactgtcatctgtggccgaaagaagtgccttcgccatgtctttctcttcgagcatctcctcctgttcagcaagctcaagggccctgaaggggggtcagagatgtttgtttacaagcaggcctttaagactgctgatatggggctgacagaaaacatcggggacagcggactctgctttgagttgtggtttcggcggcggcgtgcacgagaggcatacactctgcaggcaacctcaccagagatcaaactcaagtggacaagttctattgcccagctgctgtggagacaggcagcccacaacaaggagctccgagtgcagcagatggtgtccatgggcattgggaataaacccttcctggacatcaaagcccttggggagcggacgctgagtgccctgctcactggaagagccccagaaacacttgactcttctggagatgtgtccccaggaccaagaaacagccccagcctgcaacccccccaccctgggagcagcactcccaccctggccagtcgagggatcttagggctatcccgacagagtcatgctcgagccctgagtgaccccaccacgcctctgtgacctggagaagatccagaacttgcgtgcagcttctcctctcagcacactttgggctgggatggcagtggggcataatggagccctgggcgatcgctgaatttcttccctctgcttcctggacacagaggaggtctaacgaccagagtattgccctgccaccactatctctagtctccctagcttggtgccttctcctgcaggagtcagagcagccacattgcttgccttcataccctggaggtggggaagttatccctcttccggtgctttcccatcctgggccactgtatccaggacatcactcccatgccagccctccctggcagcccatgttctcctcttttctcaccccctgactttccctgagaagaatcatctctgccaggtcaactggagtccctggtgactccattctgaggtgtcacaagcaatgaagctatgcaaacaataggagggtgtgacaggggaaccgtagactttatatatgtaattactgttattataatactattgttatattaaatgtatttactcacactttgcctctaaggagctagagtagtcctctggattaaggtgataaataacttgagcactttccctcaaccagcccttaactagaacacagaaaataaaaccaagactggaaggtcccctctacccctcccaggcccagagctagctgactgtgtatgagcctgggagaatgtgtctcctccacagtggctcccagaggttccacacactctctgaagctccttctcccacactgcacctactccttgaggctgaactggtcacagacaaactgggatccagcacagtccagcagttctcaaaatgaggtcctcaggccacagtgcgtgagaacttgcttggctgtttgttaaatgctaattcttgggccccatcagagctactgcatcgaaacctgggggtaaaacccaatattctgcatttcttatcaaactctttgggtgataactaagtgtctgaagaggtgactatttcctgacagaaggacccaaagagggaagcaggacataggtaggcagacagacacagggccctgtgcctcaagacacctgtttattggggacacgactctgcaatagggatgacaggaatcgtaccaaaaatagcgacgtctacagggcccctgatggggctagaagggtacagtgccccccaccctcaccccttgtacaaaaataaactctcacgcctatggaccagcaaaaaa

SEQ ID NO: 376893 - DNA, 5708 bp, Homo sapiens
actgcccccagaactgccctctggacctccagggcttcccagccctccacttcctgaggaggcgctgggtacccggagtcctggggatgggcacaatgcccctgtggaaggacctgagggcgagtatgtggagctgttagaggtgacgctgcccgtgagggggagcccaacagatgctgaaggctccccaggcctctccagagtccggacggtacccacccgcaagggcgctggagggaagggccgccaccggagacaccgggcgtggatgcaccagaagggcctggggcctcggggccaggatggagcacgcccacccggcgaggggagcagcaccggagcctcccctgagtctcccccaggagctgaggctgtcccagaggcagcagtcttggaggtgtctgagcccccagcagaggctgtgggagaagcctccggatcttgccccctgaggccaggggagcttagaggaggaggaggaggaggccagggggctgaaggaccacctggtacccctcggagaacaggcaaaggaaacagaagaaagaagcgagctgcaggtcgaggggctcttagccgaggaggggacagtgccccactgagccctggggacaaggaagatgccagccaccaagaagcccttggcaatctgccctcaccaagtgagcacaagcttccagaatgccacctggttaaggaggaatatgaaggctcagggaagccagaatctgagccaaaagagctcaaaacagcaggcgagaaagagcctcagctctctgaagcctgtgggcctacagaagagggggccggagagagagagctggaggggccaggcctgctgtgtatggcaggacacacaggcccagaaggccccctgtctgacactccaacacctccgctggagactgtgcaggaaggaaaaggggacaacattccagaagaggcccttgcagtctccgtctctgatcaccctgatgtagcttgggacttgatggcatctggattcctcatcctgacgggaggggtggaccagagtgggcgagctctgctgaccattaccccaccgtgccctcctgaggagcccccaccctcccgagacacgctgaacacaactcttcattacctccactcactgctcaggcctgatctacagacactggggctgtccgtcctgctggaccttcgtcaggcacctccactgcctccagcactcattcctgccttgagccaacttcaggactcaggagatcctccccttgttcagcggctgctgattctcattcatgatgaccttccaactgaactctgtggatttcagggtgctgaggtgctgtcagagaatgatctgaaaagagtggccaagccagaggagctgcagtgggagttaggaggtcacagggacccctctcccagtcactgggtagagatacaccaggaagtggtaaggctatgtcgcctgtgccaaggtgtgctgggctcggtacggcaggccattgaggagctggagggagcagcagagccagaggaagaggaggcagtgggaatgcccaagccactgcagaaggtgctggcagatccccggctgacggcactgcagagggatgggggggccatcctgatgaggctgcgctccactcccagcagcaagctggagggccaaggcccagctacactgtatcaggaagtggacgaggccattcaccagcttgtgcgcctctccaacctgcacgtgcagcagcaagagcagcggcagtgcctgcggcgactccagcaggtgttgcagtggctctcgggcccaggggaggagcagctggcaagctttgctatgcctggggacaccttgtctgccctgcaggagacagagctgcgattccgtgctttcagcgctgaggtccaggagcgcctggcccaggcacgggaggccctggctctggaggagaatgccacctcccagaaggtgctggatatctttgaacagcggctggagcaggttgagagtggcctccatcgggccctgcggctacagcgcttcttccagcaggcacatgaatgggtggatgagggctttgctcggctggcaggagctgggccgggtcgggaggctgtgctggctgcactggccctgcggcgggccccagagcccagtgccggcaccttccaggagatgcgggccctggccctggacctgggcagcccagcagccctgcgagaatggggccgctgccaggcccgctgccaagagctagagaggaggatccagcaacacgtgggagaggaggcgagcccacggggctaccgacgacggcgggcagacggtgccagcagtggaggggcccagtgggggccccgcagcccctcgcccagcctcagctccttgctgctccccagcagccctgggccacggccagccccatcccattgctccctggccccatgtggagaggactatgaggaagagggccctgagctggctccagaagcagagggcaggcccccaagagctgtgctgatccgaggcctggaggtcaccagcactgaggtggtagacaggacgtgctcaccacgggaacacgtgctgctgggccgggctagggggccagacggaccctggggagtaggcaccccccggatggagcgcaagcgaagcatcagtgcccagcagcggctggtgtctgagctgattgcctgtgaacaagattacgtggccaccttgagtgagccagtgccaccccctgggcctgagctgacgcctgaacttcggggcacctgggctgctgccctgagtgcccgggaaaggcttcgcagcttccaccggacacactttctgcgggagcttcagggctgcgccacccaccccctacgcattggggcctgcttccttcgccacggggaccagttcagcctttatgcacagtacgtgaagcaccgacacaaactggagaatggtctggctgcgctcagtccctcaagcaagggctccatggaggctggcccttacctgccccgagccctgcagcagcctctggaacagctgactcggtatgggcggctcctggaggagctcctgagggaagctgggcctgagctcagttctgagtgccgggcccttggggctgctgtacagctgctccgggaacaagaggcccgtggcagagacctgctggccgtggaggcggtgcgtggctgtgagatagatctgaaggagcagggacagctcttgcatcgagaccccttcactgtcatctgtggccgaaagaagtgccttcgccatgtctttctcttcgagcatctcctcctgttcagcaagctcaagggccctgaaggggggtcagagatgtttgtttacaagcaggcctttaagactgctgatatggggctgacagaaaacatcggggacagcggactctgctttgagttgtggtttcggcggcggcgtgcacgagaggcatacactctgcaggcaacctcaccagagatcaaactcaagtggacaagttctattgcccagctgctgtggagacaggcagcccacaacaaggagctccgagtgcagcagatggtgtccatgggcattgggaataaacccttcctggacatcaaagcccttggggagcggacgctgagtgccctgctcactggaagagccgcccgcacccgggcctccgtggccgtgtcatcctttgagcatgccggcccctcccttcccggcctttcgccgggagcctgctccctgcctgcccgcgtcgaggaggaggcctgggatctggacgtcaagcaaatttccctgggtgaggcacctctcaaggggtggctcccaacagctcggtcatggtggtgatgttcaggctgcttgctgctgagcaattcctttttctagccaagaagcccagttgccatgacaactatgtacagcttccccaccgctaaaagagccttccatctggttgctagggtgatgcttacaacagcctgttgctaagaagcacttcctctgtgcctctctctctagctcttcttgggtttctatggaaactgcctcagcttcctgttgtaccctcctggttcaccacggcaatccttatagtttcctgtcgcttcttccctggttgctctaatgatgctgctgacaatttcctgcctcttggtagggggttcccttgcaactggatcgctatggtgactcacagcttcctgttgctatggagctttttcttccctgatggagcagcttggttgcttaaggtaatctggagggattctgtactctgctctcaccctagcttccccttcagccccagaaacacttgactcttctggagatgtgtccccaggaccaagaaacagccccagcctgcaacccccccaccctgggagcagcactcccaccctggccagtcgagggatcttagggctatcccgacagagtcatgctcgagccctgagtgaccccaccacgcctctgtgacctggagaagatccagaacttgcgtgcagcttctcctctcagcacactttgggctgggatggcagtggggcataatggagccctgggcgatcgctgaatttcttccctctgcttcctggacacagaggaggtctaacgaccagagtattgccctgccaccactatctctagtctccctagcttggtgccttctcctgcaggagtcagagcagccacattgcttgccttcataccctggaggtggggaagttatccctcttccggtgctttcccatcctgggccactgtatccaggacatcactcccatgccagccctccctggcagcccatgttctcctcttttctcaccccctgactttccctgagaagaatcatctctgccaggtcaactggagtccctggtgactccattctgaggtgtcacaagcaatgaagctatgcaaacaataggagggtgtgacaggggaaccgtagactttatatatgtaattactgttattataatactattgttatattaaatgtatttactcacactttgcctctaaggagctagagtagtcctctggattaaggtgataaataacttgagcactttccctcaaccagcccttaactagaacacagaaaataaaaccaagactggaaggtcccctctacccctcccaggcccagagctagctgactgtgtatgagcctgggagaatgtgtctcctccacagtggctcccagaggttccacacactctctgaagctccttctcccacactgcacctactccttgaggctgaactggtcacagacaaactgggatccagcacagtccagcagttctcaaaatgaggtcctcaggccacagtgcgtgagaacttgcttggctgtttgttaaatgctaattcttgggccccatcagagctactgcatcgaaacctgggggtaaaacccaatattctgcatttcttatcaaactctttgggtgataactaagtgtctgaagaggtgactatttcctgacagaaggacccaaagagggaagcaggacataggtaggcagacagacacagggccctgtgcctcaagacacctgtttattggggacacgactctgcaatagggatgacaggaatcgtaccaaaaatagcgacgtctacagggcccctgatggggctagaagggtacagtgccccccaccctcaccccttgtacaaaaataaactctcacgcctatggaccagcaaaaaa

SEQ ID NO: 376894 - DNA, 5845 bp, Homo sapiens
actgcccccagaactgccctctggacctccagggcttcccagccctccacttcctgaggaggcgctgggtacccggagtcctggggatgggcacaatgcccctgtggaaggacctgagggcgagtatgtggagctgttagaggtgacgctgcccgtgagggggagcccaacagatgctgaaggctccccaggcctctccagagtccggacggtacccacccgcaagggcgctggagggaagggccgccaccggagacaccgggcgtggatgcaccagaagggcctggggcctcggggccaggatggagcacgcccacccggcgaggggagcagcaccggagcctcccctgagtctcccccaggagctgaggctgtcccagaggcagcagtcttggaggtgtctgagcccccagcagaggctgtgggagaagcctccggatcttgccccctgaggccaggggagcttagaggaggaggaggaggaggccagggggctgaaggaccacctggtacccctcggagaacaggcaaaggaaacagaagaaagaagcgagctgcaggtcgaggggctcttagccgaggaggggacagtgccccactgagccctggggacaaggaagatgccagccaccaagaagcccttggcaatctgccctcaccaagtgagcacaagcttccagaatgccacctggttaaggaggaatatgaaggctcagggaagccagaatctgagccaaaagagctcaaaacagcaggcgagaaagagcctcagctctctgaagcctgtgggcctacagaagagggggccggagagagagagctggaggggccaggcctgctgtgtatggcaggacacacaggcccagaaggccccctgtctgacactccaacacctccgctggagactgtgcaggaaggaaaaggggacaacattccagaagaggcccttgcagtctccgtctctgatcaccctgatgtagcttgggacttgatggcatctggattcctcatcctgacgggaggggtggaccagagtgggcgagctctgctgaccattaccccaccgtgccctcctgaggagcccccaccctcccgagacacgctgaacacaactcttcattacctccactcactgctcaggcctgatctacagacactggggctgtccgtcctgctggaccttcgtcaggcacctccactgcctccagcactcattcctgccttgagccaacttcaggactcaggagatcctccccttgttcagcggctgctgattctcattcatgatgaccttccaactgaactctgtggatttcagggtgctgaggtgctgtcagagaatgatctgaaaagagtggccaagccagaggagctgcagtgggagttaggaggtcacagggacccctctcccagtcactgggtagagatacaccaggaagtggtaaggctatgtcgcctgtgccaaggtgtgctgggctcggtacggcaggccattgaggagctggagggagcagcagagccagaggaagaggaggcagtgggaatgcccaagccactgcagaaggtgctggcagatccccggctgacggcactgcagagggatgggggggccatcctgatgaggctgcgctccactcccagcagcaagctggagggccaaggcccagctacactgtatcaggaagtggacgaggccattcaccagcttgtgcgcctctccaacctgcacgtgcagcagcaagagcagcggcagtgcctgcggcgactccagcaggtgttgcagtggctctcgggcccaggggaggagcagctggcaagctttgctatgcctggggacaccttgtctgccctgcaggagacagagctgcgattccgtgctttcagcgctgaggtccaggagcgcctggcccaggcacgggaggccctggctctggaggagaatgccacctcccagaaggtgctggatatctttgaacagcggctggagcaggttgagagtggcctccatcgggccctgcggctacagcgcttcttccagcaggcacatgaatgggtggatgagggctttgctcggctggcaggagctgggccgggtcgggaggctgtgctggctgcactggccctgcggcgggccccagagcccagtgccggcaccttccaggagatgcgggccctggccctggacctgggcagcccagcagccctgcgagaatggggccgctgccaggcccgctgccaagagctagagaggaggatccagcaacacgtgggagaggaggcgagcccacggggctaccgacgacggcgggcagacggtgccagcagtggaggggcccagtgggggccccgcagcccctcgcccagcctcagctccttgctgctccccagcagccctgggccacggccagccccatcccattgctccctggccccatgtggagaggactatgaggaagagggccctgagctggctccagaagcagagggcaggcccccaagagctgtgctgatccgaggcctggaggtcaccagcactgaggtggtagacaggacgtgctcaccacgggaacacgtgctgctgggccgggctagggggccagacggaccctggggagtaggcaccccccggatggagcgcaagcgaagcatcagtgcccagcagcggctggtgtctgagctgattgcctgtgaacaagattacgtggccaccttgagtgagccagtgccaccccctgggcctgagctgacgcctgaacttcggggcacctgggctgctgccctgagtgcccgggaaaggcttcgcagcttccaccggacacactttctgcgggagcttcagggctgcgccacccaccccctacgcattggggcctgcttccttcgccacggggaccagttcagcctttatgcacagtacgtgaagcaccgacacaaactggagaatggtctggctgcgctcagtccctcaagcaagggctccatggaggctggcccttacctgccccgagccctgcagcagcctctggaacagctgactcggtatgggcggctcctggaggagctcctgagggaagctgggcctgagctcagttctgagtgccgggcccttggggctgctgtacagctgctccgggaacaagaggcccgtggcagagacctgctggccgtggaggcggtgcgtggctgtgagatagatctgaaggagcagggacagctcttgcatcgagaccccttcactgtcatctgtggccgaaagaagtgccttcgccatgtctttctcttcgagcatctcctcctgttcagcaagctcaagggccctgaaggggggtcagagatgtttgtttacaagcaggcctttaagactgctgatatggggctgacagaaaacatcggggacagcggactctgctttgagttgtggtttcggcggcggcgtgcacgagaggcatacactctgcaggcaacctcaccagagatcaaactcaagtggacaagttctattgcccagctgctgtggagacaggcagcccacaacaaggagctccgagtgcagcagatggtgtccatgggcattgggaataaacccttcctggacatcaaagcccttggggagcggacgctgagtgccctgctcactggaagagccgcccgcacccgggcctccgtggccgtgtcatcctttgagcatgccggcccctcccttcccggcctttcgccgggagcctgctccctgcctgcccgcgtcgaggaggaggcctgggatctggacgtcaagcaaatttccctgggtgaggcacctctcaaggggtggctcccaacagctcggtcatggtggtgatgttcaggctgcttgctgctgagcaattcctttttctagccaagaagcccagttgccatgacaactatgtacagcttccccaccgctaaaagagccttccatctggttgctagggtgatgcttacaacagcctgttgctaagaagcacttcctctgtgcctctctctctagctcttcttgggtttctatggaaactgcctcagcttcctgttgtaccctcctggttcaccacggcaatccttatagtttcctgtcgcttcttccctggttgctctaatgatgctgctgacaatttcctgcctcttggtagggggttcccttgcaactggatcgctatggtgactcacagcttcctgttgctatggagctttttcttccctgatggagcagcttggttgcttaaggtaatctggagggattctgtactctgctctcaccctagcttccccttcagccccagaaacacttgactcttctggagatgtgtccccaggaccaagaaacagccccagcctgcaacccccccaccctgggagcagcactcccaccctggccagtcgagggatcttagggctatcccgacagagtcatgctcgagccctgagtgaccccaccacgcctctgtgacctgggtgagtcagcatccccaatttctaccacatccagcactcctaccatcttgcatgtaccttccttcctgtccccggctacttgggagtcagcttcttccctctcccaactcatctccctcttctctcctggcttctagagaagatccagaacttgcgtgcagcttctcctctcagcacactttgggctgggatggcagtggggcataatggagccctgggcgatcgctgaatttcttccctctgcttcctggacacagaggaggtctaacgaccagagtattgccctgccaccactatctctagtctccctagcttggtgccttctcctgcaggagtcagagcagccacattgcttgccttcataccctggaggtggggaagttatccctcttccggtgctttcccatcctgggccactgtatccaggacatcactcccatgccagccctccctggcagcccatgttctcctcttttctcaccccctgactttccctgagaagaatcatctctgccaggtcaactggagtccctggtgactccattctgaggtgtcacaagcaatgaagctatgcaaacaataggagggtgtgacaggggaaccgtagactttatatatgtaattactgttattataatactattgttatattaaatgtatttactcacactttgcctctaaggagctagagtagtcctctggattaaggtgataaataacttgagcactttccctcaaccagcccttaactagaacacagaaaataaaaccaagactggaaggtcccctctacccctcccaggcccagagctagctgactgtgtatgagcctgggagaatgtgtctcctccacagtggctcccagaggttccacacactctctgaagctccttctcccacactgcacctactccttgaggctgaactggtcacagacaaactgggatccagcacagtccagcagttctcaaaatgaggtcctcaggccacagtgcgtgagaacttgcttggctgtttgttaaatgctaattcttgggccccatcagagctactgcatcgaaacctgggggtaaaacccaatattctgcatttcttatcaaactctttgggtgataactaagtgtctgaagaggtgactatttcctgacagaaggacccaaagagggaagcaggacataggtaggcagacagacacagggccctgtgcctcaagacacctgtttattggggacacgactctgcaatagggatgacaggaatcgtaccaaaaatagcgacgtctacagggcccctgatggggctagaagggtacagtgccccccaccctcaccccttgtacaaaaataaactctcacgcctatggaccagcaaaaaa

SEQ ID NO: 376895 - DNA, 4852 bp, Homo sapiens
actgcccccagaactgccctctggacctccagggcttcccagccctccacttcctgaggaggcgctgggtacccggagtcctggggatgggcacaatgcccctgtggaaggacctgagggcgagtatgtggagctgttagaggtgacgctgcccgtgagggggagcccaacagatgctgaaggctccccaggcctctccagagtccggacggtacccacccgcaagggcgctggagggaagggccgccaccggagacaccgggcgtggatgcaccagaagggcctggggcctcggggccaggatggagcacgcccacccggcgaggggagcagcaccggagcctcccctgagtctcccccaggagctgaggctgtcccagaggcagcagtcttggaggtgtctgagcccccagcagaggctgtgggagaagcctccggatcttgccccctgaggccaggggagcttagaggaggaggaggaggaggccagggggctgaaggaccacctggtacccctcggagaacaggcaaaggaaacagaagaaagaagcgagctgcaggtcgaggggctcttagccgaggaggggacagtgccccactgagccctggggacaaggaagatgccagccaccaagaagcccttggcaatctgccctcaccaagtgagcacaagcttccagaatgccacctggttaaggaggaatatgaaggctcagggaagccagaatctgagccaaaagagctcaaaacagcaggcgagaaagagcctcagctctctgaagcctgtgggcctacagaagagggggccggagagagagagctggaggggccaggcctgctgtgtatggcaggacacacaggcccagaaggccccctgtctgacactccaacacctccgctggagactgtgcaggaaggaaaaggggacaacattccagaagaggcccttgcagtctccgtctctgatcaccctgatgtagcttgggacttgatggcatctggattcctcatcctgacgggaggggtggaccagagtgggcgagctctgctgaccattaccccaccgtgccctcctgaggagcccccaccctcccgagacacgctgaacacaactcttcattacctccactcactgctcaggcctgatctacagacactggggctgtccgtcctgctggaccttcgtcaggcacctccactgcctccagcactcattcctgccttgagccaacttcaggactcaggagatcctccccttgttcagcggctgctgattctcattcatgatgaccttccaactgaactctgtggatttcagggtgctgaggtgctgtcagagaatgatctgaaaagagtggccaagccagaggagctgcagtgggagttaggaggtcacagggacccctctcccagtcactgggtagagatacaccaggaagtggtaaggctatgtcgcctgtgccaaggtgtgctgggctcggtacggcaggccattgaggagctggagggagcagcagagccagaggaagaggaggcagtgggaatgcccaagccactgcagaaggtgctggcagatccccggctgacggcactgcagagggatgggggggccatcctgatgaggctgcgctccactcccagcagcaagctggagggccaaggcccagctacactgtatcaggaagtggacgaggccattcaccagcttgtgcgcctctccaacctgcacgtgcagcagcaagagcagcggcagtgcctgcggcgactccagcaggtgttgcagtggctctcgggcccaggggaggagcagctggcaagctttgctatgcctggggacaccttgtctgccctgcaggagacagagctgcgattccgtgctttcagcgctgaggtccaggagcgcctggcccaggcacgggaggccctggctctggaggagaatgccacctcccagaaggtgctggatatctttgaacagcggctggagcaggttgagagtggcctccatcgggccctgcggctacagcgcttcttccagcaggcacatgaatgggtggatgagggctttgctcggctggcaggagctgggccgggtcgggaggctgtgctggctgcactggccctgcggcgggccccagagcccagtgccggcaccttccaggagatgcgggccctggccctggacctgggcagcccagcagccctgcgagaatggggccgctgccaggcccgctgccaagagctagagaggaggatccagcaacacgtgggagaggaggcgagcccacggggctaccgacgacggcgggcagacggtgccagcagtggaggggcccagtgggggccccgcagcccctcgcccagcctcagctccttgctgctccccagcagccctgggccacggccagccccatcccattgctccctggccccatgtggagaggactatgaggaagagggccctgagctggctccagaagcagagggcaggcccccaagagctgtgctgatccgaggcctggaggtcaccagcactgaggtggtagacaggacgtgctcaccacgggaacacgtgctgctgggccgggctagggggccagacggaccctggggagtaggcaccccccggatggagcgcaagcgaagcatcagtgcccagcagcggctggtgtctgagctgattgcctgtgaacaagattacgtggccaccttgagtgagccagtgccaccccctgggcctgagctgacgcctgaacttcggggcacctgggctgctgccctgagtgcccgggaaaggcttcgcagcttccaccggacacactttctgcgggagcttcagggctgcgccacccaccccctacgcattggggcctgcttccttcgccacggggaccagttcagcctttatgcacagtacgtgaagcaccgacacaaactggagaatggtctggctgcgctcagtccctcaagcaagggctccatggaggctggcccttacctgccccgagccctgcagcagcctctggaacagctgactcggtatgggcggctcctggaggagctcctgagggaagctgggcctgagctcagttctgagtgccgggcccttggggctgctgtacagctgctccgggaacaagaggcccgtggcagagacctgctggccgtggaggcggtgcgtggctgtgagatagatctgaaggagcagggacagctcttgcatcgagaccccttcactgtcatctgtggccgaaagaagtgccttcgccatgtctttctcttcgagcatctcctcctgttcagcaagctcaagggccctgaaggggggtcagagatgtttgtttacaagcaggcctttaagactgctgatatggggctgacagaaaacatcggggacagcggactctgctttgagttgtggtttcggcggcggcgtgcacgagaggcatacactctgcaggcaacctcaccagagatcaaactcaagtggacaagttctattgcccagctgctgtggagacaggcagcccacaacaaggagctccgagtgcagcagatggtgtccatgggcattgggaataaacccttcctggacatcaaagcccttggggagcggacgctgagtgccctgctcactggaagagagaggtgagggccagggtgctggggggtggcccccaggagtgaagaccttgacaatgaggatacaaaggggaggtatggtggaaagtcaggaaaggcatctcgtccccaaatcagtgggactggctgggaggccctctgtgagactgagggtcattccagggagccaagagggctttcccacaccagcaccccaccccccactccccactctctgcagccgcccgcacccgggcctccgtggccgtgtcatcctttgagcatgccggcccctcccttcccggcctttcgccgggagcctgctccctgcctgcccgcgtcgaggaggaggcctgggatctggacgtcaagcaaatttccctggccccagaaacacttgactcttctggagatgtgtccccaggaccaagaaacagccccagcctgcaacccccccaccctgggagcagcactcccaccctggccagtcgagggatcttagggctatcccgacagagtcatgctcgagccctgagtgaccccaccacgcctctgtgacctgggtgagtcagcatccccaatttctaccacatccagcactcctaccatcttgcatgtaccttccttcctgtccccggctacttgggagtcagcttcttccctctcccaactcatctccctcttctctcctggcttctagagaagatccagaacttgcgtgcagcttctcctctcagcacactttgggctgggatggcagtggggcataatggagccctgggcgatcgctgaatttcttccctctgcttcctggacacagaggaggtctaacgaccagagtattgccctgccaccactatctctagtctccctagcttggtgccttctcctgcaggagtcagagcagccacattgcttgccttcataccctggaggtggggaagttatccctcttccggtgctttcccatcctgggccactgtatccaggacatcactcccatgccagccctccctggcagcccatgttctcctcttttctcaccccctgactttccctgagaagaatcatctctgccaggtcaactggagtccctggtgactccattctgaggtgtcacaagcaatgaagctatgcaaacaataggagggtgtgacaggggaaccgtagactttatatatgtaattactgttattataatactattgttatattaaatgtatttactcac

SEQ ID NO: 376896 - DNA, 5006 bp, Homo sapiens
actgcccccagaactgccctctggacctccagggcttcccagccctccacttcctgaggaggcgctgggtacccggagtcctggggatgggcacaatgcccctgtggaaggacctgagggcgagtatgtggagctgttagaggtgacgctgcccgtgagggggagcccaacagatgctgaaggctccccaggcctctccagagtccggacggtacccacccgcaagggcgctggagggaagggccgccaccggagacaccgggcgtggatgcaccagaagggcctggggcctcggggccaggatggagcacgcccacccggcgaggggagcagcaccggagcctcccctgagtctcccccaggagctgaggctgtcccagaggcagcagtcttggaggtgtctgagcccccagcagaggctgtgggagaagcctccggatcttgccccctgaggccaggggagcttagaggaggaggaggaggaggccagggggctgaaggaccacctggtacccctcggagaacaggcaaaggaaacagaagaaagaagcgagctgcaggtcgaggggctcttagccgaggaggggacagtgccccactgagccctggggacaaggaagatgccagccaccaagaagcccttggcaatctgccctcaccaagtgagcacaagcttccagaatgccacctggttaaggaggaatatgaaggctcagggaagccagaatctgagccaaaagagctcaaaacagcaggcgagaaagagcctcagctctctgaagcctgtgggcctacagaagagggggccggagagagagagctggaggggccaggcctgctgtgtatggcaggacacacaggcccagaaggccccctgtctgacactccaacacctccgctggagactgtgcaggaaggaaaaggggacaacattccagaagaggcccttgcagtctccgtctctgatcaccctgatgtagcttgggacttgatggcatctggattcctcatcctgacgggaggggtggaccagagtgggcgagctctgctgaccattaccccaccgtgccctcctgaggagcccccaccctcccgagacacgctgaacacaactcttcattacctccactcactgctcaggcctgatctacagacactggggctgtccgtcctgctggaccttcgtcaggcacctccactgcctccagcactcattcctgccttgagccaacttcaggactcaggagatcctccccttgttcagcggctgctgattctcattcatgatgaccttccaactgaactctgtggatttcagggtgctgaggtgctgtcagagaatgatctgaaaagagtggccaagccagaggagctgcagtgggagttaggaggtcacagggacccctctcccagtcactgggtagagatacaccaggaagtggtaaggctatgtcgcctgtgccaaggtgtgctgggctcggtacggcaggccattgaggagctggagggagcagcagagccagaggaagaggaggcagtgggaatgcccaagccactgcagaaggtgctggcagatccccggctgacggcactgcagagggatgggggggccatcctgatgaggctgcgctccactcccagcagcaagctggagggccaaggcccagctacactgtatcaggaagtggacgaggccattcaccagcttgtgcgcctctccaacctgcacgtgcagcagcaagagcagcggcagtgcctgcggcgactccagcaggtgttgcagtggctctcgggcccaggggaggagcagctggcaagctttgctatgcctggggacaccttgtctgccctgcaggagacagagctgcgattccgtgctttcagcgctgaggtccaggagcgcctggcccaggcacgggaggccctggctctggaggagaatgccacctcccagaaggtgctggatatctttgaacagcggctggagcaggttgagagtggcctccatcgggccctgcggctacagcgcttcttccagcaggcacatgaatgggtggatgagggctttgctcggctggcaggagctgggccgggtcgggaggctgtgctggctgcactggccctgcggcgggccccagagcccagtgccggcaccttccaggagatgcgggccctggccctggacctgggcagcccagcagccctgcgagaatggggccgctgccaggcccgctgccaagagctagagaggaggatccagcaacacgtgggagaggaggcgagcccacggggctaccgacgacggcgggcagacggtgccagcagtggaggggcccagtgggggccccgcagcccctcgcccagcctcagctccttgctgctccccagcagccctgggccacggccagccccatcccattgctccctggccccatgtggagaggactatgaggaagagggccctgagctggctccagaagcagagggcaggcccccaagagctgtgctgatccgaggcctggaggtcaccagcactgaggtggtagacaggacgtgctcaccacgggaacacgtgctgctgggccgggctagggggccagacggaccctggggagtaggcaccccccggatggagcgcaagcgaagcatcagtgcccagcagcggctggtgtctgagctgattgcctgtgaacaagattacgtggccaccttgagtgagccagtgccaccccctgggcctgagctgacgcctgaacttcggggcacctgggctgctgccctgagtgcccgggaaaggcttcgcagcttccaccggacacactttctgcgggagcttcagggctgcgccacccaccccctacgcattggggcctgcttccttcgccacggggaccagttcagcctttatgcacagtacgtgaagcaccgacacaaactggagaatggtctggctgcgctcagtccctcaagcaagggctccatggaggctggcccttacctgccccgagccctgcagcagcctctggaacagctgactcggtatgggcggctcctggaggagctcctgagggaagctgggcctgagctcagttctgagtgccgggcccttggggctgctgtacagctgctccgggaacaagaggcccgtggcagagacctgctggccgtggaggcggtgcgtggctgtgagatagatctgaaggagcagggacagctcttgcatcgagaccccttcactgtcatctgtggccgaaagaagtgccttcgccatgtctttctcttcgagcatctcctcctgttcagcaagctcaagggccctgaaggggggtcagagatgtttgtttacaagcaggcctttaagttgtggtttcggcggcggcgtgcacgagaggcatacactctgcaggcaacctcaccagagatcaaactcaagtggacaagttctattgcccagctgctgtggagacaggcagcccacaacaaggagctccgagtgcagcagatggtgtccatgggcattgggaataaacccttcctggacatcaaagcccttggggagcggacgctgagtgccctgctcactggaagagccccagaaacacttgactcttctggagatgtgtccccaggaccaagaaacagccccagcctgcaacccccccaccctgggagcagcactcccaccctggccagtcgagggatcttagggctatcccgacagagtcatgctcgagccctgagtgaccccaccacgcctctgtgacctggagaagatccagaacttgcgtgcagcttctcctctcagcacactttgggctgggatggcagtggggcataatggagccctgggcgatcgctgaatttcttccctctgcttcctggacacagaggaggtctaacgaccagagtattgccctgccaccactatctctagtctccctagcttggtgccttctcctgcaggagtcagagcagccacattgcttgccttcataccctggaggtggggaagttatccctcttccggtgctttcccatcctgggccactgtatccaggacatcactcccatgccagccctccctggcagcccatgttctcctcttttctcaccccctgactttccctgagaagaatcatctctgccaggtcaactggagtccctggtgactccattctgaggtgtcacaagcaatgaagctatgcaaacaataggagggtgtgacaggggaaccgtagactttatatatgtaattactgttattataatactattgttatattaaatgtatttactcacactttgcctctaaggagctagagtagtcctctggattaaggtgataaataacttgagcactttccctcaaccagcccttaactagaacacagaaaataaaaccaagactggaaggtcccctctacccctcccaggcccagagctagctgactgtgtatgagcctgggagaatgtgtctcctccacagtggctcccagaggttccacacactctctgaagctccttctcccacactgcacctactccttgaggctgaactggtcacagacaaactgggatccagcacagtccagcagttctcaaaatgaggtcctcaggccacagtgcgtgagaacttgcttggctgtttgttaaatgctaattcttgggccccatcagagctactgcatcgaaacctgggggtaaaacccaatattctgcatttcttatcaaactctttgggtgataactaagtgtctgaagaggtgactatttcctgacagaaggacccaaagagggaagcaggacataggtaggcagacagacacagggccctgtgcctcaagacacctgtttattggggacacgactctgcaatagggatgacaggaatcgtaccaaaaatagcgacgtctacagggcccctgatggggctagaagggtacagtgccccccaccctcaccccttgtacaaaaataaactctcacgcctatggaccagcaaaaaa

SEQ ID NO: 376897 - DNA, 723 bp, Homo sapiens
caactgctgatttcaaccatactatcatttcaatggtttctatattcttgatctaactaccaaaaactggaagcttgttgcaaggtgtgtcctaacaaacatacaataaatgactcttcctgcatgctgcctgagatatgttgtaatttgaaatgtcttatcaaaaaattatacatgttataacccaaagttgaactggcaatatttttcatgtgtaaaattgatggtatgttaatatcaaaagcagaagcattgtttgtcatacatgtatgttatatgtgatgtttaatcgtgttaaactgtaatctgtgaagttttcattgcctgaactagtcaattctgtataaatcattgtcttaattgttttcctaatcttaccatatttcctaacactgaaatataaatgtttgtcaattagccattcatattgtattgatctttataaactttagtgtgactccattaaactaacctaaacaaaggaaaatcaaagctttccctgtcataggctcagggacattttacttacagccaaaatcatttattcattgaatcaacaagtatttattgagtatctactgtgaatcaggctctataccaaattttgggagaatgcttaagaacgagagaaatccaaaccctatattccccagtgagaatttttgaactctacctaaagtattcttctgtaacttccactgagttaagaaattattttgtttc

SEQ ID NO: 376898 - DNA, 917 bp, Homo sapiens
gccgtgtcactggctcaggctcagttgctgggtcaccagtagaatggacccttcctccacctcagttcagagcacagtgatgattcgtgactttctttcccaatagaacttcaaatctctgaagacggggggtggggggatgtgcttgagtgtttgtactcatggtcttgttctagaagtgacaaagctgggacacaatacctttatgcatgaaaaggttgtcacttgtcacaactaacaggctttcacctcacggaaattttcttcccttgtgcacttttcccctggcagtggacatggctgcactcttccaagaagcaagcagctgtcccgtctgctcagactatctagagaaaccaatgtccctggagtgtggatgcgctgtctgcttcaagtgcatcaattcactgcagaaggagccccatggggaggatctactttgctgttgctgttccatggtctctcagaagaacaaaatcaggcccagttggcagctagagaggctggcttcccacatcaaggaactggagcccaagctgaagaagattctgcagatgaacccaaggatgcggaagttccaaggtgagggatctgtatacactgcccccttcctacgaccagaccaggaaaaatcatctgtgcaactggcccctcattccatatggggattagctgctgtctggcacctaaaattgagatgcttcttcatcatcagattctcagccctgacaacatacagaatcacctggtgatctccaaaaaaaaggctggctgggcatggtggctcatgcctgcaatgtcagcactttgggaggccgaggcgggtggatcacgaggtcaggagatcgggaccatcctggataacacggtgaaaccctgtctctactaaaaatacaaaaaattagccaggcttggtg

SEQ ID NO: 376899 - DNA, 1496 bp, Homo sapiens
gccgtgtcactggctcaggctcagttgctgggtcaccagtagaatggacccttcctccacctcagttcagagcacagtgatgattcgtgactttctttcccaatagaacttcaaatctctgaagacggggggtggggggatgtgcttgagtgtttgtactcatggtcttgttctagaagtgacaaagctgggacacaatacctttatgcatgaaaaggttgtcacttgtcacaactaacaggctttcacctcacggaaattttcttcccttgtgcacttttcccctggcagtggacatggctgcactcttccaagaagcaagcagctgtcccgtctgctcagactatctagagaaaccaatgtccctggagtgtggatgcgctgtctgcttcaagtgcatcaattcactgcagaaggagccccatggggaggatctactttgctgttgctgttccatggtctctcagaagaacaaaatcaggcccagttggcagctagagaggctggcttcccacatcaaggaactggagcccaagctgaagaagattctgcagatgaacccaaggatgcggaagttccaagtggatatgaccttggatgccgacacagccaacaacttcctcctcatttctgacgacctcaggagcgtccgaagtgggtgcatcacacagaatcggcaagaccttgccgagagatttgacgtgtccatttgcatcctgggctcccctcgctttacctgtggccgccactactgggaggtggacgtgggaacaagcacagaatgggacctgggagtctgcagagaatctgttcaccgcaaagggaggatccatctgaccacagagcgtggattctggactgtgagtttgagggatggaagccgcctctctgccagcacggtgccgctgactttcctcttcgtagaccgcaagttacagcgagtggggatttttctggatatgggcatgcagaacgtttccttttttgatgctgaaggtggttcccatgtctatacattcaggagtgtctctgctgaggagccactgcacttgttttttgctcctccaagtccacctaatggtgataagagtgtcttgagtatctgtcctgtgataaacccgggcactactgatgctccagtccatcctggggaggccaaataagcccccactgcaaaaaaacaaaaaacaggttaagaaaattacttgggtgggcagacttaggaacgctctactcggtaaaagcgttatacaaagtcataggagaaaaatatgggacaattcatgattatacttaatctaatttgattagtttataaattgagtcctaagtattaattattgccaccatccaactcattgagtcttatggttcacatcttgtttcctatagaaatattctgtattctgggatcaatttccaaatgcttttttatttctgtaagttcaaattaatgtattatagaagttatgagttaaataaacattggaatatca

SEQ ID NO: 376900 - DNA, 5706 bp, Homo sapiens
tttacggagaacatcagaatggtagataattcctgttccactttctttgatgaaacaagtaaagaagaaacaacacaatcatattaatagaagagtcttcgttccagacgcagtccaggaatcatgctggagaagttctgcaactctactttttggaattcctcattcctggacagtccggaggcagacctgccactttgttttgagcaaactgttctggtgtggattcccttgggcttcctatggctcctggccccctggcagcttctccacgtgtataaatccaggaccaagagatcctctaccaccaaactctatcttgctaagcaggtattcgttggttttcttcttattctagcagccatagagctggcccttgtactcacagaagactctggacaagccacagtccctgctgttcgatataccaatccaagcctctacctaggcacatggctcctggttttgctgatccaatacagcagacaatggtgtgtacagaaaaactcctggttcctgtccctattctggattctctcgatactctgtggcactttccaatttcagactctgatccggacactcttacagggtgacaattctaatctagcctactcctgcctgttcttcatctcctacggattccagatcctgatcctgatcttttcagcattttcagaaaataatgagtcatcaaataatccatcatccatagcttcattcctgagtagcattacctacagctggtatgacagcatcattctgaaaggctacaagcgtcctctgacactcgaggatgtctgggaagttgatgaagagatgaaaaccaagacattagtgagcaagtttgaaacgcacatgaagagagagctgcagaaagccaggcgggcactccagagacggcaggagaagagctcccagcagaactctggagccaggctgcctggcttgaacaagaatcagagtcaaagccaagatgcccttgtcctggaagatgttgaaaagaaaaaaaagaagtctgggaccaaaaaagatgttccaaaatcctggttgatgaaggctctgttcaaaactttctacatggtgctcctgaaatcattcctactgaagctagtgaatgacatcttcacgtttgtgagtcctcagctgctgaaattgctgatctcctttgcaagtgaccgtgacacatatttgtggattggatatctctgtgcaatcctcttattcactgcggctctcattcagtctttctgccttcagtgttatttccaactgtgcttcaagctgggtgtaaaagtacggacagctatcatggcttctgtatataagaaggcattgaccctatccaacttggccaggaaggagtacaccgttggagaaacagtgaacctgatgtctgtggatgcccagaagctcatggatgtgaccaacttcatgcacatgctgtggtcaagtgttctacagattgtcttatctatcttcttcctatggagagagttgggaccctcagtcttagcaggtgttggggtgatggtgcttgtaatcccaattaatgcgatactgtccaccaagagtaagaccattcaggtcaaaaatatgaagaataaagacaaacgtttaaagatcatgaatgagattcttagtggaatcaagatcctgaaatattttgcctgggaaccttcattcagagaccaagtacaaaacctccggaagaaagagctcaagaacctgctggcctttagtcaactacagtgtgtagtaatattcgtcttccagttaactccagtcctggtatctgtggtcacattttctgtttatgtcctggtggatagcaacaatattttggatgcacaaaaggccttcacctccattaccctcttcaatatcctgcgctttcccctgagcatgcttcccatgatgatctcctccatgctccaggccagtgtttccacagagcggctagagaagtacttgggaggggatgacttggacacatctgccattcgacatgactgcaattttgacaaagccatgcagttttctgaggcctcctttacctgggaacatgattcggaagccacagtccgagatgtgaacctggacattatggcaggccaacttgtggctgtgataggccctgtcggctctgggaaatcctccttgatatcagccatgctgggagaaatggaaaatgtccacgggcacatcaccatcaagggcaccactgcctatgtcccacagcagtcctggattcagaatggcaccataaaggacaacatcctttttggaacagagtttaatgaaaagaggtaccagcaagtactggaggcctgtgctctcctcccagacttggaaatgctgcctggaggagatttggctgagattggagagaagggtataaatcttagtgggggtcagaagcagcggatcagcctggccagagctacctaccaaaatttagacatctatcttctagatgaccccctgtctgcagtggatgctcatgtaggaaaacatatttttaataaggtcttgggccccaatggcctgttgaaaggcaagactcgactcttggttacacatagcatgcactttcttcctcaagtggatgagattgtagttctggggaatggaacaattgtagagaaaggatcctacagtgctctcctggccaaaaaaggagagtttgctaagaatctgaagacatttctaagacatacaggccctgaagaggaagccacagtccatgatggcagtgaagaagaagacgatgactatgggctgatatccagtgtggaagagatccccgaagatgcagcctccataaccatgagaagagagaacagctttcgtcgaacacttagccgcagttctaggtccaatggcaggcatctgaagtccctgagaaactccttgaaaactcggaatgtgaatagcctgaaggaagacgaagaactagtgaaaggacaaaaactaattaagaaggaattcatagaaactggaaaggtgaagttctccatctacctggagtacctacaagcaataggattgttttcgatattcttcatcatccttgcgtttgtgatgaattctgtggcttttattggatccaacctctggctcagtgcttggaccagtgactctaaaatcttcaatagcaccgactatccagcatctcagagggacatgagagttggagtctacggagctctgggattagcccaaggtatatttgtgttcatagcacatttctggagtgcctttggtttcgtccatgcatcaaatatcttgcacaagcaactgctgaacaatatccttcgagcacctatgagattttttgacacaacacccacaggccggattgtgaacaggtttgccggcgatatttccacagtggatgacaccctgcctcagtccttgcgcagctggattacatgcttcctggggataatcagcacccttgtcatgatctgcatggccactcctgtcttcaccatcatcgtcattcctcttggcattatttatgtatctgttcagatgttttatgtgtctacctcccgccagctgaggcgtctggactctgtcaccaggtccccaatctactctcacttcagcgagaccgtatcaggtttgccagttatccgtgcctttgagcaccagcagcgatttctgaaacacaatgaggtgaggattgacaccaaccagaaatgtgtcttttcctggatcacctccaacaggtggcttgcaattcgcctggagctggttgggaacctgactgtcttcttttcagccttgatgatggttatttatagagataccctaagtggggacactgttggctttgttctgtccaatgcactcaatatcacacaaaccctgaactggctggtgaggatgacatcagaaatagagaccaacattgtggctgttgagcgaataactgagtacacaaaagtggaaaatgaggcaccctgggtgactgataagaggcctccgccagattggcccagcaaaggcaagatccagtttaacaactaccaagtgcggtaccgacctgagctggatctggtcctcagagggatcacttgtgacatcggtagcatggagaagattggtgtggtgggcaggacaggagctggaaagtcatccctcacaaactgcctcttcagaatcttagaggctgccggtggtcagattatcattgatggagtagatattgcttccattgggctccacgacctccgagagaagctgaccatcatcccccaggaccccatcctgttctctggaagcctgaggatgaatctcgaccctttcaacaactactcagatgaggagatttggaaggccttggagctggctcacctcaagtcttttgtggccagcctgcaacttgggttatcccacgaagtgacagaggctggtggcaacctgagcataggccagaggcagctgctgtgcctgggcagggctctgcttcggaaatccaagatcctggtcctggatgaggccactgctgcggtggatctagagacagacaacctcattcagacgaccatccaaaacgagttcgcccactgcacagtgatcaccatcgcccacaggctgcacaccatcatggacagtgacaaggtaatggtcctagacaacgggaagattatagagtgcggcagccctgaagaactgctacaaatccctggacccttttactttatggctaaggaagctggcattgagaatgtgaacagcacaaaattctagcagaaggccccatgggttagaaaaggactataagaataatttcttatttaattttattttttataaaatacagaatacatacaaaagtgtgtataaaatgtacgttttaaaaaaggataagtgaacacccatgaacctactacccaggttaagaaaataaatgtcaccaggtacttgagaaacccctcgattgtctacctcgatcgtacttccttgctacccacccctcccagggacaaccactgtcctgaatttcacgataattattcctttgcctttcatttctgttttatcacctttgtatgtatctttaaacaacatatacccttttttacttatgtaaatggactgactcatactgcatacatcttctatgacttgattcttttgttcaatattatatctgagattcatccatggtgatgcaaataggtgcattattttttttcactgctctgtagtctggcattgtatgaatacagcacaatgtatcagttttaatattggggatcattagcattattctcaggtttttaaaaattataagcagtactactatggacattctggtctacatctcctggcacatatgtaagagtttctctagggtataacctaggaatggagggtatgaacatgtttacatgcacaaactagctgatgccaaactggtaatgccaactgaaaacattgctgtcaatctgatgaatatgaattgatgtatcaatgagaatttcatttgcatttccctagtatctattggggatgaatatattttcatgtttctggggcatttgcatttccacttgttttttaaatattgtgtctgataattccaatgtctggattctttgtttatctgttgtttctgttggtttttactcatggtattttatttccttgtatgtcttgtgaatttttattataagcttgttctccttaaaa

SEQ ID NO: 376901 - DNA, 1755 bp, Homo sapiens
  misc_feature (1233)..(1233): n is a, c, g, or t
tttacggagaacatcagaatggtagataattcctgttccactttctttgatgaaacaagtaaagaagaaacaacacaatcatattaatagaagagtcttcgttccagacgcagtccaggaatcatgctggagaagttctgcaactctactttttggaattcctcattcctggacagtccggaggcagacctgccactttgttttgagcaaactgttctggtgtggattcccttgggcttcctatggctcctggccccctggcagcttctccacgtgtataaatccaggaccaagagatcctctaccaccaaactctatcttgctaagcaggtattcgttggttttcttcttattctagcagccatagagctggcccttgtactcacagaagactctggacaagccacagtccctgctgttcgatataccaatccaagcctctacctaggcacatggctcctggttttgctgatccaatacagcagacaatggtgtgtacagaaaaactcctggttcctgtccctattctggattctctcgatactctgtggcactttccaatttcagactctgatccggacactcttacagggtgacaattctaatctagcctactcctgcctgttcttcatctcctacggattccagatcctgatcctgatcttttcagcattttcagaaaataatgagtcatcaaataatccatcatccatagcttcattcctgagtagcattacctacagctggtatgacagcatcattctgaaaggctacaagcgtcctctgacactcgaggatgtctgggaagttgatgaagagatgaaaaccaagacattagtgagcaagtttgaaacgcacatgaagagagagctgcagaaagccaggcgggcactccagagacggcaggagaagagctcccagcagaactctggagccaggctgcctggcttgaacaagaatcagagtcaaagccaagatgcccttgtcctggtaactttcccttgagtgtctgtgtgagcgcgctgcatgtttcaggcaagggtacatcagcatcatggcgattctgtccttacatttttatagcacttcatacttctcagtgcacttcatattattaatggtattcacaatactgatactaccttagtgatggatacatgggcgtgtaatgtactgttctctttccttttggggtacttttgaaattttccagaatgaaacgtggttttgaanaaaataataccttagcatttctagattttgcaccttggtacaaattagcataagcaggcaatttgttgattcattcacttgaaaatatttattgagcacaactgtgtgtcagtgaccattctgggcactaaaagattgctcatcttttgtgagctagaaaatatgtagtaagcccatacataggttactctttgaaagtaataatagctattaagaaaataaaacaatagtgtatttggagtgaagtgcgacttgagacagggtaacaggggaagcttctcagaggagatgacatctgaacagacactcaaatgatgagatcaggccctctgagggacagtcagagggaagtgtgttccagcagaaggagcaggcatgcgaggctgagaggggaacacatttggcttgctcagggaatggcaagaagatccaggacagggtgcgcatggggtgagatgggctcaaggaagtggacagggattaagctatgtggaccctgtgggccacaataaggaatctgga

SEQ ID NO: 376902 - DNA, 5458 bp, Homo sapiens
tttacggagaacatcagaatggtagataattcctgttccactttctttgatgaaacaagtaaagaagaaacaacacaatcatattaatagaagagtcttcgttccagacgcagtccaggaatcatgctggagaagttctgcaactctactttttggaattcctcattcctggacagtccggaggcagacctgccactttgttttgagcaaactgttctggtgtggattcccttgggcttcctatggctcctggccccctggcagcttctccacgtgtataaatccaggaccaagagatcctctaccaccaaactctatcttgctaagcaggtattcgttggttttcttcttattctagcagccatagagctggcccttgtactcacagaagactctggacaagccacagtccctgctgttcgatataccaatccaagcctctacctaggcacatggctcctggttttgctgatccaatacagcagacaatggtgtgtacagaaaaactcctggttcctgtccctattctggattctctcgatactctgtggcactttccaatttcagactctgatccggacactcttacagggtgacaattctaatctagcctactcctgcctgttcttcatctcctacggattccagatcctgatcctgatcttttcagcattttcagaaaataatgagtcatcaaataatccatcatccatagcttcattcctgagtagcattacctacagctggtatgacagcatcattctgaaaggctacaagcgtcctctgacactcgaggatgtctgggaagttgatgaagagatgaaaaccaagacattagtgagcaagtttgaaacgcacatgaagagagagctgcagaaagccaggcgggcactccagagacggcaggagaagagctcccagcagaactctggagccaggctgcctggcttgaacaagaatcagagtcaaagccaagatgcccttgtcctggaagatgttgaaaagaaaaaaaagaagtctgggaccaaaaaagatgttccaaaatcctggttgatgaaggctctgttcaaaactttctacatggtgctcctgaaatcattcctactgaagctagtgaatgacatcttcacgtttgtgagtcctcagctgctgaaattgctgatctcctttgcaagtgaccgtgacacatatttgtggattggatatctctgtgcaatcctcttattcactgcggctctcattcagtctttctgccttcagtgttatttccaactgtgcttcaagctgggtgtaaaagtacggacagctatcatggcttctgtatataagaaggcattgaccctatccaacttggccaggaaggagtacaccgttggagaaacagtgaacctgatgtctgtggatgcccagaagctcatggatgtgaccaacttcatgcacatgctgtggtcaagtgttctacagattgtcttatctatcttcttcctatggagagagttgggaccctcagtcttagcaggtgttggggtgatggtgcttgtaatcccaattaatgcgatactgtccaccaagagtaagaccattcaggtcaaaaatatgaagaataaagacaaacgtttaaagatcatgaatgagattcttagtggaatcaagatcctgaaatattttgcctgggaaccttcattcagagaccaagtacaaaacctccggaagaaagagctcaagaacctgctggcctttagtcaactacagtgtgtagtaatattcgtcttccagttaactccagtcctggtatctgtggtcacattttctgtttatgtcctggtggatagcaacaatattttggatgcacaaaaggccttcacctccattaccctcttcaatatcctgcgctttcccctgagcatgcttcccatgatgatctcctccatgctccaggccagtgtttccacagagcggctagagaagtacttgggaggggatgacttggacacatctgccattcgacatgactgcaattttgacaaagccatgcagttttctgaggcctcctttacctgggaacatgattcggaagccacagtccgagatgtgaacctggacattatggcaggccaacttgtggctgtgataggccctgtcggctctgggaaatcctccttgatatcagccatgctgggagaaatggaaaatgtccacgggcacatcaccatcaagggcaccactgcctatgtcccacagcagtcctggattcagaatggcaccataaaggacaacatcctttttggaacagagtttaatgaaaagaggtaccagcaagtactggaggcctgtgctctcctcccagacttggaaatgctgcctggaggagatttggctgagattggagagaagggtataaatcttagtgggggtcagaagcagcggatcagcctggccagagctacctaccaaaatttagacatctatcttctagatgaccccctgtctgcagtggatgctcatgtaggaaaacatatttttaataaggtcttgggccccaatggcctgttgaaaggcaagactcgactcttggttacacatagcatgcactttcttcctcaagtggatgagattgtagttctggggaatggaacaattgtagagaaaggatcctacagtgctctcctggccaaaaaaggagagtttgctaagaatctgaagacatttctaagacatacaggccctgaagaggaagccacagtccatgatggcagtgaagaagaagacgatgactatgggctgatatccagtgtggaagagatccccgaagatgcagcctccataaccatgagaagagagaacagctttcgtcgaacacttagccgcagttctaggtccaatggcaggcatctgaagtccctgagaaactccttgaaaactcggaatgtgaatagcctgaaggaagacgaagaactagtgaaaggacaaaaactaattaagaaggaattcatagaaactggaaaggtgaagttctccatctacctggagtacctacaagcaataggattgttttcgatattcttcatcatccttgcgtttgtgatgaattctgtggcttttattggatccaacctctggctcagtgcttggaccagtgactctaaaatcttcaatagcaccgactatccagcatctcagagggacatgagagttggagtctacggagctctgggattagcccaaggtatatttgtgttcatagcacatttctggagtgcctttggtttcgtccatgcatcaaatatcttgcacaagcaactgctgaacaatatccttcgagcacctatgagattttttgacacaacacccacaggccggattgtgaacaggtttgccggcgatatttccacagtggatgacaccctgcctcagtccttgcgcagctggattacatgcttcctggggataatcagcacccttgtcatgatctgcatggccactcctgtcttcaccatcatcgtcattcctcttggcattatttatgtatctgttcagatgttttatgtgtctacctcccgccagctgaggcgtctggactctgtcaccaggtccccaatctactctcacttcagcgagaccgtatcaggtttgccagttatccgtgcctttgagcaccagcagcgatttctgaaacacaatgaggtgaggattgacaccaaccagaaatgtgtcttttcctggatcacctccaacaggtggcttgcaattcgcctggagctggttgggaacctgactgtcttcttttcagccttgatgatggttatttatagagataccctaagtggggacactgttggctttgttctgtccaatgcactcaatatcacacaaaccctgaactggctggtgaggatgacatcagaaatagagaccaacattgtggctgttgagcgaataactgagtacacaaaagtggaaaatgaggcaccctgggtgactgataagaggcctccgccagattggcccagcaaaggcaagatccagtttaacaactaccaagtgcggtaccgacctgagctggatctggtcctcagagggatcacttgtgacatcggtagcatggagaagattggtgtggtgggcaggacaggagctggaaagtcatccctcacaaactgcctcttcagaatcttagaggctgccggtggtcagattatcattgatggagtagatattgcttccattgggctccacgacctccgagagaagctgaccatcatcccccaggaccccatcctgttctctggaagcctgaggatgaatctcgaccctttcaacaactactcagatgaggagatttggaaggccttggagctggctcacctcaagtcttttgtggccagcctgcaacttgggttatcccacgaagtgacagaggctggtggcaacctgagcataggccagaggcagctgctgtgcctgggcagggctctgcttcggaaatccaagatcctggtcctggatgaggccactgctgcggtggatctagagacagacaacctcattcagacgaccatccaaaacgagttcgcccactgcacagtgatcaccatcgcccacaggctgcacaccatcatggacagtgacaaggtaatggtcctagacaacgggaagattatagagtgcggcagccctgaagaactgctacaaatccctggacccttttactttatggctaaggaagctggcattgagaatgtgaacagcacaaaattctagcagaaggccccatgggttagaaaaggactataagaataatttcttatttaattttattttttataaaatacagaatacatacaaaagtgtgtataaaatgtacgttttaaaaaaggataagtgaacacccatgaacctactacccaggttaagaaaataaatgtcaccaggtacttgagaaacccctcgattgtctacctcgatcgtacttccttgctacccacccctcccagggacaaccactgtcctgaatttcacgataattattcctttgcctttcatttctgttttatcacctttgtatgtatctttaaacaacatatacccttttttacttatgtaaatggactgactcatactgcatacatcttctatgacttgattcttttgttcaatattatatctgagattcaaaaaaaaaaaaaaaaaaaaaaaaaaaaaaaaaaaaaaaaaaaaaaaaaaaaaaaaaaaaaaaaaaaaaaaaaaaaaaaaaaaaaaaaaaaaaaaaaaaaaaaaaaaaaaaaaaaaaaaaaaaaaaaaaatttgggggggggccccggccccaatttcccctttaggggggggttttaaaaataaagggcccggtttttaaaaactttggactggaaaaaccctggggttccccaaattataacccttggaaaaaaacccctttttcccagggggggtaaatcca

SEQ ID NO: 376903 - DNA, 5652 bp, Homo sapiens
tttacggagaacatcagaatggtagataattcctgttccactttctttgatgaaacaagtaaagaagaaacaacacaatcatattaatagaagagtcttcgttccagacgcagtccaggaatcatgctggagaagttctgcaactctactttttggaattcctcattcctggacagtccggaggcagacctgccactttgttttgagcaaactgttctggtgtggattcccttgggcttcctatggctcctggccccctggcagcttctccacgtgtataaatccaggaccaagagatcctctaccaccaaactctatcttgctaagcaggtattcgttggttttcttcttattctagcagccatagagctggcccttgtactcacagaagactctggacaagccacagtccctgctgttcgatataccaatccaagcctctacctaggcacatggctcctggttttgctgatccaatacagcagacaatggtgtgtacagaaaaactcctggttcctgtccctattctggattctctcgatactctgtggcactttccaatttcagactctgatccggacactcttacagggtgacaattctaatctagcctactcctgcctgttcttcatctcctacggattccagatcctgatcctgatcttttcagcattttcagaaaataatgagtcatcaaataatccatcatccatagcttcattcctgagtagcattacctacagctggtatgacagcatcattctgaaaggctacaagcgtcctctgacactcgaggatgtctgggaagttgatgaagagatgaaaaccaagacattagtgagcaagtttgaaacgcacatgaagagagagctgcagaaagccaggcgggcactccagagacggcaggagaagagctcccagcagaactctggagccaggctgcctggcttgaacaagaatcagagtcaaagccaagatgcccttgtcctggaagatgttgaaaagaaaaaaaagaagtctgggaccaaaaaagatgttccaaaatcctggttgatgaaggctctgttcaaaactttctacatggtgctcctgaaatcattcctactgaagctagtgaatgacatcttcacgtttgtgagtcctcagctgctgaaattgctgatctcctttgcaagtgaccgtgacacatatttgtggattggatatctctgtgcaatcctcttattcactgcggctctcattcagtctttctgccttcagtgttatttccaactgtgcttcaagctgggtgtaaaagtacggacagctatcatggcttctgtatataagaaggcattgaccctatccaacttggccaggaaggagtacaccgttggagaaacagtgaacctgatgtctgtggatgcccagaagctcatggatgtgaccaacttcatgcacatgctgtggtcaagtgttctacagattgtcttatctatcttcttcctatggagagagttgggaccctcagtcttagcaggtgttggggtgatggtgcttgtaatcccaattaatgcgatactgtccaccaagagtaagaccattcaggtcaaaaatatgaagaataaagacaaacgtttaaagatcatgaatgagattcttagtggaatcaagatcctgaaatattttgcctgggaaccttcattcagagaccaagtacaaaacctccggaagaaagagctcaagaacctgctggcctttagtcaactacagtgtgtagtaatattcgtcttccagttaactccagtcctggtatctgtggtcacattttctgtttatgtcctggtggatagcaacaatattttggatgcacaaaaggccttcacctccattaccctcttcaatatcctgcgctttcccctgagcatgcttcccatgatgatctcctccatgctccaggccagtgtttccacagagcggctagagaagtacttgggaggggatgacttggacacatctgccattcgacatgactgcaattttgacaaagccatgcagttttctgaggcctcctttacctgggaacatgattcggaagccacagtccgagatgtgaacctggacattatggcaggccaacttgtggctgtgataggccctgtcggctctgggaaatcctccttgatatcagccatgctgggagaaatggaaaatgtccacgggcacatcaccatcaagggcaccactgcctatgtcccacagcagtcctggattcagaatggcaccataaaggacaacatcctttttggaacagagtttaatgaaaagaggtaccagcaagtactggaggcctgtgctctcctcccagacttggaaatgctgcctggaggagatttggctgagattggagagaagggtataaatcttagtgggggtcagaagcagcggatcagcctggccagagctacctaccaaaatttagacatctatcttctagatgaccccctgtctgcagtggatgctcatgtaggaaaacatatttttaataaggtcttgggccccaatggcctgttgaaaggcaagactcgactcttggttacacatagcatgcactttcttcctcaagtggatgagattgtagttctggggaatggaacaattgtagagaaaggatcctacagtgctctcctggccaaaaaaggagagtttgctaagaatctgaagacatttctaagacatacaggccctgaagaggaagccacagtccatgatggcagtgaagaagaagacgatgactatgggctgatatccagtgtggaagagatccccgaagatgcagcctccataaccatgagaagagagaacagctttcgtcgaacacttagccgcagttctaggtccaatggcaggcatctgaagtccctgagaaactccttgaaaactcggaatgtgaatagcctgaaggaagacgaagaactagtgaaaggacaaaaactaattaagaaggaattcatagaaactggaaaggtgaagttctccatctacctggagtacctacaagcaataggattgttttcgatattcttcatcatccttgcgtttgtgatgaattctgtggcttttattggatccaacctctggctcagtgcttggaccagtgactctaaaatcttcaatagcaccgactatccagcatctcagagggacatgagagttggagtctacggagctctgggattagcccaaggtatatttgtgttcatagcacatttctggagtgcctttggtttcgtccatgcatcaaatatcttgcacaagcaactgctgaacaatatccttcgagcacctatgagattttttgacacaacacccacaggccggattgtgaacaggtttgccggcgatatttccacagtggatgacaccctgcctcagtccttgcgcagctggattacatgcttcctggggataatcagcacccttgtcatgatctgcatggccactcctgtcttcaccatcatcgtcattcctcttggcattatttatgtatctgttcagatgttttatgtgtctacctcccgccagctgaggcgtctggactctgtcaccaggtccccaatctactctcacttcagcgagaccgtatcaggtttgccagttatccgtgcctttgagcaccagcagcgatttctgaaacacaatgaggtgaggattgacaccaaccagaaatgtgtcttttcctggatcacctccaacaggtggcttgcaattcgcctggagctggttgggaacctgactgtcttcttttcagccttgatgatggttatttatagagataccctaagtggggacactgttggctttgttctgtccaatgcactcaatatcacacaaaccctgaactggctggtgaggatgacatcagaaatagagaccaacattgtggctgttgagcgaataactgagtacacaaaagtggaaaatgaggcaccctgggtgactgataagaggcctccgccagattggcccagcaaaggcaagatccagtttaacaactaccaagtgcggtaccgacctgagctggatctggtcctcagagggatcacttgtgacatcggtagcatggagaagattggtgtggtgggcaggacaggagctggaaagtcatccctcacaaactgcctcttcagaatcttagaggctgccggtggtcagattatcattgatggagtagatattgcttccattgggctccacgacctccgagagaagctgaccatcatcccccaggaccccatcctgttctctggaagcctgaggatgaatctcgaccctttcaacaactactcagatgaggagatttggaaggccttggagctggctcacctcaagtcttttgtggccagcctgcaacttgggttatcccacgaagtgacagaggctggtggcaacctgagcataggccagaggcagctgctgtgcctgggcagggctctgcttcggaaatccaagatcctggtcctggatgaggccactgctgcggtggatctagagacagacaacctcattcagacgaccatccaaaacgagttcgcccactgcacagtgatcaccatcgcccacaggctgcacaccatcatggacagtgacaaggtaatggtcctagacaacgggaagattatagagtgcggcagccctgaagaactgctacaaatccctggacccttttactttatggctaaggaagctggcattgagaatgtgaacagcacaaaattctagcagaaggccccatgggttagaaaaggactataagaataatttcttatttaattttattttttataaaatacagaatacatacaaaagtgtgtataaaatgtacgttttaaaaaaggataagtgaacacccatgaacctactacccaggttaagaattccttgctacccacccctcccagggacaaccactgtcctgaatttcacgataattattcctttgcctttcatttctgttttatcacctttgtatgtatctttaaacaacatatacccttttttacttatgtaaatggactgactcatactgcatacatcttctatgacttgattcttttgttcaatattatatctgagattcatccatggtgatgcaaataggtgcattattttttttcactgctctgtagtctggcattgtatgaatacagcacaatgtatcagttttaatattggggatcattagcattattctcaggtttttaaaaattataagcagtactactatggacattctggtctacatctcctggcacatatgtaagagtttctctagggtataacctaggaatggagggtatgaacatgtttacatgcacaaactagctgatgccaaactggtaatgccaactgaaaacattgctgtcaatctgatgaatatgaattgatgtatcaatgagaatttcatttgcatttccctagtatctattggggatgaatatattttcatgtttctggggcatttgcatttccacttgttttttaaatattgtgtctgataattccaatgtctggattctttgtttatctgttgtttctgttggtttttactcatggtattttatttccttgtatgtcttgtgaatttttattataagcttgttctccttaaaa

SEQ ID NO: 376904 - DNA, 1054 bp, Homo sapiens
tttacggagaacatcagaatggtagataattcctgttccactttctttgatgaaacaagtaaagaagaaacaacacaatcatattaatagaagagtcttcgttccagacgcagtccaggaatcatgctggagaagttctgcaactctactttttggaattcctcattcctggacagtccggaggcagacctgccactttgttttgagcaaactgttctggtgtggattcccttgggcttcctatggctcctggccccctggcagcttctccacgtgtataaatccaggaccaagagatcctctaccaccaaactctatcttgctaagcaggtattcgttggttttcttcttattctagcagccatagagctggcccttgtactcacagaagactctggacaagccacagtccctgctgttcgatataccaatccaagcctctacctaggcacatggctcctggttttgctgatccaatacagcagacaatggtgtgtacagaaaaactcctggttcctgtccctattctggattctctcgatactctgtggcactttccaatttcagactctgatccggacactcttacagggtgacaattctaatctagcctactcctgcctgttcttcatctcctacggattccagatcctgatcctgatcttttcagcattttcagaaaataatgagtcatcaaataatccatcatccatagcttcattcctgagtagcattacctacagctggtatgacaggtaggaaagcctggagtatggattggctgtatccttactctctcactcctctgaaagtgtcagaaagattttttattttattattttttttttgagatggagttttgctcttgttgcccaggctggagtgcaatggtgtgatcttggctcactgcaacctccacctcctgggttcaagtgattatcctgcctcagcctcgcaagtagctgggattacaggtgtgagctaccatgcccagctaatttttgtatttttagtagagacggggtttcaccatgttggccaagctggtcttgaa

SEQ ID NO: 376905 - DNA, 5598 bp, Homo sapiens
tttacggagaacatcagaatggtagataattcctgttccactttctttgatgaaacaagtaaagaagaaacaacacaatcatattaatagaagagtcttcgttccagacgcagtccaggaatcatgctggagaagttctgcaactctactttttggaattcctcattcctggacagtccggaggcagacctgccactttgttttgagcaaactgttctggtgtggattcccttgggcttcctatggctcctggccccctggcagcttctccacgtgtataaatccaggaccaagagatcctctaccaccaaactctatcttgctaagcaggtattcgttggttttcttcttattctagcagccatagagctggcccttgtactcacagaagactctggacaagccacagtccctgctgttcgatataccaatccaagcctctacctaggcacatggctcctggttttgctgatccaatacagcagacaatggtgtgtacagaaaaactcctggttcctgtccctattctggattctctcgatactctgtggcactttccaatttcagactctgatccggacactcttacagggtgacaattctaatctagcctactcctgcctgttcttcatctcctacggattccagatcctgatcctgatcttttcagcattttcagaaaataatgagtcatcaaataatccatcatccatagcttcattcctgagtagcattacctacagctggtatgacagcatcattctgaaaggctacaagcgtcctctgacactcgaggatgtctgggaagttgatgaagagatgaaaaccaagacattagtgagcaagtttgaaacgcacatgaagagagagctgcagaaagccaggcgggcactccagagacggcaggagaagagctcccagcagaactctggagccaggctgcctggcttgaacaagaatcagagtcaaagccaagatgcccttgtcctggaagatgttgaaaagaaaaaaaagaagtctgggaccaaaaaagatgttccaaaatcctggttgatgaaggctctgttcaaaactttctacatggtgctcctgaaatcattcctactgaagctagtgaatgacatcttcacgtttgtgagtcctcagctgctgaaattgctgatctcctttgcaagtgaccgtgacacatatttgtggattggatatctctgtgcaatcctcttattcactgcggctctcattcagtctttctgccttcagtgttatttccaactgtgcttcaagctgggtgtaaaagtacggacagctatcatggcttctgtatataagaaggcattgaccctatccaacttggccaggaaggagtacaccgttggagaaacagtgaacctgatgtctgtggatgcccagaagctcatggatgtgaccaacttcatgcacatgctgtggtcaagtgttctacagattgtcttatctatcttcttcctatggagagagttgggaccctcagtcttagcaggtgttggggtgatggtgcttgtaatcccaattaatgcgatactgtccaccaagagtaagaccattcaggtcaaaaatatgaagaataaagacaaacgtttaaagatcatgaatgagattcttagtggaatcaagatcctgaaatattttgcctgggaaccttcattcagagaccaagtacaaaacctccggaagaaagagctcaagaacctgctggcctttagtcaactacagtgtgtagtaatattcgtcttccagttaactccagtcctggtatctgtggtcacattttctgtttatgtcctggtggatagcaacaatattttggatgcacaaaaggccttcacctccattaccctcttcaatatcctgcgctttcccctgagcatgcttcccatgatgatctcctccatgctccaggccagtgtttccacagagcggctagagaagtacttgggaggggatgacttggacacatctgccattcgacatgactgcaattttgacaaagccatgcagttttctgaggcctcctttacctgggaacatgattcggaagccacagtccgagatgtgaacctggacattatggcaggccaacttgtggctgtgataggccctgtcggctctgggaaatcctccttgatatcagccatgctgggagaaatggaaaatgtccacgggcacatcaccatcaagggcaccactgcctatgtcccacagcagtcctggattcagaatggcaccataaaggacaacatcctttttggaacagagtttaatgaaaagaggtaccagcaagtactggaggcctgtgctctcctcccagacttggaaatgctgcctggaggagatttggctgagattggagagaagggtataaatcttagtgggggtcagaagcagcggatcagcctggccagagctacctaccaaaatttagacatctatcttctagatgaccccctgtctgcagtggatgctcatgtaggaaaacatatttttaataaggtcttgggccccaatggcctgttgaaaggcaagactcgactcttggttacacatagcatgcactttcttcctcaagtggatgagattgtagttctggggaatggaacaattgtagagaaaggatcctacagtgctctcctggccaaaaaaggagagtttgctaagaatctgaagacatttctaagacatacaggccctgaagaggaagccacagtccatgatggcagtgaagaagaagacgatgactatgggctgatatccagtgtggaagagatccccgaagatgcagcctccataaccatgagaagagagaacagctttcgtcgaacacttagccgcagttctaggtccaatggcaggcatctgaagtccctgagaaactccttgaaaactcggaatgtgaatagcctgaaggaagacgaagaactagtgaaaggacaaaaactaattaagaaggaattcatagaaactggaaaggtgaagttctccatctacctggagtacctacaagcaataggattgttttcgatattcttcatcatccttgcgtttgtgatgaattctgtggcttttattggatccaacctctggctcagtgcttggaccagtgactctaaaatcttcaatagcaccgactatccagcatctcagagggacatgagagttggagtctacggagctctgggattagcccaaggtatatttgtgttcatagcacatttctggagtgcctttggtttcgtccatgcatcaaatatcttgcacaagcaactgctgaacaatatccttcgagcacctatgagattttttgacacaacacccacaggccggattgtgaacaggtttgccggcgatatttccacagtggatgacaccctgcctcagtccttgcgcagctggattacatgcttcctggggataatcagcacccttgtcatgatctgcatggccactcctgtcttcaccatcatcgtcattcctcttggcattatttatgtatctgttcagatgttttatgtgtctacctcccgccagctgaggcgtctggactctgtcaccaggtccccaatctactctcacttcagcgagaccgtatcaggtttgccagttatccgtgcctttgagcaccagcagcgatttctgaaacacaatgaggtgaggattgacaccaaccagaaatgtgtcttttcctggatcacctccaacaggtggcttgcaattcgcctggagctggttgggaacctgactgtcttcttttcagccttgatgatggttatttatagagataccctaagtggggacactgttggctttgttctgtccaatgcactcaatatcacacaaaccctgaactggctggtgaggatgacatcagaaatagagaccaacattgtggctgttgagcgaataactgagtacacaaaagtggaaaatgaggcaccctgggtgactgataagaggcctccgccagattggcccagcaaaggcaagatccagtttaacaactaccaagtgcggtaccgacctgagctggatctggtcctcagagggatcacttgtgacatcggtagcatggagaagattggtgtggtgggcaggacaggagctggaaagtcatccctcacaaactgcctcttcagaatcttagaggctgccggtggtcagattatcattgatggagtagatattgcttccattgggctccacgacctccgagagaagctgaccatcatcccccaggaccccatcctgttctctggaagcctgaggatgaatctcgaccctttcaacaactactcagatgaggagatttggaaggccttggagctggctcacctcaagtcttttgtggccagcctgcaacttgggttatcccacgaagtgacagaggctggtggcaacctgagcataggccagaggcagctgctgtgcctgggcagggctctgcttcggaaatccaagatcctggtcctggatgaggccactgctgcggtggatctagagacagacaacctcattcagacgaccatccaaaacgagttcgcccaggtaatggtcctagacaacgggaagattatagagtgcggcagccctgaagaactgctacaaatccctggacccttttactttatggctaaggaagctggcattgagaatgtgaacagcacaaaattctagcagaaggccccatgggttagaaaaggactataagaataatttcttatttaattttattttttataaaatacagaatacatacaaaagtgtgtataaaatgtacgttttaaaaaaggataagtgaacacccatgaacctactacccaggttaagaattccttgctacccacccctcccagggacaaccactgtcctgaatttcacgataattattcctttgcctttcatttctgttttatcacctttgtatgtatctttaaacaacatatacccttttttacttatgtaaatggactgactcatactgcatacatcttctatgacttgattcttttgttcaatattatatctgagattcatccatggtgatgcaaataggtgcattattttttttcactgctctgtagtctggcattgtatgaatacagcacaatgtatcagttttaatattggggatcattagcattattctcaggtttttaaaaattataagcagtactactatggacattctggtctacatctcctggcacatatgtaagagtttctctagggtataacctaggaatggagggtatgaacatgtttacatgcacaaactagctgatgccaaactggtaatgccaactgaaaacattgctgtcaatctgatgaatatgaattgatgtatcaatgagaatttcatttgcatttccctagtatctattggggatgaatatattttcatgtttctggggcatttgcatttccacttgttttttaaatattgtgtctgataattccaatgtctggattctttgtttatctgttgtttctgttggtttttactcatggtattttatttccttgtatgtcttgtgaatttttattataagcttgttctccttaaaa

SEQ ID NO: 376906 - DNA, 4750 bp, Homo sapiens
tttacggagaacatcagaatggtagataattcctgttccactttctttgatgaaacaagtaaagaagaaacaacacaatcatattaatagaagagtcttcgttccagacgcagtccaggaatcatgctggagaagttctgcaactctactttttggaattcctcattcctggacagtccggaggcagacctgccactttgttttgagcaaactgttctggtgtggattcccttgggcttcctatggctcctggccccctggcagcttctccacgtgtataaatccaggaccaagagatcctctaccaccaaactctatcttgctaagcaggtattcgttggttttcttcttattctagcagccatagagctggcccttgtactcacagaagactctggacaagccacagtccctgctgttcgatataccaatccaagcctctacctaggcacatggctcctggttttgctgatccaatacagcagacaatggtgtgtacagaaaaactcctggttcctgtccctattctggattctctcgatactctgtggcactttccaatttcagactctgatccggacactcttacagggtgacaattctaatctagcctactcctgcctgttcttcatctcctacggattccagatcctgatcctgatcttttcagcattttcagaaaataatgagtcatcaaataatccatcatccatagcttcattcctgagtagcattacctacagctggtatgacagcatcattctgaaaggctacaagcgtcctctgacactcgaggatgtctgggaagttgatgaagagatgaaaaccaagacattagtgagcaagtttgaaacgcacatgaagagagagctgcagaaagccaggcgggcactccagagacggcaggagaagagctcccagcagaactctggagccaggctgcctggcttgaacaagaatcagagtcaaagccaagatgcccttgtcctggaagatgttgaaaagaaaaaaaagaagtctgggaccaaaaaagatgttccaaaatcctggttgatgaaggctctgttcaaaactttctacatggtgctcctgaaatcattcctactgaagctagtgaatgacatcttcacgtttgtgagtcctcagctgctgaaattgctgatctcctttgcaagtgaccgtgacacatatttgtggattggatatctctgtgcaatcctcttattcactgcggctctcattcagtctttctgccttcagtgttatttccaactgtgcttcaagctgggtgtaaaagtacggacagctatcatggcttctgtatataagaaggcattgaccctatccaacttggccaggaaggagtacaccgttggagaaacagtgaacctgatgtctgtggatgcccagaagctcatggatgtgaccaacttcatgcacatgctgtggtcaagtgttctacagattgtcttatctatcttcttcctatggagagagttgggaccctcagtcttagcaggtgttggggtgatggtgcttgtaatcccaattaatgcgatactgtccaccaagagtaagaccattcaggtcaaaaatatgaagaataaagacaaacgtttaaagatcatgaatgagattcttagtggaatcaagatcctgaaatattttgcctgggaaccttcattcagagaccaagtacaaaacctccggaagaaagagctcaagaacctgctggcctttagtcaactacagtgtgtagtaatattcgtcttccagttaactccagtcctggtatctgtggtcacattttctgtttatgtcctggtggatagcaacaatattttggatgcacaaaaggccttcacctccattaccctcttcaatatcctgcgctttcccctgagcatgcttcccatgatgatctcctccatgctccaggccagtgtttccacagagcggctagagaagtacttgggaggggatgacttggacacatctgccattcgacatgactgcaattttgacaaagccatgcagttttctgaggcctcctttacctgggaacatgattcggaagccacagtccgagatgtgaacctggacattatggcaggccaacttgtggctgtgataggccctgtcggctctgggaaatcctccttgatatcagccatgctgggagaaatggaaaatgtccacgggcacatcaccatcaagggcaccactgcctatgtcccacagcagtcctggattcagaatggcaccataaaggacaacatcctttttggaacagagtttaatgaaaagaggtaccagcaagtactggaggcctgtgctctcctcccagacttggaaatgctgcctggaggagatttggctgagattggagagaagggtataaatcttagtgggggtcagaagcagcggatcagcctggccagagctacctaccaaaatttagacatctatcttctagatgaccccctgtctgcagtggatgctcatgtaggaaaacatatttttaataaggtcttgggccccaatggcctgttgaaaggcaagactcgactcttggttacacatagcatgcactttcttcctcaagtggatgagattgtagttctggggaatggaacaattgtagagaaaggatcctacagtgctctcctggccaaaaaaggagagtttgctaagaatctgaagacatttctaagacatacaggccctgaagaggaagccacagtccatgatggcagtgaagaagaagacgatgactatgggctgatatccagtgtggaagagatccccgaagatgcagcctccataaccatgagaagagagaacagctttcgtcgaacacttagccgcagttctaggtccaatggcaggcatctgaagtccctgagaaactccttgaaaactcggaatgtgaatagcctgaaggaagacgaagaactagtgaaaggacaaaaactaattaagaaggaattcatagaaactggaaaggtgaagttctccatctacctggagtacctacaagcaataggattgttttcgatattcttcatcatccttgcgtttgtgatgaattctgtggcttttattggatccaacctctggctcagtgcttggaccagtgactctaaaatcttcaatagcaccgactatccagcatctcagagggacatgagagttggagtctacggagctctgggattagcccaaggtatatttgtgttcatagcacatttctggagtgcctttggtttcgtccatgcatcaaatatcttgcacaagcaactgctgaacaatatccttcgagcacctatgagattttttgacacaacacccacaggccggattgtgaacaggtttgccggcgatatttccacagtggatgacaccctgcctcagtccttgcgcagctggattacatgcttcctggggataatcagcacccttgtcatgatctgcatggccactcctgtcttcaccatcatcgtcattcctcttggcattatttatgtatctgttcagatgttttatgtgtctacctcccgccagctgaggcgtctggactctgtcaccaggtccccaatctactctcacttcagcgagaccgtatcaggtttgccagttatccgtgcctttgagcaccagcagcgatttctgaaacacaatgaggtgaggattgacaccaaccagaaatgtgtcttttcctggatcacctccaacaggtggcttgcaattcgcctggagctggttgggaacctgactgtcttcttttcagccttgatgatggttatttatagagataccctaagtggggacactgttggctttgttctgtccaatgcactcaatatcacacaaaccctgaactggctggtgaggatgacatcagaaatagagaccaacattgtggctgttgagcgaataactgagtacacaaaagtggaaaatgaggcaccctgggtgactgataagaggcctccgccagattggcccagcaaaggcaagatccagtttaacaactaccaagtgcggtaccgacctgagctggatctggtcctcagagggatcacttgtgacatcggtagcatggagaaggtaggtggagtgaaggaaggcctggatgggaggccttgtgatcaaacaacaattggacagagtggagagcagctgggccctaagccttcatcatttggatggagggaaagggtcagggcacttcctctgccctggggaggtgtggggacacagtatcagagggaaggatagcagccagggatcacacagacttaccgcagctgtcggggccttctgctcagctcctccctgcctcctagccagctgaccagggcccctttcctataaggtccacagtatgcagagaggaagtcaggaaggaaacaagggggcggccaggcctggtgaaggaactgttgagaatagcagtgtggaggttgtccctgaaggaagaatggcccagttctcctcccagtcttcaaagtcaggcaccctccttaggtgctgttgttctccgaggacttggggtctgatgagcaaggacgctgaggtccagatcagagtctggctctcagctggtggcagacctaatctttcccttcttcacttctaaacaagcatttttcttttttctttatttttatttatttatttatttattttcagatggagtctcactccagcctgggcaacagagcaagattccatctcaaaaaaaaaa

SEQ ID NO: 376907 - DNA, 847 bp, Homo sapiens
tgggaggcagaggttgcagtgagccgagatggtgtcactgcactccagcctgggtgacagagcaaggccttgtctcaaaaagaaaaaaaaaaaaaaaaaagaattatacaccactcagttttaggaggggcagaacacggggagagccctacaggatcagaggggcaaccaacaagctgtttcagaaggcatggggcagctcagcaaccataagttatgcgtgggctttgctctcgggagagaggtttcctgcagccgaaggactcacagctaatctgggtcaggagcggctgccggctcccccactcctggagatgagcgactctgtgacgtcacgggaggcgcgggcggagcgccggggaagcgaagtaggcaggggcgaggcggctggggaccgcggggcggacgggagcgagtatgtccgctctgactcggctggcgtctttcgctcgcgttggaggccgccttttcagaagcggctgcgcacggactgctggagatggtggagtccgtcatgccggtggtggtgtgcacattgagccccggtatagacagttcccccagctgaccagatcccaggtgttccagagcgagttcttcagcggactcatgtggttctggattctctggcgcttttggcatgactcagaagaggtgctgggtcactttccgtatcctgatccttcccagtggacagatgaagaattaggtatccctcctgatgatgaagactgaaggtgtagactcagcctcactctgtacaagagccaggtgagaatttcaaggattatcgacttcatattgcacattaaagttacaaattaaagtggcttggtcaagaatgaaa

SEQ ID NO: 376908 - DNA, 1273 bp, Homo sapiens
tgggaggcagaggttgcagtgagccgagatggtgtcactgcactccagcctgggtgacagagcaaggccttgtctcaaaaagaaaaaaaaaaaaaaaaaagaattatacaccactcagttttaggaggggcagaacacggggagagccctacaggatcagaggggcaaccaacaagctgtttcagaaggcatggggcagctcagcaaccataagttatgcgtgggctttgctctcgggagagaggtttcctgcagccgaaggactcacagctaatctgggtcaggagcggctgccggctcccccactcctggagatgagcgactctgtgacgtcacgggaggcgcgggcggagcgccggggaagcgaagtaggcaggggcgaggcggctggggaccgcggggcggacgggagcgagtatgtccgctctgactcggctggcgtctttcgctcgcgttggaggccgccttttcagaagcggctgcgcacggactgctggagatggtggagtccgtcatgccggtggtggtgtgcacattgagccccggtatagacagttcccccagctgaccagatcccaggtgttccagagcgagttcttcagcggactcatgtggttctggattctctggcgcttttggcatgactcagaagaggtgctgggtcactttccgtatcctgatccttcccagtggacagatgaagaattaggtatccctcctgatgatgaagactgaaggtgtagactcagcctcactctgtacaagagccaggtgagaatttcaaggattatcgacttcatattgcacattaaagttacaaattaaagtggcttggtcaagaatgaaaaaaaaaaaaaaaaaaaaaaaaaaaaaaaaacaaaaaaaaaaaaaaaaagggggggggggctaaaaattatatcccggggggggccaaaatttatgaggggtacacagtttttttgtgccaaagaggggggcccccccaaaagggaggaggcgcgataatatataacacagcgcacgaggggcgcccagcgtattaacaacaacgcgcgcgggtggggggacaacaagcggccctcggggcgaatctctgggggagaagaaccccacacctccgggcgggggcgaactcttgggggcaacacatcccccatcaggagaaattaacgcccgcgggcacacacaacatgaggatggcaggcgggtcaaccacgacgactatgctgcgccgcgcaaacaatggcacaccggacatgattggacactatcc

SEQ ID NO: 376909 - DNA, 495 bp, Homo sapiens
ggcggtccaggcggaggaagcagcgtgcgcggcgggtgtggacgctcctggagcgaggcggggggcggcggcggtagatcctgaatgaataatataattggtatatgaggacattacggaaacagtatgctacgtcattcaagttgtaaagtggcgatatttgtgccggtggtggtgtgcacattgagccccggtatagacagttcccccagctgaccagatcccaggtgttccagagcgagttcttcagcggactcatgtggttctggattctctggcgcttttggcatgactcagaagaggtgctgggtcactttccgtatcctgatccttcccagtggacagatgaagaattaggtatccctcctgatgatgaagactgaaggtgtagactcagcctcactctgtacaagagccaggtgagaatttcaaggattatcgacttcatattgcacattaaagttacaaattaaagtggcttggtcaagaatgaaa

SEQ ID NO: 376910 - DNA, 935 bp, Homo sapiens
taaagcactgttaccttaatttaagattttaggagttgggtttctgtccttttccacattaaaaatacctgataggaactgttaattaccctttccacaattaacaaaaattagaattgaatttcaatttaaatgtctttgcccaaacaaaagtgaaaataggttatttgaaaacaacaaaacagagcttactgtctagtgtactaataaaacaaacatcttaccagtatttttaattttaccagagctagcaacatggaccacagatatactggtgactccgctctcctctggccaagctacaaatcatcacctgaggcagagatgctactaccctcttctggggctcaactaccgatgggcatcagtaatccatcccagtataacatttcaaggatgtgctggagacaatacatggactttctctttcaatggtgaggaatgaaacaagatacaagaaccacagcatggaatatgttttcttttacatccaatggccaggtcataaaggatgccttgagacctccaccctggcccccacagcgctttgggacaggatgactaacgcagtccagcttcatgtgcaatcaagtcccgggaagaaatttacatttcaaactctgaaaaatcagtgtctaggttggcagcagtactctggaaactgataaaaccaaattcggtcctatatttcaatttccccttctaagttaatacatgattgctgcccatcatacagtacttcaaccctaaactacagcaatttctgtcaacatttctgttgtataaaagttccatgctttgaagagcctatgggagtagaaaaagtttctctagaaatgtcactgaactatatttgcaacctagttgctctatgtgataaatatatctgactatactagggattatgtgctttaaaaaaataattttgttcactg

SEQ ID NO: 376911 - DNA, 704 bp, Homo sapiens
agctcaccacatcctctgtctcccaggagaattgctcgaactgggaggcagaggttgcagtgagccaagattgtgtcactgcactccagcctgggtgacagagtgcgactccgtctcaaaaaaaaaaaaaagctcttgttatactatattgaatgatcctgcatggtttatttacataatgtaatatctatatgcacagcgtagatcctgaatgaataatataattggtatatgaggacattacggaaacagtatgctacgtcattcaagttgtaaagtggcgatatttggtaggaccttttaaacatgatacttaaaaaagtacatatatacacacatctgcaaaaactaaaaatcaccttattcataattagttattaataccttaaatagagcattccaaataaaagtgttaaattttggatgactatttagaaaaaaaaatggaatttatcatttcaatatggtaacattggttttatcatgctggttggaattctagttaaaagttatgtctttgattaataaaaggagaaaattgttaatggtgtgtgtctgtaggcaacagcttaggctttgccatcacacagcatctcactggtaaatcattaataattacaggccttatcataacattatgaaaattaaatgaattaaaacttataaaatgcttagtgtggtatctggcacatggtaaacactca

SEQ ID NO: 376912 - DNA, 772 bp, Homo sapiens
tgggaggcagaggttgcagtgagccgagatggtgtcactgcactccagcctgggtgacagagcaaggccttgtctcaaaaagaaaaaaaaaaaaaaaaaagaattatacaccactcagttttaggaggggcagaacacggggagagccctacaggatcagaggggcaaccaacaagctgtttcagaaggcatggggcagctcagcaaccataagttatgcgtgggctttgctctcgggagagaggtttcctgcagccgaaggactcacagctaatctgggtcaggagcggctgccggctcccccactcctggagatgagcgactctgtgacgtcacgggaggcgcgggcggagcgccggggaagcgaagtaggcaggggcgaggcggctggggaccgcggggcggacgggagcgagtatgtccgctctgactcggctggcgtctttcgctcgcgttggaggccgccttttcagaagcggctgcgcacggactgctggagatggtggagtccgtcagtgagtgtggggctggggatgggggcctcgccggcctgtagcggacagcgcgggtccctgggacgctctcaccttgactggggcgcctgaagaggccgcgtcccgaggcatgctgggacctgtagtccgcgtgtctcctgaagccgcgactcgaggagagggaccccgctggccggagggagagggagagacttcgctgggcagatgggacaccgtgtgcagggccgtcatggtagtaggggccgcctgccctcggg

SEQ ID NO: 376913 - DNA, 575 bp, Homo sapiens
ggcggtccaggcggaggaagcagcgtgcgcggcgggtgtggacgctcctggagcgaggcggggggcggcggcggtgaggcctagggagggcgcggtccagggtcccggtgcctggctgcggaatttagggtagagtctgttcggcagcctttaatcggagacgtcacgtggccgctttttaatgctgaaaaatcactctggctgcagggagtggaggctgtcgcccagagagagcgccgtcggtgccggtggtggtgtgcacattgagccccggtatagacagttcccccagctgaccagatcccaggtgttccagagcgagttcttcagcggactcatgtggttctggattctctggcgcttttggcatgactcagaagaggtgctgggtcactttccgtatcctgatccttcccagtggacagatgaagaattaggtatccctcctgatgatgaagactgaaggtgtagactcagcctcactctgtacaagagccaggtgagaatttcaaggattatcgacttcatattgcacattaaagttacaaattaaagtggcttggtcaagaatgaaa

SEQ ID NO: 376914 - DNA, 439 bp, Homo sapiens
gatgagaaacattagcgttggttctaggatgtaactcagaggagttttggatgacttaacgctttgagaatgtagcacgctgtctgccatgttgttttgtcttgcagtgccggtggtggtgtgcacattgagccccggtatagacagttcccccagctgaccagatcccaggtgttccagagcgagttcttcagcggactcatgtggttctggattctctggcgcttttggcatgactcagaagaggtgctgggtcactttccgtatcctgatccttcccagtggacagatgaagaattaggtatccctcctgatgatgaagactgaaggtgtagactcagcctcactctgtacaagagccaggtgagaatttcaaggattatcgacttcatattgcacattaaagttacaaattaaagtggcttggtcaagaatgaaa

SEQ ID NO: 376915 - DNA, 930 bp, Homo sapiens
tgggaggcagaggttgcagtgagccgagatggtgtcactgcactccagcctgggtgacagagcaaggccttgtctcaaaaagaaaaaaaaaaaaaaaaaagaattatacaccactcagttttaggaggggcagaacacggggagagccctacaggatcagaggggcaaccaacaagctgtttcagaaggcatggggcagctcagcaaccataagttatgcgtgggctttgctctcgggagagaggtttcctgcagccgaaggactcacagctaatctgggtcaggagcggctgccggctcccccactcctggagatgagcgactctgtgacgtcacgggaggcgcgggcggagcgccggggaagcgaagtaggcaggggcgaggcggctggggaccgcggggcggacgggagcgagtatgtccgctctgactcggctggcgtctttcgctcgcgttggaggccgccttttcagaagcggctgcgcacggactgctggagatggtggagtccgtcatgccggtggtggtgtgcacattgagccccggtatagacagttcccccagctgaccagatcccaggtgttccagagcgagttcttcagcggactcatgtggttctggattctctggcgcttttggcatgactcagaagaggtgctgggtcactttccgtatcctgatccttcccagtggacagatgaagaattaggtatccctcctgatgatgaagactgaaggtgtagactcagcctcactctgtacaagagccaggtgagaatttcaaggattatcgacttcatattgcacattcttctcaataaagctttataaggacaattctaaggccagaatcagatgaaactttaaaggctttgaacttctgggttagttttttccccatgacggtggggaaattttaaatccatactc

SEQ ID NO: 376916 - DNA, 720 bp, Homo sapiens
tgggaggcagaggttgcagtgagccgagatggtgtcactgcactccagcctgggtgacagagcaaggccttgtctcaaaaagaaaaaaaaaaaaaaaaaagaattatacaccactcagttttaggaggggcagaacacggggagagccctacaggatcagaggggcaaccaacaagctgtttcagaaggcatggggcagctcagcaaccataagttatgcgtgggctttgctctcgggagagaggtttcctgcagccgaaggactcacagctaatctgggtcaggagcggctgccggctcccccactcctggagatgagcgactctgtgacgtcacgggaggcgcgggcggagcgccggggaagcgaagtaggcaggggcgaggcggctggggaccgcggggcggacgggagcgagtatgtccgctctgactcggctggcgtctttcgctcgcgttggaggccgccttttcagaagcggctgcgcacggactgctggagatggtggagtccgtcatgccggtggtggtgtgcacattgagccccggtatagacagttcccccagctgaccagatcccaggtgttccagagcgagttcttcagcggactcatgtggttctggattctctggcgcttttggcatgactcagaagaggtgctgggcactttccgtatcctgatccttcccaatggacctaaatggacaatggacctaaatgga

SEQ ID NO: 376917 - DNA, 761 bp, Homo sapiens
ggcggtccaggcggaggaagcagcgtgcgcggcgggtgtggacgctcctggagcgaggcggggggcggcggcggtgaggcctagggagggcgcggtccagggtcccggtgcctggctgcggaatttagggtagagtctgttcggcagcctttaatcggagacgtcacgtggccgctttttaatgctgaaaaatcactctggctgcagggagtggaggctgtcgcccagagagagcgccgtcgggtgagaggagcagaaagccggaagccaacgctggggcagccgtggcgtttaggagagtgacaggcagagccgcccgcgaggtggcccgagacgcagaccggagggcggagggctgggggtgcgaggtagggaagcagttggcggaaagccggagttagtgggtgtggcagaagaattccccgtacagagccaggactgggaacaagagtcattggattgattccccagggtcccctttaagattccatccaaggtttaccacttttaacccaaagaagggcagtggttgggggtccgtggaatccccaagcgggggaattcctgggggccgcacaagtgggctggcggtttcagaattcccgaccttctgccacaactccaagctggtgggaaccttgggacaacagtttgcttattcctcgttaatggccttccagtttccttcaacccaatttgggcgtcccatttgcaagggaaactacaatgaagttactggttaaacacaatacatcaagacg

SEQ ID NO: 376918 - DNA, 810 bp, Homo sapiens
tgggaggcagaggttgcagtgagccgagatggtgtcactgcactccagcctgggtgacagagcaaggccttgtctcaaaaagaaaaaaaaaaaaaaaaaagaattatacaccactcagttttaggaggggcagaacacggggagagccctacaggatcagaggggcaaccaacaagctgtttcagaaggcatggggcagctcagcaaccataagttatgcgtgggctttgctctcgggagagaggtttcctgcagccgaaggactcacagctaatctgggtcaggagcggctgccggctcccccactcctggagatgagcgactctgtgacgtcacgggaggcgcgggcggagcgccggggaagcgaagtaggcaggggcgaggcggctggggaccgcggggcggacgggagcgagtatgtccgctctgactcggctggcgtctttcgctcgcgttggaggccgccttttcagaagcggctgcgcacggactgctggagatggtggagtccgtcagtagatcctgaatgaataatataattggtatatgaggacattacggaaacagtatgctacgtcattcaagttgtaaagtggcgatatttgtgccggtggtggtgtgcacattgagccccggtatagacagttcccccagctgaccagatcccaggtgttccagagcgagttcttcagcggactcatgtggttctggattctctggcgcttttggcatgactcagaagaggtgctgggcactttccgtatcctgatccttcccaatggacctaaatggacaatggacctaaatgga

SEQ ID NO: 376919 - DNA, 1453 bp, Homo sapiens
tgggaggcagaggttgcagtgagccgagatggtgtcactgcactccagcctgggtgacagagcaaggccttgtctcaaaaagaaaaaaaaaaaaaaaaaagaattatacaccactcagttttaggaggggcagaacacggggagagccctacaggatcagaggggcaaccaacaagctgtttcagaaggcatggggcagctcagcaaccataagttatgcgtgggctttgctctcgggagagaggtttcctgcagccgaaggactcacagctaatctgggtcaggagcggctgccggctcccccactcctggagatgagcgactctgtgacgtcacgggaggcgcgggcggagcgccggggaagcgaagtaggcaggggcgaggcggctggggaccgcggggcggacgggagcgagtatgtccgctctgactcggctggcgtctttcgctcgcgttggaggccgccttttcagaagcggctgcgcacggactgctggagatggtggagtccgtcatgccggtggtggtgtgcacattgagccccggtatagacagttcccccagctgaccagatcccaggtgttccagagcgagttcttcagcggactcatgtggttctggattctctggcgcttttggcatgactcagaagaggtgctgggtcactttccgtatcctgatccttcccagtggacagatgaagaattaggtatccctcctgatgatgaagactgaaggtgtagactcagcctcactctgtacaagctagcaacatggaccacagatatactggtgactccgctctcctctggccaagctacaaatcatcacctgaggcagagatgctactaccctcttctggggctcaactaccgatgggcatcagtaatccatcccagtataacatttcaaggatgtgctggagacaatacatggactttctctttcaatggtgaggaatgaaacaagatacaagaaccacagcatggaatatgttttcttttacatccaatggccaggtcataaaggatgccttgagacctccaccctggcccccacagcgctttgggacaggatgactaacgcagtccagcttcatgtgcaatcaagtcccgggaagaaatttacatttcaaactctgaaaaatcagtgtctaggttggcagcagtactctggaaactgataaaaccaaattcggtcctatatttcaatttccccttctaagttaatacatgattgctgcccatcatacagtacttcaaccctaaactacagcaatttctgtcaacatttctgttgtataaaagttccatgctttgaagagcctatgggagtagaaaaagtttctctagaaatgtcactgaactatatttgcaacctagttgctctatgtgataaatatatctgactatactagggattatgtgctttaaaaaaataattttgttcactg

SEQ ID NO: 376920 - DNA, 1169 bp, Homo sapiens
tgggaggcagaggttgcagtgagccgagatggtgtcactgcactccagcctgggtgacagagcaaggccttgtctcaaaaagaaaaaaaaaaaaaaaaaagaattatacaccactcagttttaggaggggcagaacacggggagagccctacaggatcagaggggcaaccaacaagctgtttcagaaggcatggggcagctcagcaaccataagttatgcgtgggctttgctctcgggagagaggtttcctgcagccgaaggactcacagctaatctgggtcaggagcggctgccggctcccccactcctggagatgagcgactctgtgacgtcacgggaggcgcgggcggagcgccggggaagcgaagtaggcaggggcgaggcggctggggaccgcggggcggacgggagcgagtatgtccgctctgactcggctggcgtctttcgctcgcgttggaggccgccttttcagaagcggctgcgcacggactgctggagatggtggagtccgtcagtgagtgtggggctggggatgggggcctcgccggcctgtagcggacagcgcgggtccctgggacgctctcaccttgactggggcgcctgaagaggccgcgtcccgaggcatgctgggacctgtagtccgcgtgtctcctgaagccgcgactcgaggagagggaccccgctggccggagggagagggagagacttcgctgggcagatgggacaccgtgtgcagggccgtcatggtagatcctgaatgaataatataattggtatatgaggacattacggaaacagtatgctacgtcattcaagttgtaaagtggcgatatttgtgccggtggtggtgtgcacattgagccccggtatagacagttcccccagctgaccagatcccaggtgttccagagcgagttcttcagcggactcatgtggttctggattctctggcgcttttggcatgactcagaagaggtgctgggtcactttccgtatcctgatccttcccagtggacagatgaagaattaggtatccctcctgatgatgaagactgaaggtgtagactcagcctcactctgtacaagagccaggtgagaatttcaaggattatcgacttcatattgcacattaaagttacaaattaaagtggcttggtcaagaatgaaa

SEQ ID NO: 376921 - DNA, 937 bp, Homo sapiens
tgggaggcagaggttgcagtgagccgagatggtgtcactgcactccagcctgggtgacagagcaaggccttgtctcaaaaagaaaaaaaaaaaaaaaaaagaattatacaccactcagttttaggaggggcagaacacggggagagccctacaggatcagaggggcaaccaacaagctgtttcagaaggcatggggcagctcagcaaccataagttatgcgtgggctttgctctcgggagagaggtttcctgcagccgaaggactcacagctaatctgggtcaggagcggctgccggctcccccactcctggagatgagcgactctgtgacgtcacgggaggcgcgggcggagcgccggggaagcgaagtaggcaggggcgaggcggctggggaccgcggggcggacgggagcgagtatgtccgctctgactcggctggcgtctttcgctcgcgttggaggccgccttttcagaagcggctgcgcacggactgctggagatggtggagtccgtcagtagatcctgaatgaataatataattggtatatgaggacattacggaaacagtatgctacgtcattcaagttgtaaagtggcgatatttgtgccggtggtggtgtgcacattgagccccggtatagacagttcccccagctgaccagatcccaggtgttccagagcgagttcttcagcggactcatgtggttctggattctctggcgcttttggcatgactcagaagaggtgctgggtcactttccgtatcctgatccttcccagtggacagatgaagaattaggtatccctcctgatgatgaagactgaaggtgtagactcagcctcactctgtacaagagccaggtgagaatttcaaggattatcgacttcatattgcacattaaagttacaaattaaagtggcttggtcaagaatgaaa

SEQ ID NO: 376922 - DNA, 839 bp, Homo sapiens
tgggaggcagaggttgcagtgagccgagatggtgtcactgcactccagcctgggtgacagagcaaggccttgtctcaaaaagaaaaaaaaaaaaaaaaaagaattatacaccactcagttttaggaggggcagaacacggggagagccctacaggatcagaggggcaaccaacaagctgtttcagaaggcatggggcagctcagcaaccataagttatgcgtgggctttgctctcgggagagaggtttcctgcagccgaaggactcacagctaatctgggtcaggagcggctgccggctcccccactcctggagatgagcgactctgtgacgtcacgggaggcgcgggcggagcgccggggaagcgaagtaggcaggggcgaggcggctggggaccgcggggcggacgggagcgagtatgtccgctctgactcggctggcgtctttcgctcgcgttggaggccgccttttcagaagcggctgcgcacggactgctggagatggtggagtccgtcatgccggtggtggtgtgcacattgagccccggtatagacagttcccccagctgaccagatcccaggtgttccagagcgagttcttcagcggactcatgtggttctggattctctggcgcttttggcatgactcagaagaggtgctgggtcactttccgtatcctgatccttcccagtggacagatgaagaattaggtatccctcctgatgatgaagactgaaggtgtagactcagcctcactctgtacaagagccaggtgagaatttcaaggattatcgacttcatattgcacattctccactgggatcctctagaaccaccacc

SEQ ID NO: 376923 - DNA, 1134 bp, Homo sapiens
tgggaggcagaggttgcagtgagccgagatggtgtcactgcactccagcctgggtgacagagcaaggccttgtctcaaaaagaaaaaaaaaaaaaaaaaagaattatacaccactcagttttaggaggggcagaacacggggagagccctacaggatcagaggggcaaccaacaagctgtttcagaaggcatggggcagctcagcaaccataagttatgcgtgggctttgctctcgggagagaggtttcctgcagccgaaggactcacagctaatctgggtcaggagcggctgccggctcccccactcctggagatgagcgactctgtgacgtcacgggaggcgcgggcggagcgccggggaagcgaagtaggcaggggcgaggcggctggggaccgcggggcggacgggagcgagtatgtccgctctgactcggctggcgtctttcgctcgcgttggaggccgccttttcagaagcggctgcgcacggactgctggagatggtggagtccgtcatgccggtggtggtgtgcacattgagccccggtatagacagttcccccagctgaccagatcccaggtgttccagagcgagttcttcagcggactcatgtggttctggattctctggcgcttttggcatgactcagaagaggtgctgggtcactttccgtatcctgatccttcccagtggacagatgaagaattaggtatccctcctgatgatgaagactgaaggtgtagactcagcctcactctgtacaaggtctcattctgtcatccagactggagtgcagcgtgatcatggctcactgtaaccccaacctcctgagctcaagtgattctcccgcctcagccttctcagtagctgggactactactcttggctaatttttgtatattttgtagagatgaggttttgccatgttgcccaggctgatctcaaattcttggactcaagtgatccacctcttggcttcccaaagtgttgggattacaggtgtgagccagtgtacctggccaacaaatttgttttaatgactggactgtaaacccttgagagaggaagggtgattttgcttctcttgtctacaaggctgtcacatgatcagtgctcaataaatacttgaataat

SEQ ID NO: 376924 - DNA, 1201 bp, Homo sapiens
tgggaggcagaggttgcagtgagccgagatggtgtcactgcactccagcctgggtgacagagcaaggccttgtctcaaaaagaaaaaaaaaaaaaaaaaagaattatacaccactcagttttaggaggggcagaacacggggagagccctacaggatcagaggggcaaccaacaagctgtttcagaaggcatggggcagctcagcaaccataagttatgcgtgggctttgctctcgggagagaggtttcctgcagccgaaggactcacagctaatctgggtcaggagcggctgccggctcccccactcctggagatgagcgactctgtgacgtcacgggaggcgcgggcggagcgccggggaagcgaagtaggcaggggcgaggcggctggggaccgcggggcggacgggagcgagtatgtccgctctgactcggctggcgtctttcgctcgcgttggaggccgccttttcagaagcggctgcgcacggactgctggagatggtggagtccgtcatgccggtggtggtgtgcacattgagccccggtatagacagttcccccagctgaccagatcccaggtgttccagagcgagttcttcagcggactcatgtggttctggattctctggcgcttttggcatgactcagaagaggtgctgggtcactttccgtatcctgatccttcccagtggacagatgaagaattaggtatccctcctgatgatgaagactgaaggtgtagactcagcctcactctgtacaagtgggtgtgctccaaatttctttatgtcatatttaccttttttcataaacattagtttttactttgtgcctatgatggacttgaaaaaactgcatattctaacagcatgaagttgagttaaccatgtcctgtatctgcttttttttttttttttgagacagagtcttgctctgtcgcccagactggagtgcagtggcgtgatctgggctcactgcaacctctgccttccaggttcaagtgattctccttcctcagcctcctgagtagctgggattataggcacatgctaccacacttggctaatttttgtatttttagtagaggcagagttttgccacgttggccaggctggtctcgaacttctgacctcaagtgatctgcccacctcagactcccaaagtgctaggattacaggtgtgagccaccacgcctggcca

SEQ ID NO: 376925 - DNA, 429 bp, Homo sapiens
aataaggctgaatgtcttataataattcttagaggtaaaaactgtgtgccctcttcctccagaggctagtggcagtagtggagaattactcaatcctttcttagtaatccatacacacattatagacagcaggatagcagtctccctttccagaaacactgtataagaagcttctttccataaacagtttatacatcaatgtgtatagatacctagttactgtagatctttttatgttaggcattcagatgtgtctcattctgactgcgtaacattgatgtacacctgattttgttaagaccagtttgctccttttgggcaggtgctgcaggaaatacccttggaacagtttttgcttaaatatttgtatgtatctggaaggtacatttctagattccctgtgtcagtaaacatttttcagttgataaa

SEQ ID NO: 376926 - DNA, 645 bp, Homo sapiens
atgtcgcagaaattctgacatccactttcatatagatcttatacattttaatagtctctaatagcattcttctctgttttcctatagtctccaaacctttttcactttcttcttttttctctttgtgtgagtgtggatttctttatgctgaaacattccagctgatggtatttctcttatctttttggcttgtcatagttgatatttatccttcccacctcagatcaggaagaagctaaatgccaccttttgcattgtctgtctctcaaagaaaggatgcatatttgatttttcttctacaccgaatggagaatattacactgaccctgcttggaaactgagtgattctcctagtgcttgttctttcccaaaagagaactgtggactctctctctctgtgtgtgtgtgtgtgtgtgtgtgtgtgtgtatgtgtgtgtgtgtgtgtatcttcaattcttttaccttcaagaaacccccaaagaaaaatcaaacaatagtctttccttaatcaagcctattaagcagctttgccctcatatgtttttagacttaaaagtcttatatctaaattctttccagataatgtaaaaaaaaaaaatgatgtcactgtttatgttggcagcggcaaggtgctctatttatttc

SEQ ID NO: 376927 - DNA, 424 bp, Homo sapiens
atcatttttacagtgcctatctctaggtagtaggataatttttatttttccctttgtcttttattgtagtttctcagttatttccaataagcactgcattagttttatagttgtaaaaaatgttgtttaaaagtcagggagcccaggcgtggtggctcatgcctgtaatcccagcactttgggaggctgaggcaaactgatcacctgaggtcagcagttcgagatcagcctggacaacatggtgaaaccctgtctctactaaaaatacaaaaattagccaggtgtggtggcacatgcctctaatcccagctactcgggaggctgaggcaggagaatggcgtgaacctgggaggcggagcttacagtgagccgagatcacgccactgcactccagcctgggctacagagcaagactctgtctcaa

SEQ ID NO: 376928 - DNA, 876 bp, Homo sapiens
caagattgtgcccgctgcactccagccgtggagaacagagcaagaccctgtctcaaaaaataataagtaaaataaggccagatgctgggattacaggcgtgagccactgcacccggcctctgtttactttttgtacaacggtgatagcagctcttaagtatatccatttgactggatcataaatcagtacactgccagtgagatagtggtatatgcttatttgtaagagaacaacaaatgatatataaaatactagttctagggctaagttcactattaatctaatttaatttgtgactaaacactctggatagacaaaaaagtattctttgatatgacatgttgcaaaagtcacctgtagctatgactatagttgagtgttcttaatagcaaagataactattcaaatttttaaagttcttatttaggctatttgatgataaagggatgtacctgtaaaaatatatatatatttataaaggacctaattaatttttacaaaaggattttgttttgtatagtactaatctgcaaatgagcttccctagctggaatggaggtttgagagatagtatagtatagtggttaagaacaccgattctgctagtctgcttaggttcaaatcctggttctactacttactagctgggtgactgtgggtaagatatttaacctctctacttccgtactctgtaaagggataataacagtatctacattttggggtggtaatgattaaatgagttactacttgtaaaatgcttacaacaaggcctgccagaccctgacacatagtaaaagcagtatatgtgtttttttgtttttgttttttgtttttaataaaataagtatctgaaaaataaagtcactagaaaa

SEQ ID NO: 376929 - DNA, 891 bp, Homo sapiens
cgagggactcactggtgcctgccttggggctccgggactgtgggctgtctccatccggagccgcagcaatggcgctgagttcctctgctggagttcatcctgctagctgggttcccgagctgccggtctgagcctgaggcatggagcctcctggagactgggggcctcctccctggagatccacccccaaaaccgacgtcttgaggctggtgctgtatctcaccttcctgggagccccctgctacgccccagctctgccgtcctgcaaggaggacgagtacccagtgggctccgagtgctgccccaagtgcagtccaggttatcgtgtgaaggaggcctgcggggagctgacgggcacagtgtgtgaaccctgccctccaggcacctacattgcccacctcaatggcctaagcaagtgtctgcagtgccaaatgtgtgacccagccatgggcctgcgcgcgagccggaactgctccaggacagagaacgccgtgtgtggctgcagcccaggccacttctgcatcgtccaggacggggaccactgcgccgcgtgccgcgcttacgccacctccagcccgggccagagggtgcagaagggaggcaccgagagtcaggacaccctgtgtcagaactgccccccggggaccttctctcccaatgggaccctggaggaatgtcagcaccagaccaagtgcagctggctggtgacgaaggccggagctgggaccagcagctcccactgggtatggtggtttctctcagggagcctcgtcatcgtcattgtttgctccacagttggcctaatcatatgtgtgaaaagaagaaagccaaggggtgaatgtagtcaaggtgatcggtctccgtccagcggaaaagacggaggccgaggtt

SEQ ID NO: 376930 - DNA, 2235 bp, Homo sapiens
cgagggactcactggtgcctgccttggggctccgggactgtgggctgtctccatccggaggtctccctaccaccaggctctgtggggcagggaagcccagtggggtgcagggagccaggaagctggggtggggtcagggcagggtccacagggagaccgggcgaggctggcagccttcccagtccgcgcagcgtctctgcagggggagcaagagctgcccttccacccctcccaggggacgggtaggggcactctgggcttttcccaccccctcacgcagggacacaggcctggtgggtctatgactgaaattggccagaccgcattctggtggttttattcggaagggaagtttaccctgttcagcagaagctgagatgggaacaggaaacccacagggcccctttattcggcaaaaatgtcagtcagcgccacggggagcagccgagggtccctgagtgtgtgaccgcagcaatggcgctgagttcctctgctggagttcatcctgctagctgggttcccgagctgccggtctgagcctgaggcatggagcctcctggagactgggggcctcctccctggagatccacccccaaaaccgacgtcttgaggctggtgctgtatctcaccttcctgggagccccctgctacgccccagctctgccgtcctgcaaggaggacgagtacccagtgggctccgagtgctgccccaagtgcagtccaggttatcgtgtgaaggaggcctgcggggagctgacgggcacagtgtgtgaaccctgccctccaggcacctacattgcccacctcaatggcctaagcaagtgtctgcagtgccaaatgtgtgacccagccatgggcctgcgcgcgagccggaactgctccaggacagagaacgccgtgtgtggctgcagcccaggccacttctgcatcgtccaggacggggaccactgcgccgcgtgccgcgcttacgccacctccagcccgggccagagggtgcagaagggaggcaccgagagtcaggacaccctgtgtcagaactgccccccggggaccttctctcccaatgggaccctggaggaatgtcagcaccagaccaagtgcagctggctggtgacgaaggccggagctgggaccagcagctcccactgggtatggtggtttctctcagggagcctcgtcatcgtcattgtttgctccacagttggcctaatcatatgtgtgaaaagaagaaagccaaggggtgatgtagtcaaggtgatcgtctccgtccagcggaaaagacaggaggcagaaggtgaggccacagtcattgaggccctgcaggcccctccggacgtcaccacggtggccgtggaggagacaataccctcattcacggggaggagcccaaaccactgacccacagactctgcaccccgacgccagagatacctggagcgacggctgctgaaagaggctgtccacctggcgaaaccaccggagcccggaggcttgggggctccgccctgggctggcttccgtctcctccagtggagggagaggtggggcccctgctggggtagagctggggacgccacgtgccattcccatgggccagtgagggcctggggcctctgttctgctgtggcctgagctccccagagtcctgaggaggagcgccagttgcccctcgctcacagaccacacacccagccctcctgggccagcccagagggcccttcagaccccagctgtctgcgcgtctgactcttgtggcctcagcaggacaggccccgggcactgcctcacagccaaggctggactgggttggctgcagtgtggtgtttagtggataccacatcggaagtgattttctaaattggatttgaattcggctcctgttttctatttgtcatgaaacagtgtatttggggagatgctgtgggaggatgtaaatatcttgtttctcctcaaaaaaaaaaaaaaaaaaaaaaaaaataaaaaaaaaaaaaaaacataaaaaaaaaaaaacaaaaaaaaaataaatataaaaagaaccattataaaatttatccttatattaattctattaaaaaatacggggcggggttttacaatcttggaaggggaaaaccctggggtacccacttaaaccgcttggaacaaacccctttcccacgggggttaattcaagggccgcactatgccctttccttggcacacctgtggggtataggcatttttgcgttttttttt

SEQ ID NO: 376931 - DNA, 1798 bp, Homo sapiens
ctgggacctgctctgggcaagcacaggcgccgcagcaatggcgctgagttcctctgctggagttcatcctgctagctgggttcccgagctgccggtctgagcctgaggcatggagcctcctggagactgggggcctcctccctggagatccacccccaaaaccgacgtcttgaggctggtgctgtatctcaccttcctgggagccccctgctacgccccagctctgccgtcctgcaaggaggacgagtacccagtgggctccgagtgctgccccaagtgcagtccaggttatcgtgtgaaggaggcctgcggggagctgacgggcacagtgtgtgaaccctgccctccaggcacctacattgcccacctcaatggcctaagcaagtgtctgcagtgccaaatgtgtgacccagccatgggcctgcgcgcgagccggaactgctccaggacagagaacgccgtgtgtggctgcagcccaggccacttctgcatcgtccaggacggggaccactgcgccgcgtgccgcgcttacgccacctccagcccgggccagagggtgcagaagggaggcaccgagagtcaggacaccctgtgtcagaactgccccccggggaccttctctcccaatgggaccctggaggaatgtcagcaccagaccaagtgcagctggctggtgacgaaggccggagctgggaccagcagctcccactgggtatggtggtttctctcagggagcctcgtcatcgtcattgtttgctccacagttggcctaatcatatgtgtgaaaagaagaaagccaaggggtgatgtagtcaaggtgatcgtctccgtccagcggaaaagacaggaggcagaaggtgaggccacagtcattgaggccctgcaggcccctccggacgtcaccacggtggccgtggaggagacaataccctcattcacggggaggagcccaaaccactgacccacagactctgcaccccgacgccagagatacctggagcgacggctgctgaaagaggctgtccacctggcgaaaccaccggagcccggaggcttgggggctccgccctgggctggcttccgtctcctccagtggagggagaggtggggcccctgctggggtagagctggggacgccacgtgccattcccatgggccagtgagggcctggggcctctgttctgctgtggcctgagctccccagagtcctgaggaggagcgccagttgcccctcgctcacagaccacacacccagccctcctgggccagcccagagggcccttcagaccccagctgtctgcgcgtctgactcttgtggcctcagcaggacaggccccgggcactgcctcacagccaaggctggactgggttggctgcagtgtggtgtttagtggataccacatcggaagtgattttctaaattggatttgaattcggctcctgttttctatttgtcatgaaacagtgtatttggggagatgctgtgggaggatgtaaatatcttgtttctcctcaaaaaaaaaaaaaaaaaaaaaaaaaataaaaaaaaaaaaaaaacataaaaaaaaaaaaacaaaaaaaaaataaatataaaaagaaccattataaaatttatccttatattaattctattaaaaaatacggggcggggttttacaatcttggaaggggaaaaccctggggtacccacttaaaccgcttggaacaaacccctttcccacgggggttaattcaagggccgcactatgccctttccttggcacacctgtggggtataggcatttttgcgttttttttt

SEQ ID NO: 376932 - DNA, 1794 bp, Homo sapiens
aaggtgtacgcctcggttaccgggaccgcagcaatggcgctgagttcctctgctggagttcatcctgctagctgggttcccgagctgccggtctgagcctgaggcatggagcctcctggagactgggggcctcctccctggagatccacccccaaaaccgacgtcttgaggctggtgctgtatctcaccttcctgggagccccctgctacgccccagctctgccgtcctgcaaggaggacgagtacccagtgggctccgagtgctgccccaagtgcagtccaggttatcgtgtgaaggaggcctgcggggagctgacgggcacagtgtgtgaaccctgccctccaggcacctacattgcccacctcaatggcctaagcaagtgtctgcagtgccaaatgtgtgacccagccatgggcctgcgcgcgagccggaactgctccaggacagagaacgccgtgtgtggctgcagcccaggccacttctgcatcgtccaggacggggaccactgcgccgcgtgccgcgcttacgccacctccagcccgggccagagggtgcagaagggaggcaccgagagtcaggacaccctgtgtcagaactgccccccggggaccttctctcccaatgggaccctggaggaatgtcagcaccagaccaagtgcagctggctggtgacgaaggccggagctgggaccagcagctcccactgggtatggtggtttctctcagggagcctcgtcatcgtcattgtttgctccacagttggcctaatcatatgtgtgaaaagaagaaagccaaggggtgatgtagtcaaggtgatcgtctccgtccagcggaaaagacaggaggcagaaggtgaggccacagtcattgaggccctgcaggcccctccggacgtcaccacggtggccgtggaggagacaataccctcattcacggggaggagcccaaaccactgacccacagactctgcaccccgacgccagagatacctggagcgacggctgctgaaagaggctgtccacctggcgaaaccaccggagcccggaggcttgggggctccgccctgggctggcttccgtctcctccagtggagggagaggtggggcccctgctggggtagagctggggacgccacgtgccattcccatgggccagtgagggcctggggcctctgttctgctgtggcctgagctccccagagtcctgaggaggagcgccagttgcccctcgctcacagaccacacacccagccctcctgggccagcccagagggcccttcagaccccagctgtctgcgcgtctgactcttgtggcctcagcaggacaggccccgggcactgcctcacagccaaggctggactgggttggctgcagtgtggtgtttagtggataccacatcggaagtgattttctaaattggatttgaattcggctcctgttttctatttgtcatgaaacagtgtatttggggagatgctgtgggaggatgtaaatatcttgtttctcctcaaaaaaaaaaaaaaaaaaaaaaaaaataaaaaaaaaaaaaaaacataaaaaaaaaaaaacaaaaaaaaaataaatataaaaagaaccattataaaatttatccttatattaattctattaaaaaatacggggcggggttttacaatcttggaaggggaaaaccctggggtacccacttaaaccgcttggaacaaacccctttcccacgggggttaattcaagggccgcactatgccctttccttggcacacctgtggggtataggcatttttgcgttttttttt

SEQ ID NO: 376933 - DNA, 1803 bp, Homo sapiens
acaacgggcaggctgtactgcccggaagttatggccgcagcaatggcgctgagttcctctgctggagttcatcctgctagctgggttcccgagctgccggtctgagcctgaggcatggagcctcctggagactgggggcctcctccctggagatccacccccaaaaccgacgtcttgaggctggtgctgtatctcaccttcctgggagccccctgctacgccccagctctgccgtcctgcaaggaggacgagtacccagtgggctccgagtgctgccccaagtgcagtccaggttatcgtgtgaaggaggcctgcggggagctgacgggcacagtgtgtgaaccctgccctccaggcacctacattgcccacctcaatggcctaagcaagtgtctgcagtgccaaatgtgtgacccagccatgggcctgcgcgcgagccggaactgctccaggacagagaacgccgtgtgtggctgcagcccaggccacttctgcatcgtccaggacggggaccactgcgccgcgtgccgcgcttacgccacctccagcccgggccagagggtgcagaagggaggcaccgagagtcaggacaccctgtgtcagaactgccccccggggaccttctctcccaatgggaccctggaggaatgtcagcaccagaccaagtgcagctggctggtgacgaaggccggagctgggaccagcagctcccactgggtatggtggtttctctcagggagcctcgtcatcgtcattgtttgctccacagttggcctaatcatatgtgtgaaaagaagaaagccaaggggtgatgtagtcaaggtgatcgtctccgtccagcggaaaagacaggaggcagaaggtgaggccacagtcattgaggccctgcaggcccctccggacgtcaccacggtggccgtggaggagacaataccctcattcacggggaggagcccaaaccactgacccacagactctgcaccccgacgccagagatacctggagcgacggctgctgaaagaggctgtccacctggcgaaaccaccggagcccggaggcttgggggctccgccctgggctggcttccgtctcctccagtggagggagaggtggggcccctgctggggtagagctggggacgccacgtgccattcccatgggccagtgagggcctggggcctctgttctgctgtggcctgagctccccagagtcctgaggaggagcgccagttgcccctcgctcacagaccacacacccagccctcctgggccagcccagagggcccttcagaccccagctgtctgcgcgtctgactcttgtggcctcagcaggacaggccccgggcactgcctcacagccaaggctggactgggttggctgcagtgtggtgtttagtggataccacatcggaagtgattttctaaattggatttgaattcggctcctgttttctatttgtcatgaaacagtgtatttggggagatgctgtgggaggatgtaaatatcttgtttctcctcaaaaaaaaaaaaaaaaaaaaaaaaaataaaaaaaaaaaaaaaacataaaaaaaaaaaaacaaaaaaaaaataaatataaaaagaaccattataaaatttatccttatattaattctattaaaaaatacggggcggggttttacaatcttggaaggggaaaaccctggggtacccacttaaaccgcttggaacaaacccctttcccacgggggttaattcaagggccgcactatgccctttccttggcacacctgtggggtataggcatttttgcgttttttttt

SEQ ID NO: 376934 - DNA, 2511 bp, Homo sapiens
cgagggactcactggtgcctgccttggggctccgggactgtgggctgtctccatccggaggtctccctaccaccaggctctgtggggcagggaagcccagtggggtgcagggagccaggaagctggggtggggtcagggcagggtccacagggagaccgggcgaggctggcagccttcccagtccgcgcagcgtctctgcagggggagcaagagctgcccttccacccctcccaggggacgggtaggggcactctgggcttttcccaccccctcacgcagggacacaggcctggtgggtctatgactgaaattggccagaccgcattctggtggttttattcggaagggaagtttaccctgttcagcagaagctgagatgggaacaggaaacccacagggcccctttattcggcaaaaatgtcagtcagcgccacggggagcagccgagggtccctgagtgtgtgagtgaggtggggaaacacagatggactttggggggctcccccttctacaggaaacccggagtggactggaacggtgcagggggagaactcgcccctcccatcgggcgcctccttcataccggcccttcccctcggctttgcctggacagctcctgcctcccgcagggcccacctgtgtcccccagcgccgctccacccagcaggcctgagcccctctctgctgccagacaccccctgctgcccactctcctgctgctcgggttctgaggcacagcttgtcacaccgaggcggattctctttctctttctctttctcttctggcccacagccgcagcaatggcgctgagttcctctgctggagttcatcctgctagctgggttcccgagctgccggtctgagcctgaggcatggagcctcctggagactgggggcctcctccctggagatccacccccaaaaccgacgtcttgaggctggtgctgtatctcaccttcctgggagccccctgctacgccccagctctgccgtcctgcaaggaggacgagtacccagtgggctccgagtgctgccccaagtgcagtccaggttatcgtgtgaaggaggcctgcggggagctgacgggcacagtgtgtgaaccctgccctccaggcacctacattgcccacctcaatggcctaagcaagtgtctgcagtgccaaatgtgtgacccagccatgggcctgcgcgcgagccggaactgctccaggacagagaacgccgtgtgtggctgcagcccaggccacttctgcatcgtccaggacggggaccactgcgccgcgtgccgcgcttacgccacctccagcccgggccagagggtgcagaagggaggcaccgagagtcaggacaccctgtgtcagaactgccccccggggaccttctctcccaatgggaccctggaggaatgtcagcaccagaccaagtgcagctggctggtgacgaaggccggagctgggaccagcagctcccactgggtatggtggtttctctcagggagcctcgtcatcgtcattgtttgctccacagttggcctaatcatatgtgtgaaaagaagaaagccaaggggtgatgtagtcaaggtgatcgtctccgtccagcggaaaagacaggaggcagaaggtgaggccacagtcattgaggccctgcaggcccctccggacgtcaccacggtggccgtggaggagacaataccctcattcacggggaggagcccaaaccactgacccacagactctgcaccccgaaaccaccggagcccggaggcttgggggctccgccctgggctggcttccgtctcctccagtggagggagaggtggggcccctgctggggtagagctggggacgccacgtgccattcccatgggccagtgagggcctggggcctctgttctgctgtggcctgagctccccagagtcctgaggaggagcgccagttgcccctcgctcacagaccacacacccagccctcctgggccagcccagagggcccttcagaccccagctgtctgcgcgtctgactcttgtggcctcagcaggacaggccccgggcactgcctcacagccaaggctggactgggttggctgcagtgtggtgtttagtggataccacatcggaagtgattttctaaattggatttgaattcggctcctgttttctatttgtcatgaaacagtgtatttggggagatgctgtgggaggatgtaaatatcttgtttctcctcaaaaaaaaaaaaaaaaaaaaaaaaaataaaaaaaaaaaaaaaacataaaaaaaaaaaaacaaaaaaaaaataaatataaaaagaaccattataaaatttatccttatattaattctattaaaaaatacggggcggggttttacaatcttggaaggggaaaaccctggggtacccacttaaaccgcttggaacaaacccctttcccacgggggttaattcaagggccgcactatgccctttccttggcacacctgtggggtataggcatttttgcgttttttttt

SEQ ID NO: 376935 - DNA, 1882 bp, Homo sapiens
ggagattcaggctgtggggccaagcctggcagagcccacagggcagccagggcatctcccaatgcctgtcctgacccccttaggtgctgtatctcaccttcctgggagccccctgctacgccccagctctgccgtcctgcaaggaggacgagtacccagtgggctccgagtgctgccccaagtgcagtccaggttatcgtgtgaaggaggcctgcggggagctgacgggcacagtgtgtgaaccctgccctccaggcacctacattgcccacctcaatggcctaagcaagtgtctgcagtgccaaatgtgtgacccagccatgggcctgcgcgcgagccggaactgctccaggacagagaacgccgtgtgtggctgcagcccaggccacttctgcatcgtccaggacggggaccactgcgccgcgtgccgcgcttacgccacctccagcccgggccagagggtgcagaagggaggcaccgagagtcaggacaccctgtgtcagaactgccccccggggaccttctctcccaatgggaccctggaggaatgtcagcaccagaccaaccgagcttggaaaagtcagacagacctctgaggtctcatcctggagctgccaccagcccagcctccctgggacctgtcttcactgcctggggccctgggagccagggaggctccctgaggctgagtgaacactgggcgctgcacctggctctcccacgtcctcggccccactcccgcaggtgcagctggctggtgacgaaggccggagctgggaccagcagctcccactgggtatggtggtttctctcagggagcctcgtcatcgtcattgtttgctccacagttggcctaatcatatgtgtgaaaagaagaaagccaaggggtgatgtagtcaaggtgatcgtctccgtccagcggaaaagacaggaggcagaaggtgaggccacagtcattgaggccctgcaggcccctccggacgtcaccacggtggccgtggaggagacaataccctcattcacggggaggagcccaaaccactgacccacagactctgcaccccgacgccagagatacctggagcgacggctgctgaaagaggctgtccacctggcgaaaccaccggagcccggaggcttgggggctccgccctgggctggcttccgtctcctccagtggagggagaggtggggcccctgctggggtagagctggggacgccacgtgccattcccatgggccagtgagggcctggggcctctgttctgctgtggcctgagctccccagagtcctgaggaggagcgccagttgcccctcgctcacagaccacacacccagccctcctgggccagcccagagggcccttcagaccccagctgtctgcgcgtctgactcttgtggcctcagcaggacaggccccgggcactgcctcacagccaaggctggactgggttggctgcagtgtggtgtttagtggataccacatcggaagtgattttctaaattggatttgaattcggctcctgttttctatttgtcatgaaacagtgtatttggggagatgctgtgggaggatgtaaatatcttgtttctcctcaaaaaaaaaaaaaaaaaaaaaaaaaataaaaaaaaaaaaaaaacataaaaaaaaaaaaacaaaaaaaaaataaatataaaaagaaccattataaaatttatccttatattaattctattaaaaaatacggggcggggttttacaatcttggaaggggaaaaccctggggtacccacttaaaccgcttggaacaaacccctttcccacgggggttaattcaagggccgcactatgccctttccttggcacacctgtggggtataggcatttttgcgttttttttt

SEQ ID NO: 376936 - DNA, 2326 bp, Homo sapiens
cgagggactcactggtgcctgccttggggctccgggactgtgggctgtctccatccggaggtctccctaccaccaggctctgtggggcagggaagcccagtggggtgcagggagccaggaagctggggtggggtcagggcagggtccacagggagaccgggcgaggctggcagccttcccagtccgcgcagcgtctctgcagggggagcaagagctgcccttccacccctcccaggggacgggtaggggcactctgggcttttcccaccccctcacgcagggacacaggcctggtgggtctatgactgaaattggccagaccgcattctggtggttttattcggaagggaagtttaccctgttcagcagaagctgagatgggaacaggaaacccacagggcccctttattcggcaaaaatgtcagtcagcgccacggggagcagccgagggtccctgagtgtgtgagtgaggtggggaaacacagatggactttggggggctcccccttctacaggaaacccggagtggactggaacggtgcagggggagaactcgcccctcccatcgggcgcctccttcataccggcccttcccctcggctttgcctggacagctcctgcctcccgcagggcccacctgtgtcccccagcgccgctccacccagcaggcctgagcccctctctgctgccagacaccccctgctgcccactctcctgctgctcgggttctgaggcacagcttgtcacaccgaggcggattctctttctctttctctttctcttctggcccacagccgcagcaatggcgctgagttcctctgctggagttcatcctgctagctgggttcccgagctgccggtctgagcctgaggcatggagcctcctggagactgggggcctcctccctggagatccacccccaaaaccgacgtcttgaggctggtgctgtatctcaccttcctgggagccccctgctacgccccagctctgccgtcctgcaaggaggacgagtacccagtgggctccgagtgctgccccaagtgcagtccaggttatcgtgtgaaggaggcctgcggggagctgacgggcacagtgtgtgaaccctgccctccaggcacctacattgcccacctcaatggcctaagcaagtgtctgcagtgccaaatgtgtgacccagccatgggcctgcgcgcgagccggaactgctccaggacagagaacgccgtgtgtggctgcagcccaggccacttctgcatcgtccaggacggggaccactgcgccgcgtgccgcgcttacgccacctccagcccgggccagagggtgcagaagggaggcaccgagagtcaggacaccctgtgtcagaactgccccccggggaccttctctcccaatgggaccctggaggaatgtcagcaccagaccaagtgcagctggctggtgacgaaggccggagctgggaccagcagctcccactgggtatggtggtttctctcagggagcctcgtcatcgtcattgtttgctccacagttggcctaatcatatgtgtgaaaagaagaaagccaaggggtgatgtagtcaaggtgatcgtctccgtccagcggaaaagacaggaggcagaaggtgaggccacagtcattgaggccctgcaggcccctccggacgccacgtgccattcccatgggccagtgagggcctggggcctctgttctgctgtggcctgagctccccagagtcctgaggaggagcgccagttgcccctcgctcacagaccacacacccagccctcctgggccagcccagagggcccttcagaccccagctgtctgcgcgtctgactcttgtggcctcagcaggacaggccccgggcactgcctcacagccaaggctggactgggttggctgcagtgtggtgtttagtggataccacatcggaagtgattttctaaattggatttgaattcggctcctgttttctatttgtcatgaaacagtgtatttggggagatgctgtgggaggatgtaaatatcttgtttctcctcaaaaaaaaaaaaaaaaaaaaaaaaaataaaaaaaaaaaaaaaacataaaaaaaaaaaaacaaaaaaaaaataaatataaaaagaaccattataaaatttatccttatattaattctattaaaaaatacggggcggggttttacaatcttggaaggggaaaaccctggggtacccacttaaaccgcttggaacaaacccctttcccacgggggttaattcaagggccgcactatgccctttccttggcacacctgtggggtataggcatttttgcgttttttttt

SEQ ID NO: 376937 - DNA, 895 bp, Homo sapiens
cgctggggctggtgtttctggtgtacatggtgggggctcccagttctctgagggtcctgagtctttcaagtacagccacggtagctcaggaaagaacccaccccctcaaactgaaagcagtaaaatgaacccgagaacctggagtcccaggggggcctgagcaggcagggtctccacgattcgtgtgctcacagcggagaggtggggcccctgctggggtagagctggggacgccacgtgccattcccatgggccagtgagggcctggggcctctgttctgctgtggcctgagctccccagagtcctgaggaggagcgccagttgcccctcgctcacagaccacacacccagccctcctgggccagcccagagggcccttcagaccccagctgtctgcgcgtctgactcttgtggcctcagcaggacaggccccgggcactgcctcacagccaaggctggactgggttggctgcagtgtggtgtttagtggataccacatcggaagtgattttctaaattggatttgaattcggctcctgttttctatttgtcatgaaacagtgtatttggggagatgctgtgggaggatgtaaatatcttgtttctcctcaaaaaaaaaaaaaaaaaaaaaaaaaataaaaaaaaaaaaaaaacataaaaaaaaaaaaacaaaaaaaaaataaatataaaaagaaccattataaaatttatccttatattaattctattaaaaaatacggggcggggttttacaatcttggaaggggaaaaccctggggtacccacttaaaccgcttggaacaaacccctttcccacgggggttaattcaagggccgcactatgccctttccttggcacacctgtggggtataggcatttttgcgttttttttt

SEQ ID NO: 376938 - DNA, 2094 bp, Homo sapiens
cgagggactcactggtgcctgccttggggctccgggactgtgggctgtctccatccggaggtctccctaccaccaggctctgtggggcagggaagcccagtggggtgcagggagccaggaagctggggtggggtcagggcagggtccacagggagaccgggcgaggctggcagccttcccagtccgcgcagcgtctctgcagggggagcaagagctgcccttccacccctcccaggggacgggtaggggcactctgggcttttcccaccccctcacgcagggacacaggcctggtgggtctatgactgaaattggccagaccgcattctggtggttttattcggaagggaagtttaccctgttcagcagaagctgagatgggaacaggaaacccacagggcccctttattcggcaaaaatgtcagtcagcgccacggggagcagccgagggtccctgagtgtgtgagtgaggtggggaaacacagatggactttggggggctcccccttctacaggaaacccggagtggactggaacggtgcagggggagaactcgcccctcccatcgggcgcctccttcataccggcccttcccctcggctttgcctggacagctcctgcctcccgcagggcccacctgtgtcccccagcgccgctccacccagcaggcctgagcccctctctgctgccagacaccccctgctgcccactctcctgctgctcgggttctgaggcacagcttgtcacaccgaggcggattctctttctctttctctttctcttctggcccacagccgcagcaatggcgctgagttcctctgctggagttcatcctgctagctgggttcccgagctgccggtctgagcctgaggcatggagcctcctggagactgggggcctcctccctggagatccacccccaaaaccgacgtcttgaggctggtgctgtatctcaccttcctgggagccccctgctacgccccagctctgccgtcctgcaaggaggacgagtacccagtgggctccgagtgctgccccaagtgcagtccaggttatcgtgtgaaggaggcctgcggggagctgacgggcacagtgtgtgaaccctgccctccaggcacctacattgcccacctcaatggcctaagcaagtgtctgcagtgccaaatgtgtgacccagatattggttccccctgtgacctcaggggaagaggtcacctggaggctggtgcccacctgagtccaggcagacagaaaggggaaccagacccagaggtggcctttgagtcactgagcgcagagcctgtccatgcggccaacggctctgtccccttggagcctcatgccaggctcagcatggccagtgctccctgcggccaggcaggactgcacctgcgggacagggctgacggcacacctgggggcagggcctgagcctacagggaggcacagggcaggtgggctagccatgaacagaagaggaagctggagtgctttgggggttcatgcatgtaggctgggatttggggctcacacctcaacctgcatgcccagttccatgcccctcccctcttgtgaaagcacctgtctacttgggctgaggatgtgggggcacaggtggcaggtgaggctgccctcaggaggggcccaggcccagcttgtaccccacctccaccagtacctgaagaagtggggctctcaccctacctgcctctgccattggaatggcctggtttgcacagatgggaaacccgtttgcggggtgggtgtctgggtgggcacgtggggcgaggacctgcctgcgggaccctgccctggaactgacagtgcaagctcggcgtcctgcccatctgggcagaaggctggtttctcccatcaacgaagccctcccaggaccttcctgcaagccctcgtcccacacgcagctctgccgtcccttggtgtccctcccggcctcaggtcctccatgctgggtacctctgggcacctcgtttggctgagccaggggttcagcctggcagggcgccctggcagcagtccttggcctgtggatgctgtcctggcccgtggatggtgtcccggcctccacgtacccc

SEQ ID NO: 376939 - DNA, 1572 bp, Homo sapiens
cgagggactcactggtgcctgccttggggctccgggactgtgggctgtctccatccggaggtctccctaccaccaggctctgtggggcagggaagcccagtggggtgcagggagccaggaagctggggtggggtcagggcagggtccacagggagaccgggcgaggctggcagccttcccagtccgcgcagcgtctctgcagggggagcaagagctgcccttccacccctcccaggggacgggtaggggcactctgggcttttcccaccccctcacgcagggacacaggcctggtgggtctatgactgaaattggccagaccgcattctggtggttttattcggaagggaagtttaccctgttcagcagaagctgagatgggaacaggaaacccacagggcccctttattcggcaaaaatgtcagtcagcgccacggggagcagccgagggtccctgagtgtgtgagtgaggtggggaaacacagatggactttggggggctcccccttctacaggaaacccggagtggactggaacggtgcagggggagaactcgcccctcccatcgggcgcctccttcataccggcccttcccctcggctttgcctggacagctcctgcctcccgcagggcccacctgtgtcccccagcgccgctccacccagcaggcctgagcccctctctgctgccagacaccccctgctgcccactctcctgctgctcgggttctgaggcacagcttgtcacaccgaggcggattctctttctctttctctttctcttctggcccacagccgcagcaatggcgctgagttcctctgctggagttcatcctgctagctgggttcccgagctgccggtctgagcctgaggcatggagcctcctggagactgggggcctcctccctggagatccacccccaaaaccgacgtcttgaggctggtgctgtatctcaccttcctgggagccccctgctacgccccagctctgccgtcctgcaaggaggacgagtacccagtgggctccgagtgctgccccaagtgcagtccaggttatcgtgtgaaggaggcctgcggggagctgacgggcacagtgtgtgaaccctgccctccaggcacctacattgcccacctcaatggcctaagcaagtgtctgcagtgccaaatgtgtgacccaggtaagaggccagcacagccggcccagcctccgcttgggcagcctggatgcccccgcaccctgcaccctctctccatggccacagtgccccaggaaggccccggctgccccaggccaggtcccaaccccatctccatggatgcaccctgcaggggacgccttgaggtcagcctccggcccccgtccacctctgtctcacctctcactttgtcaccgccaggtgggccatcctgagcttggcgactgacccttatccctcgtccttggctcctctggtgcccggggtgggtgcccagacctctcctgtgcccacgtccctagctgcaaagtggaatgggatggtgctgggactctccggccggcactcgggcctgctgcttccccacagggcttct

SEQ ID NO: 376940 - DNA, 2563 bp, Homo sapiens
cgagggactcactggtgcctgccttggggctccgggactgtgggctgtctccatccggaggtctccctaccaccaggctctgtggggcagggaagcccagtggggtgcagggagccaggaagctggggtggggtcagggcagggtccacagggagaccgggcgaggctggcagccttcccagtccgcgcagcgtctctgcagggggagcaagagctgcccttccacccctcccaggggacgggtaggggcactctgggcttttcccaccccctcacgcagggacacaggcctggtgggtctatgactgaaattggccagaccgcattctggtggttttattcggaagggaagtttaccctgttcagcagaagctgagatgggaacaggaaacccacagggcccctttattcggcaaaaatgtcagtcagcgccacggggagcagccgagggtccctgagtgtgtgagtgaggtggggaaacacagatggactttggggggctcccccttctacaggaaacccggagtggactggaacggtgcagggggagaactcgcccctcccatcgggcgcctccttcataccggcccttcccctcggctttgcctggacagctcctgcctcccgcagggcccacctgtgtcccccagcgccgctccacccagcaggcctgagcccctctctgctgccagacaccccctgctgcccactctcctgctgctcgggttctgaggcacagcttgtcacaccgaggcggattctctttctctttctctttctcttctggcccacagccgcagcaatggcgctgagttcctctgctggagttcatcctgctagctgggttcccgagctgccggtctgagcctgaggcatggagcctcctggagactgggggcctcctccctggagatccacccccaaaaccgacgtcttgaggctggtgctgtatctcaccttcctgggagccccctgctacgccccagctctgccgtcctgcaaggaggacgagtacccagtgggctccgagtgctgccccaagtgcagtccaggttatcgtgtgaaggaggcctgcggggagctgacgggcacagtgtgtgaaccctgccctccaggcacctacattgcccacctcaatggcctaagcaagtgtctgcagtgccaaatgtgtgacccagccatgggcctgcgcgcgagccggaactgctccaggacagagaacgccgtgtgtggctgcagcccaggccacttctgcatcgtccaggacggggaccactgcgccgcgtgccgcgcttacgccacctccagcccgggccagagggtgcagaagggaggcaccgagagtcaggacaccctgtgtcagaactgccccccggggaccttctctcccaatgggaccctggaggaatgtcagcaccagaccaagtgcagctggctggtgacgaaggccggagctgggaccagcagctcccactgggtatggtggtttctctcagggagcctcgtcatcgtcattgtttgctccacagttggcctaatcatatgtgtgaaaagaagaaagccaaggggtgatgtagtcaaggtgatcgtctccgtccagcggaaaagacaggaggcagaaggtgaggccacagtcattgaggccctgcaggcccctccggacgtcaccacggtggccgtggaggagacaataccctcattcacggggaggagcccaaaccactgacccacagactctgcaccccgacgccagagatacctggagcgacggctgctgaaagaggctgtccacctggcgaaaccaccggagcccggaggcttgggggctccgccctgggctggcttccgtctcctccagtggagggagaggtggggcccctgctggggtagagctggggacgccacgtgccattcccatgggccagtgagggcctggggcctctgttctgctgtggcctgagctccccagagtcctgaggaggagcgccagttgcccctcgctcacagaccacacacccagccctcctgggccagcccagagggcccttcagaccccagctgtctgcgcgtctgactcttgtggcctcagcaggacaggccccgggcactgcctcacagccaaggctggactgggttggctgcagtgtggtgtttagtggataccacatcggaagtgattttctaaattggatttgaattcggctcctgttttctatttgtcatgaaacagtgtatttggggagatgctgtgggaggatgtaaatatcttgtttctcctcaaaaaaaaaaaaaaaaaaaaaaaaaataaaaaaaaaaaaaaaacataaaaaaaaaaaaacaaaaaaaaaataaatataaaaagaaccattataaaatttatccttatattaattctattaaaaaatacggggcggggttttacaatcttggaaggggaaaaccctggggtacccacttaaaccgcttggaacaaacccctttcccacgggggttaattcaagggccgcactatgccctttccttggcacacctgtggggtataggcatttttgcgttttttttt

SEQ ID NO: 376941 - DNA, 1947 bp, Homo sapiens
tcccgtacactctccgagacatcggcacgggtgcccaggctccacccagcaggcctgagcccctctctgctgccagacaccccctgctgcccactctcctgctgctcgggttctgaggcacagcttgtcacaccgaggcggattctctttctctttctctttctcttctggcccacagccgcagcaatggcgctgagttcctctgctggagttcatcctgctagctgggttcccgagctgccggtctgagcctgaggcatggagcctcctggagactgggggcctcctccctggagatccacccccaaaaccgacgtcttgaggctggtgctgtatctcaccttcctgggagccccctgctacgccccagctctgccgtcctgcaaggaggacgagtacccagtgggctccgagtgctgccccaagtgcagtccaggttatcgtgtgaaggaggcctgcggggagctgacgggcacagtgtgtgaaccctgccctccaggcacctacattgcccacctcaatggcctaagcaagtgtctgcagtgccaaatgtgtgacccagccatgggcctgcgcgcgagccggaactgctccaggacagagaacgccgtgtgtggctgcagcccaggccacttctgcatcgtccaggacggggaccactgcgccgcgtgccgcgcttacgccacctccagcccgggccagagggtgcagaagggaggcaccgagagtcaggacaccctgtgtcagaactgccccccggggaccttctctcccaatgggaccctggaggaatgtcagcaccagaccaagtgcagctggctggtgacgaaggccggagctgggaccagcagctcccactgggtatggtggtttctctcagggagcctcgtcatcgtcattgtttgctccacagttggcctaatcatatgtgtgaaaagaagaaagccaaggggtgatgtagtcaaggtgatcgtctccgtccagcggaaaagacaggaggcagaaggtgaggccacagtcattgaggccctgcaggcccctccggacgtcaccacggtggccgtggaggagacaataccctcattcacggggaggagcccaaaccactgacccacagactctgcaccccgacgccagagatacctggagcgacggctgctgaaagaggctgtccacctggcgaaaccaccggagcccggaggcttgggggctccgccctgggctggcttccgtctcctccagtggagggagaggtggggcccctgctggggtagagctggggacgccacgtgccattcccatgggccagtgagggcctggggcctctgttctgctgtggcctgagctccccagagtcctgaggaggagcgccagttgcccctcgctcacagaccacacacccagccctcctgggccagcccagagggcccttcagaccccagctgtctgcgcgtctgactcttgtggcctcagcaggacaggccccgggcactgcctcacagccaaggctggactgggttggctgcagtgtggtgtttagtggataccacatcggaagtgattttctaaattggatttgaattcggctcctgttttctatttgtcatgaaacagtgtatttggggagatgctgtgggaggatgtaaatatcttgtttctcctcaaaaaaaaaaaaaaaaaaaaaaaaaataaaaaaaaaaaaaaaacataaaaaaaaaaaaacaaaaaaaaaataaatataaaaagaaccattataaaatttatccttatattaattctattaaaaaatacggggcggggttttacaatcttggaaggggaaaaccctggggtacccacttaaaccgcttggaacaaacccctttcccacgggggttaattcaagggccgcactatgccctttccttggcacacctgtggggtataggcatttttgcgttttttttt

SEQ ID NO: 376942 - DNA, 2011 bp, Homo sapiens
cgagggactcactggtgcctgccttggggctccgggactgtgggctgtctccatccggaggtctccctaccaccaggctctgtggggcagggaagcccagtggggtgcagggagccaggaagctggggtggggtcagggcagggtccacagggagaccgggcgaggctggcagccttcccagtccgcgcagcgtctctgcagggggagcaagagctgcccttccacccctcccaggggacggccgcagcaatggcgctgagttcctctgctggagttcatcctgctagctgggttcccgagctgccggtctgagcctgaggcatggagcctcctggagactgggggcctcctccctggagatccacccccaaaaccgacgtcttgaggctggtgctgtatctcaccttcctgggagccccctgctacgccccagctctgccgtcctgcaaggaggacgagtacccagtgggctccgagtgctgccccaagtgcagtccaggttatcgtgtgaaggaggcctgcggggagctgacgggcacagtgtgtgaaccctgccctccaggcacctacattgcccacctcaatggcctaagcaagtgtctgcagtgccaaatgtgtgacccagccatgggcctgcgcgcgagccggaactgctccaggacagagaacgccgtgtgtggctgcagcccaggccacttctgcatcgtccaggacggggaccactgcgccgcgtgccgcgcttacgccacctccagcccgggccagagggtgcagaagggaggcaccgagagtcaggacaccctgtgtcagaactgccccccggggaccttctctcccaatgggaccctggaggaatgtcagcaccagaccaagtgcagctggctggtgacgaaggccggagctgggaccagcagctcccactgggtatggtggtttctctcagggagcctcgtcatcgtcattgtttgctccacagttggcctaatcatatgtgtgaaaagaagaaagccaaggggtgatgtagtcaaggtgatcgtctccgtccagcggaaaagacaggaggcagaaggtgaggccacagtcattgaggccctgcaggcccctccggacgtcaccacggtggccgtggaggagacaataccctcattcacggggaggagcccaaaccactgacccacagactctgcaccccgacgccagagatacctggagcgacggctgctgaaagaggctgtccacctggcgaaaccaccggagcccggaggcttgggggctccgccctgggctggcttccgtctcctccagtggagggagaggtggggcccctgctggggtagagctggggacgccacgtgccattcccatgggccagtgagggcctggggcctctgttctgctgtggcctgagctccccagagtcctgaggaggagcgccagttgcccctcgctcacagaccacacacccagccctcctgggccagcccagagggcccttcagaccccagctgtctgcgcgtctgactcttgtggcctcagcaggacaggccccgggcactgcctcacagccaaggctggactgggttggctgcagtgtggtgtttagtggataccacatcggaagtgattttctaaattggatttgaattcggctcctgttttctatttgtcatgaaacagtgtatttggggagatgctgtgggaggatgtaaatatcttgtttctcctcaaaaaaaaaaaaaaaaaaaaaaaaaataaaaaaaaaaaaaaaacataaaaaaaaaaaaacaaaaaaaaaataaatataaaaagaaccattataaaatttatccttatattaattctattaaaaaatacggggcggggttttacaatcttggaaggggaaaaccctggggtacccacttaaaccgcttggaacaaacccctttcccacgggggttaattcaagggccgcactatgccctttccttggcacacctgtggggtataggcatttttgcgttttttttt

SEQ ID NO: 376943 - DNA, 1829 bp, Homo sapiens
cgagggactcactggtgcctgccttggggctccgggactgtgggctgtctccatccggagccgcagcaatggcgctgagttcctctgctggagttcatcctgctagctgggttcccgagctgccggtctgagcctgaggcatggagcctcctggagactgggggcctcctccctggagatccacccccaaaaccgacgtcttgaggctggtgctgtatctcaccttcctgggagccccctgctacgccccagctctgccgtcctgcaaggaggacgagtacccagtgggctccgagtgctgccccaagtgcagtccaggttatcgtgtgaaggaggcctgcggggagctgacgggcacagtgtgtgaaccctgccctccaggcacctacattgcccacctcaatggcctaagcaagtgtctgcagtgccaaatgtgtgacccagccatgggcctgcgcgcgagccggaactgctccaggacagagaacgccgtgtgtggctgcagcccaggccacttctgcatcgtccaggacggggaccactgcgccgcgtgccgcgcttacgccacctccagcccgggccagagggtgcagaagggaggcaccgagagtcaggacaccctgtgtcagaactgccccccggggaccttctctcccaatgggaccctggaggaatgtcagcaccagaccaagtgcagctggctggtgacgaaggccggagctgggaccagcagctcccactgggtatggtggtttctctcagggagcctcgtcatcgtcattgtttgctccacagttggcctaatcatatgtgtgaaaagaagaaagccaaggggtgatgtagtcaaggtgatcgtctccgtccagcggaaaagacaggaggcagaaggtgaggccacagtcattgaggccctgcaggcccctccggacgtcaccacggtggccgtggaggagacaataccctcattcacggggaggagcccaaaccactgacccacagactctgcaccccgacgccagagatacctggagcgacggctgctgaaagaggctgtccacctggcgaaaccaccggagcccggaggcttgggggctccgccctgggctggcttccgtctcctccagtggagggagaggtggggcccctgctggggtagagctggggacgccacgtgccattcccatgggccagtgagggcctggggcctctgttctgctgtggcctgagctccccagagtcctgaggaggagcgccagttgcccctcgctcacagaccacacacccagccctcctgggccagcccagagggcccttcagaccccagctgtctgcgcgtctgactcttgtggcctcagcaggacaggccccgggcactgcctcacagccaaggctggactgggttggctgcagtgtggtgtttagtggataccacatcggaagtgattttctaaattggatttgaattcggctcctgttttctatttgtcatgaaacagtgtatttggggagatgctgtgggaggatgtaaatatcttgtttctcctcaaaaaaaaaaaaaaaaaaaaaaaaaataaaaaaaaaaaaaaaacataaaaaaaaaaaaacaaaaaaaaaataaatataaaaagaaccattataaaatttatccttatattaattctattaaaaaatacggggcggggttttacaatcttggaaggggaaaaccctggggtacccacttaaaccgcttggaacaaacccctttcccacgggggttaattcaagggccgcactatgccctttccttggcacacctgtggggtataggcatttttgcgttttttttt

SEQ ID NO: 376944 - DNA, 2414 bp, Homo sapiens
cgagggactcactggtgcctgccttggggctccgggactgtgggctgtctccatccggaggtctccctaccaccaggctctgtggggcagggaagcccagtggggtgcagggagccaggaagctggggtggggtcagggcagggtccacagggagaccgggcgaggctggcagccttcccagtccgcgcagcgtctctgcagggggagcaagagctgcccttccacccctcccaggggacgggtaggggcactctgggcttttcccaccccctcacgcagggacacaggcctggtgggtctatgactgaaattggccagaccgcattctggtggttttattcggaagggaagtttaccctgttcagcagaagctgagatgggaacaggaaacccacagggcccctttattcggcaaaaatgtcagtcagcgccacggggagcagccgagggtccctgagtgtgtgaccgcagcaatggcgctgagttcctctgctggagttcatcctgctagctgggttcccgagctgccggtctgagcctgaggcatggagcctcctggagactgggggcctcctccctggagatccacccccaaaaccgacgtcttgaggctggtgctgtatctcaccttcctgggagccccctgctacgccccagctctgccgtcctgcaaggaggacgagtacccagtgggctccgagtgctgccccaagtgcagtccaggttatcgtgtgaaggaggcctgcggggagctgacgggcacagtgtgtgaaccctgccctccaggcacctacattgcccacctcaatggcctaagcaagtgtctgcagtgccaaatgtgtgacccagccatgggcctgcgcgcgagccggaactgctccaggacagagaacgccgtgtgtggctgcagcccaggccacttctgcatcgtccaggacggggaccactgcgccgcgtgccgcgcttacgccacctccagcccgggccagagggtgcagaagggaggcaccgagagtcaggacaccctgtgtcagaactgccccccggggaccttctctcccaatgggaccctggaggaatgtcagcaccagaccaaccgagcttggaaaagtcagacagacctctgaggtctcatcctggagctgccaccagcccagcctccctgggacctgtcttcactgcctggggccctgggagccagggaggctccctgaggctgagtgaacactgggcgctgcacctggctctcccacgtcctcggccccactcccgcaggtgcagctggctggtgacgaaggccggagctgggaccagcagctcccactgggtatggtggtttctctcagggagcctcgtcatcgtcattgtttgctccacagttggcctaatcatatgtgtgaaaagaagaaagccaaggggtgatgtagtcaaggtgatcgtctccgtccagcggaaaagacaggaggcagaaggtgaggccacagtcattgaggccctgcaggcccctccggacgtcaccacggtggccgtggaggagacaataccctcattcacggggaggagcccaaaccactgacccacagactctgcaccccgacgccagagatacctggagcgacggctgctgaaagaggctgtccacctggcgaaaccaccggagcccggaggcttgggggctccgccctgggctggcttccgtctcctccagtggagggagaggtggggcccctgctggggtagagctggggacgccacgtgccattcccatgggccagtgagggcctggggcctctgttctgctgtggcctgagctccccagagtcctgaggaggagcgccagttgcccctcgctcacagaccacacacccagccctcctgggccagcccagagggcccttcagaccccagctgtctgcgcgtctgactcttgtggcctcagcaggacaggccccgggcactgcctcacagccaaggctggactgggttggctgcagtgtggtgtttagtggataccacatcggaagtgattttctaaattggatttgaattcggctcctgttttctatttgtcatgaaacagtgtatttggggagatgctgtgggaggatgtaaatatcttgtttctcctcaaaaaaaaaaaaaaaaaaaaaaaaaataaaaaaaaaaaaaaaacataaaaaaaaaaaaacaaaaaaaaaataaatataaaaagaaccattataaaatttatccttatattaattctattaaaaaatacggggcggggttttacaatcttggaaggggaaaaccctggggtacccacttaaaccgcttggaacaaacccctttcccacgggggttaattcaagggccgcactatgccctttccttggcacacctgtggggtataggcatttttgcgttttttttt

SEQ ID NO: 376945 - DNA, 2471 bp, Homo sapiens
cgagggactcactggtgcctgccttggggctccgggactgtgggctgtctccatccggaggtctccctaccaccaggctctgtggggcagggaagcccagtggggtgcagggagccaggaagctggggtggggtcagggcagggtccacagggagaccgggcgaggctggcagccttcccagtccgcgcagcgtctctgcagggggagcaagagctgcccttccacccctcccaggggacgggtaggggcactctgggcttttcccaccccctcacgcagggacacaggcctggtgggtctatgactgaaattggccagaccgcattctggtggttttattcggaagggaagtttaccctgttcagcagaagctgagatgggaacaggaaacccacagggcccctttattcggcaaaaatgtcagtcagcgccacggggagcagccgagggtccctgagtgtgtgagtgaggtggggaaacacagatggactttggggggctcccccttctacaggaaacccggagtggactggaacggtgcagggggagaactcgcccctcccatcgggcgcctccttcataccggcccttcccctcggctttgcctggacagctcctgcctcccgcagggcccacctgtgtcccccagcgccgctccacccagcaggcctgagcccctctctgctgccagacaccccctgctgcccactctcctgctgctcgggttctgaggcacagcttgtcacaccgaggcggattctctttctctttctctttctcttctggcccacagccgcagcaatggcgctgagttcctctgctggagttcatcctgctagctgggttcccgagctgccggtctgagcctgaggcatggagcctcctggagactgggggcctcctccctggagatccacccccaaaaccgacgtcttgaggctggtgctgtatctcaccttcctgggagccccctgctacgccccagctctgccgtcctgcaaggaggacgagtacccagtgggctccgagtgctgccccaagtgcagtccaggttatcgtgtgaaggaggcctgcggggagctgacgggcacagtgtgtgaaccctgccctccaggcacctacattgcccacctcaatggcctaagcaagtgtctgcagtgccaaatgtgtgacccagccatgggcctgcgcgcgagccggaactgctccaggacagagaacgccgtgtgtggctgcagcccaggccacttctgcatcgtccaggacggggaccactgcgccgcgtgccgcgcttacgccacctccagcccgggccagagggtgcagaagggaggcaccgagagtcaggacaccctgtgtcagaactgccccccggggaccttctctcccaatgggaccctggaggaatgtcagcaccagaccaagtgcagctggctggtgacgaaggccggagctgggaccagcagctcccactgggtatggtggtttctctcagggagcctcgtcatcgtcattgtttgctccacagttggcctaatcatatgtgtgaaaagaagaaagccaaggggtgatgtagtcaaggtgatcgtctccgtccagcggaaaagacaggaggcagaaggtgaggccacagtcattgaggccctgcaggcccctccggacgtcaccacggtggccgtggaggagacaataccctcattcacggggaggagcccaaaccactgacccacagactctgcaccccgacgccagagatacctggagcgacggctgctgaaagaggctgtccacctggcgaaaccaccggagcccggaggcttgggggctccgccctgggctggcttccgtctcctccagtggagggagaggtggggcccctgctggggtagagctggggacgccacgtgccattcccatgggccagtgagggcctggggccagcccagagggcccttcagaccccagctgtctgcgcgtctgactcttgtggcctcagcaggacaggccccgggcactgcctcacagccaaggctggactgggttggctgcagtgtggtgtttagtggataccacatcggaagtgattttctaaattggatttgaattcggctcctgttttctatttgtcatgaaacagtgtatttggggagatgctgtgggaggatgtaaatatcttgtttctcctcaaaaaaaaaaaaaaaaaaaaaaaaaataaaaaaaaaaaaaaaacataaaaaaaaaaaaacaaaaaaaaaataaatataaaaagaaccattataaaatttatccttatattaattctattaaaaaatacggggcggggttttacaatcttggaaggggaaaaccctggggtacccacttaaaccgcttggaacaaacccctttcccacgggggttaattcaagggccgcactatgccctttccttggcacacctgtggggtataggcatttttgcgttttttttt

SEQ ID NO: 376946 - DNA, 2179 bp, Homo sapiens
cgagggactcactggtgcctgccttggggctccgggactgtgggctgtctccatccggaggtctccctaccaccaggctctgtggggcagggaagcccagtggggtgcagggagccaggaagctggggtggggtcagggcagggtccacagggagaccgggcgaggctggcagccttcccagtccgcgcagcgtctctgcagggggagcaagagctgcccttccacccctcccaggggacgggtaggggcactctgggcttttcccaccccctcacgcagggacacaggcctggtgggtctatgactgaaattggccagaccgcattctggtggttttattcggaagggaagtttaccctgttcagcagaagctgagatgggaacaggaaacccacagggcccctttattcggcaaaaatgtcagtcagcgccacggggagcagccgagggtccctgagtgtgtgagtgaggtggggaaacacagatggactttggggggctcccccttctacaggaaacccggagtggactggaacggtgcagggggagaactcgcccctcccatcgggcgcctccttcataccggcccttcccctcggctttgcctggacagctcctgcctcccgcagggcccacctgtgtcccccagcgccgctccacccagcaggcctgagcccctctctgctgccagacaccccctgctgcccactctcctgctgctcgggttctgaggcacagcttgtcacaccgaggcggattctctttctctttctctttctcttctggcccacagccgcagcaatggcgctgagttcctctgctggagttcatcctgctagctgggttcccgagctgccggtctgagcctgaggcatggagcctcctggagactgggggcctcctccctggagatccacccccaaaaccgacgtcttgaggctggtgctgtatctcaccttcctgggagccccctgctacgccccagctctgccgtcctgcaaggaggacgagtacccagtgggctccgagtgctgccccaagtgcagtccaggttatcgtgtgaaggaggcctgcggggagctgacgggcacagtgtgtgaaccctgccctccaggcacctacattgcccacctcaatggcctaagcaagtgtctgcagtgccaaatgtgtgacccagatattggttccccctgtgacctcaggggaagaggtcacctggaggctggtgcccacctgagtccaggcagacagaaaggggaaccagacccagaggtggcctttgagtcactgagcgcagagcctgtccatgcggccaacggctctgtccccttggagcctcatgccaggctcagcatggccagtgctccctgcggccaggcaggactgcacctgcgggacagggctgacggcacacctgggggcagggcctgagcctacagggaggcacagggcaggtgggctagccatgaacagaagaggaagctggagtgctttgggggttcatgcatgtaggctgggatttggggctcacacctcaacctgcatgcccagttccatgcccctcccctcttgtgaaagcacctgtctacttgggctgaggatgtgggggcacaggtggcaggtgaggctgccctcaggaggggcccaggcccagcttgtaccccacctccaccagtacctgaagaagtggggctctcaccctacctgcctctgccattggaatggcctggtttgcacagatgggaaacccgtttgcggggtgggtgtctggtggataccacatcggaagtgattttctaaattggatttgaattcggctcctgttttctatttgtcatgaaacagtgtatttggggagatgctgtgggaggatgtaaatatcttgtttctcctcaaaaaaaaaaaaaaaaaaaaaaaaaataaaaaaaaaaaaaaaacataaaaaaaaaaaaacaaaaaaaaaataaatataaaaagaaccattataaaatttatccttatattaattctattaaaaaatacggggcggggttttacaatcttggaaggggaaaaccctggggtacccacttaaaccgcttggaacaaacccctttcccacgggggttaattcaagggccgcactatgccctttccttggcacacctgtggggtataggcatttttgcgttttttttt

SEQ ID NO: 376947 - DNA, 339 bp, Homo sapiens
ttctcctagaaacctgggataagactggaattttgtgattccccaaaggggcttagaaaaagaggcctctgaattcccttagtgagattgcatttgcccctgtgttgcaaaggtttgtctgatcttgctggccttgcgttgttgttctgaatcctcctttcagtctctccctttgagaaaggaccactctttgcacctagagagacccagcgaggtttcctcctcctaaatcagtttttctggccagttggtccctagcccctaggaacataattgaattgctgtaccttttagctggtttgtcactgtttgagggagtgtctgacctgattagagatg

SEQ ID NO: 376948 - DNA, 242 bp, Homo sapiens
aattcaagcttctaacgatgtatcgtgggcatgtgtatagcttcccaagttcttttacagtccctgctgggactccctgacttactttggttggttcctagtgctacttgttttacaaactacactttgtagaattgattagattaccttgtttatttaatgtgagtttgtgcctttttgtctcaatcttccaatacaggtatattgagaaaaaaagcagtctaataaaatcctagacagaa

SEQ ID NO: 376949 - DNA, 3735 bp, Homo sapiens
tggttgccgcagagacgccccgcccccgcgcggcgctgcggaaccggagctccgggcggcgtcggcagcggcgcgagaggcgacgaggcccgggcggcaggagccggcgcggcgaccgcggcgagggcggcggggacggagcagagcacgacgaagacgcacaggcagccgggccgggccgggccacggggagagcggccggcgggcagcgggcgggaggccgggcgggccgcgggcagccaccgagccgcgaagcgacatggtgctgctcaaggagtatcgagtaatcctgcctgtgtctgtagatgagtatcaagtggggcagctgtattctgtggctgaggccagtaaaaatgaaacgggtggtggcgaaggcgtggaggtcctggtgaatgagccctacgagaaggacggtgagaaaggccagtacacacacaagatctaccacctgcagagcaaagtacccacgtttgttcgaatgctggccccagagggagccctgaatatacacgagaaagcctggaatgcttacccctactgcagaaccgttattacaaatgagtacatgaaagaagactttctgattaaaattgaaacctggcacaaaccagatcttggcacgcaggagaatgtgcataagctggagcctgaggcgtggaaacacgtggaagccgtatatatagacattgcagatcgaagccaagtgctcagcaaggattacaaggcagaggaagacccagcaaaatttaaatctatcaaaacaggccgaggacccttgggccccaattggaagcaagagcttgtaaaccagaaggactgcccatatatgtgtgcatacaaactggtgaccgtcaagttcaagtggtggggcctgcagaacaaagtggagaacttcatccataagcaagagaggcgtctgtttacaaacttccacaggcagctgttctgttggctcgataagtgggttgacctgaccatggacgacattcgaaggatggaagaagagacgaagagacagctggatgaaatgagacaaaaggacccagtgaaaggaatgacagcagatgactaaagccgcctttcccctctgcactttttgcaagacagtggtcaacaggaagacccagcagctccaccctcccaagtgacaggccattttcggacgcagccgttctgtgcccattcttcaggcaactttcgattccttactgtagctaattctagatgcccttcagtattgtgaacaaatagaccgtctggtgtcacagagcccgcgtgtgcaggagcctgctcctccgagatacgtggcgtgtaggttgctgtagttacagcgcctccgtctctctccattgtgttccgatccatttctgtgtgttcccccaacctttatttccaagtgacattttcagtctttcaaatagctgccttttgtgatgtggtgatttaaatgatttaagttcatttgttctcaaccttggggtaaactgaggtattttgcttcctgggaagatcttcgcaattttgagtgctcctgtggggagcggggatgagctaaagatacaatgtttccctgccccgcaccgcttccacaaaatagcaatgtggttttgcagctctgacttctgctcccagtaacccatcgttagggcactctagcactatggaggtacccaaggctcagccagtctctatttaagaaaatttaacaaatacgagtaaccctgtcccaatcactgaatctctagttactactcttagaaacacctgtggcttcttggccctcctgttgcccgctctgaatctctctgcagtctacaaaatcgccccagtcaactctccacttggagggaattgtccagtgtggcccctagaattgagtcaccccctagataccaactgtctgaccccgaggagctctgtaagtccctgctcctcctcttccctttggggctggtgctgccactcagcaataatcctcttttctctgtgctttcttaggtccctgtcctctgtctttgaggctggttaggaagcaagagtcctgatctttcatgctgcacaatatgagcatgcaaaaagctttttccagcagaacatgttccctcgtctccagttgccggaaaggaatttggggatcaagaacttagctcgtcctacccccatgttgagttctgccctggaaaacccaaagcaagtagtgatcatagtacagaacccgaccaaagtaggctggtgaggaagtccaggctccaggggaacagacgctgcccagtgttcatagcttcctgcaacttgacagagcctgagtttgcctcttagtgggagaatgagagagagctgtagtgtcacctgacattccccaaaccttgtgaagcacgttggcctaagtgtgccgtgatcccagcccacactagcctgggtgcatctgctaatgggagaccaaatctttgtccgggaagcaagaagtgggtgggagaatgtatcctgtttttgtcagtttgtttgccttactcatttctaagtgcaataagggagtgtctcacaggattgcacctgtgacatcctgatggatgcttccctgtggccctcctggggcaagggtggacagactcagacccccagcatggttagcgctgaccttcattgaggtccctttggaaccagatgtcttgttacagacaccttcctctgtgtaagtctcctcaccttgaggggtctttagtaatgcatctgggtagcatctcaactgctggtagcatttatctgacttggaaagttggagaagaggcattcctactggagaaaaatgtcagtgttttcctataagctctgtgttagctattcattatatttgtgcttaaagatgttccttcattcatcaactaggggaagtccagatgcgggttatcttgaaagaaacaaactgacattctaggcagacagttgtctatgtggtctgagggtcagcagctgttagtctccttcctttggctcttgagacccacacatatcactttagccctaacaagggctcctcccacctccacctgttgccccagttgaaaagcatccattatgagctgaggtcagcctggatctggaattgcagcccacataaacataaaggaggatgtccctggtctgttccatccccacggatggtgttgctgctgggcaacagtgttggcttcttttaagtaccccctttcctcctcacccacctccaaactgactagcactcagagggacttatgataaaggttcagctccaggggtagtacctgagtgtgtgccatgccccttcagaccagctgcttccatcagaattccagggtcacagccccaacagaagcagcagtgcctctgtaggaggggtgctgggctctggccttctcatgcagagaggtccgggacagggtcagtatcgtgggcatgtgtatagcttcccaagttcttttacagtccctgctgggactccctgacttactttggttggttcctagtgctacttgttttacaaactacactttgtagaattgattagattaccttgtttatttaatgtgagtttgtgcctttttgtctcaatcttccaatacaggtatattgagaaaaaaagcagtctaataaaatcctagacagaaaaaaagacacaaacaaaaaaaaaaacagtaggagacagaggaccaaaaaaagtacaacacgacgatggagagcgagcaaaaggcaaagacg

SEQ ID NO: 376950 - DNA, 3529 bp, Homo sapiens
tggttgccgcagagacgccccgcccccgcgcggcgctgcggaaccggagctccgggcggcgtcggcagcggcgcgagaggcgacgaggcccgggcggcaggagccggcgcggcgaccgcggcgagggcggcggggacggagcagagcacgacgaagacgcacagtcgagtaatcctgcctgtgtctgtagatgagtatcaagtggggcagctgtattctgtggctgaggccagtaaaaatgaaacgggtggtggcgaaggcgtggaggtcctggtgaatgagccctacgagaaggacggtgagaaaggccagtacacacacaagatctaccacctgcagagcaaagtacccacgtttgttcgaatgctggccccagagggagccctgaatatacacgagaaagcctggaatgcttacccctactgcagaaccgttattacaaatgagtacatgaaagaagactttctgattaaaattgaaacctggcacaaaccagatcttggcacgcaggagaatgtgcataagctggagcctgaggcgtggaaacacgtggaagccgtatatatagacattgcagatcgaagccaagtgctcagcaaggattacaaggcagaggaagacccagcaaaatttaaatctatcaaaacaggccgaggacccttgggccccaattggaagcaagagcttgtaaaccagaaggactgcccatatatgtgtgcatacaaactggtgaccgtcaagttcaagtggtggggcctgcagaacaaagtggagaacttcatccataagcaagagaggcgtctgtttacaaacttccacaggcagctgttctgttggctcgataagtgggttgacctgaccatggacgacattcgaaggatggaagaagagacgaagagacagctggatgaaatgagacaaaaggacccagtgaaaggaatgacagcagatgactaaagccgcctttcccctctgcactttttgcaagacagtggtcaacaggaagacccagcagctccaccctcccaagtgacaggccattttcggacgcagccgttctgtgcccattcttcaggcaactttcgattccttactgtagctaattctagatgcccttcagtattgtgaacaaatagaccgtctggtgtcacagagcccgcgtgtgcaggagcctgctcctccgagatacgtggcgtgtaggttgctgtagttacagcgcctccgtctctctccattgtgttccgatccatttctgtgtgttcccccaacctttatttccaagtgacattttcagtctttcaaatagctgccttttgtgatgtggtgatttaaatgatttaagttcatttgttctcaaccttggggtaaactgaggtattttgcttcctgggaagatcttcgcaattttgagtgctcctgtggggagcggggatgagctaaagatacaatgtttccctgccccgcaccgcttccacaaaatagcaatgtggttttgcagctctgacttctgctcccagtaacccatcgttagggcactctagcactatggaggtacccaaggctcagccagtctctatttaagaaaatttaacaaatacgagtaaccctgtcccaatcactgaatctctagttactactcttagaaacacctgtggcttcttggccctcctgttgcccgctctgaatctctctgcagtctacaaaatcgccccagtcaactctccacttggagggaattgtccagtgtggcccctagaattgagtcaccccctagataccaactgtctgaccccgaggagctctgtaagtccctgctcctcctcttccctttggggctggtgctgccactcagcaataatcctcttttctctgtgctttcttaggtccctgtcctctgtctttgaggctggttaggaagcaagagtcctgatctttcatgctgcacaatatgagcatgcaaaaagctttttccagcagaacatgttccctcgtctccagttgccggaaaggaatttggggatcaagaacttagctcgtcctacccccatgttgagttctgccctggaaaacccaaagcaagtagtgatcatagtacagaacccgaccaaagtaggctggtgaggaagtccaggctccaggggaacagacgctgcccagtgttcatagcttcctgcaacttgacagagcctgagtttgcctcttagtgggagaatgagagagagctgtagtgtcacctgacattccccaaaccttgtgaagcacgttggcctaagtgtgccgtgatcccagcccacactagcctgggtgcatctgctaatgggagaccaaatctttgtccgggaagcaagaagtgggtgggagaatgtatcctgtttttgtcagtttgtttgccttactcatttctaagtgcaataagggagtgtctcacaggattgcacctgtgacatcctgatggatgcttccctgtggccctcctggggcaagggtggacagactcagacccccagcatggttagcgctgaccttcattgaggtccctttggaaccagatgtcttgttacagacaccttcctctgtgtaagtctcctcaccttgaggggtctttagtaatgcatctgggtagcatctcaactgctggtagcatttatctgacttggaaagttggagaagaggcattcctactggagaaaaatgtcagtgttttcctataagctctgtgttagctattcattatatttgtgcttaaagatgttccttcattcatcaactaggggaagtccagatgcgggttatcttgaaagaaacaaactgacattctaggcagacagttgtctatgtggtctgagggtcagcagctgttagtctccttcctttggctcttgagacccacacatatcactttagccctaacaagggctcctcccacctccacctgttgccccagttgaaaagcatccattatgagctgaggtcagcctggatctggaattgcagcccacataaacataaaggaggatgtccctggtctgttccatccccacggatggtgttgctgctgggcaacagtgttggcttcttttaagtaccccctttcctcctcacccacctccaaactgactagcactcagagggacttatgataaaggttcagctccaggggtagtacctgagtgtgtgccatgccccttcagaccagctgcttccatcagaattccagggtcacagccccaacagaagcagcagtgcctctgtaggaggggtgctgggctctggccttctcatgcagagaggtccgggacagggtcagtatcgtgggcatgtgtatagcttcccaagttcttttacagtccctgctgggactccctgacttactttggttggttcctagtgctacttgttttacaaactacactttgtagaattgattagattaccttgtttatttaatgtgagtttgtgcctttttgtctcaatcttccaatacaggtatattgagaaaaaaagcagtctaataaaatcctagacagaa

SEQ ID NO: 376951 - DNA, 3561 bp, Homo sapiens
tggttgccgcagagacgccccgcccccgcgcggcgctgcggaaccggagctccgggcggcgtcggcagcggcgcgagaggcgacgaggcccgggcggcaggagccggcgcggcgaccgcggcgagggcggcggggacggagcagagcacgacgaagacgcacaggcagccgggccgggccgggccacggggagagcggccggcgggcagcgggcgggaggccgggcgggccgcgggcagccaccgagccgcgaagcgacatggtgctgctcaaggagtatcgagtaatcctgcctgtgtctgtagatgagtatcaagtggggcagctgtattctgtggctgaggccagtaaaaatgaaacgggtggtggcgaaggcgtggaggtcctggtgaatgagccctacgagaaggacggtgagaaaggccagtacacacacaagatctaccacctgcagagcaaagtacccacgtttgttcgaatgctggccccagagggagccctgaatatacacgagaaagcctggaatgcttacccctactgcagaaccggtgcataagctggagcctgaggcgtggaaacacgtggaagccgtatatatagacattgcagatcgaagccaagtgctcagcaaggattacaaggcagaggaagacccagcaaaatttaaatctatcaaaacaggccgaggacccttgggccccaattggaagcaagagcttgtaaaccagaaggactgcccatatatgtgtgcatacaaactggtgaccgtcaagttcaagtggtggggcctgcagaacaaagtggagaacttcatccataagcaagagaggcgtctgtttacaaacttccacaggcagctgttctgttggctcgataagtgggttgacctgaccatggacgacattcgaaggatggaagaagagacgaagagacagctggatgaaatgagacaaaaggacccagtgaaaggaatgacagcagatgactaaagccgcctttcccctctgcactttttgcaagacagtggtcaacaggaagacccagcagctccaccctcccaagtgacaggccattttcggacgcagccgttctgtgcccattcttcaggcaactttcgattccttactgtagctaattctagatgcccttcagtattgtgaacaaatagaccgtctggtgtcacagagcccgcgtgtgcaggagcctgctcctccgagatacgtggcgtgtaggttgctgtagttacagcgcctccgtctctctccattgtgttccgatccatttctgtgtgttcccccaacctttatttccaagtgacattttcagtctttcaaatagctgccttttgtgatgtggtgatttaaatgatttaagttcatttgttctcaaccttggggtaaactgaggtattttgcttcctgggaagatcttcgcaattttgagtgctcctgtggggagcggggatgagctaaagatacaatgtttccctgccccgcaccgcttccacaaaatagcaatgtggttttgcagctctgacttctgctcccagtaacccatcgttagggcactctagcactatggaggtacccaaggctcagccagtctctatttaagaaaatttaacaaatacgagtaaccctgtcccaatcactgaatctctagttactactcttagaaacacctgtggcttcttggccctcctgttgcccgctctgaatctctctgcagtctacaaaatcgccccagtcaactctccacttggagggaattgtccagtgtggcccctagaattgagtcaccccctagataccaactgtctgaccccgaggagctctgtaagtccctgctcctcctcttccctttggggctggtgctgccactcagcaataatcctcttttctctgtgctttcttaggtccctgtcctctgtctttgaggctggttaggaagcaagagtcctgatctttcatgctgcacaatatgagcatgcaaaaagctttttccagcagaacatgttccctcgtctccagttgccggaaaggaatttggggatcaagaacttagctcgtcctacccccatgttgagttctgccctggaaaacccaaagcaagtagtgatcatagtacagaacccgaccaaagtaggctggtgaggaagtccaggctccaggggaacagacgctgcccagtgttcatagcttcctgcaacttgacagagcctgagtttgcctcttagtgggagaatgagagagagctgtagtgtcacctgacattccccaaaccttgtgaagcacgttggcctaagtgtgccgtgatcccagcccacactagcctgggtgcatctgctaatgggagaccaaatctttgtccgggaagcaagaagtgggtgggagaatgtatcctgtttttgtcagtttgtttgccttactcatttctaagtgcaataagggagtgtctcacaggattgcacctgtgacatcctgatggatgcttccctgtggccctcctggggcaagggtggacagactcagacccccagcatggttagcgctgaccttcattgaggtccctttggaaccagatgtcttgttacagacaccttcctctgtgtaagtctcctcaccttgaggggtctttagtaatgcatctgggtagcatctcaactgctggtagcatttatctgacttggaaagttggagaagaggcattcctactggagaaaaatgtcagtgttttcctataagctctgtgttagctattcattatatttgtgcttaaagatgttccttcattcatcaactaggggaagtccagatgcgggttatcttgaaagaaacaaactgacattctaggcagacagttgtctatgtggtctgagggtcagcagctgttagtctccttcctttggctcttgagacccacacatatcactttagccctaacaagggctcctcccacctccacctgttgccccagttgaaaagcatccattatgagctgaggtcagcctggatctggaattgcagcccacataaacataaaggaggatgtccctggtctgttccatccccacggatggtgttgctgctgggcaacagtgttggcttcttttaagtaccccctttcctcctcacccacctccaaactgactagcactcagagggacttatgataaaggttcagctccaggggtagtacctgagtgtgtgccatgccccttcagaccagctgcttccatcagaattccagggtcacagccccaacagaagcagcagtgcctctgtaggaggggtgctgggctctggccttctcatgcagagaggtccgggacagggtcagtatcgtgggcatgtgtatagcttcccaagttcttttacagtccctgctgggactccctgacttactttggttggttcctagtgctacttgttttacaaactacactttgtagaattgattagattaccttgtttatttaatgtgagtttgtgcctttttgtctcaatcttccaatacaggtatattgagaaaaaaagcagtctaataaaatcctagacagaa

SEQ ID NO: 376952 - DNA, 2864 bp, Homo sapiens
  misc_feature (94)..(94): n is a, c, g, or t
tgtgcatacaaactggtgacctgtcaatgttcaacgtggtggtggcactagcagcacacataacgctgtgaccgatacgtatcagtaccaattnatatgtctaactgtatgcacgcgctgctctagatatgtagcgaagacatctcgcgacgatgcgcagctgttctgttggctcgataagtgggttgacctgaccatggacgacattcgaaggatggaagaagagacgaagagacagctggatgaaatgagacaaaaggacccagtgaaaggaatgacagcagatgactaaagccgcctttcccctctgcactttttgcaagacagtggtcaacaggaagacccagcagctccaccctcccaagtgacaggccattttcggacgcagccgttctgtgcccattcttcaggcaactttcgattccttactgtagctaattctagatgcccttcagtattgtgaacaaatagaccgtctggtgtcacagagcccgcgtgtgcaggagcctgctcctccgagatacgtggcgtgtaggttgctgtagttacagcgcctccgtctctctccattgtgttccgatccatttctgtgtgttcccccaacctttatttccaagtgacattttcagtctttcaaatagctgccttttgtgatgtggtgatttaaatgatttaagttcatttgttctcaaccttggggtaaactgaggtattttgcttcctgggaagatcttcgcaattttgagtgctcctgtggggagcggggatgagctaaagatacaatgtttccctgccccgcaccgcttccacaaaatagcaatgtggttttgcagctctgacttctgctcccagtaacccatcgttagggcactctagcactatggaggtacccaaggctcagccagtctctatttaagaaaatttaacaaatacgagtaaccctgtcccaatcactgaatctctagttactactcttagaaacacctgtggcttcttggccctcctgttgcccgctctgaatctctctgcagtctacaaaatcgccccagtcaactctccacttggagggaattgtccagtgtggcccctagaattgagtcaccccctagataccaactgtctgaccccgaggagctctgtaagtccctgctcctcctcttccctttggggctggtgctgccactcagcaataatcctcttttctctgtgctttcttaggtccctgtcctctgtctttgaggctggttaggaagcaagagtcctgatctttcatgctgcacaatatgagcatgcaaaaagctttttccagcagaacatgttccctcgtctccagttgccggaaaggaatttggggatcaagaacttagctcgtcctacccccatgttgagttctgccctggaaaacccaaagcaagtagtgatcatagtacagaacccgaccaaagtaggctggtgaggaagtccaggctccaggggaacagacgctgcccagtgttcatagcttcctgcaacttgacagagcctgagtttgcctcttagtgggagaatgagagagagctgtagtgtcacctgacattccccaaaccttgtgaagcacgttggcctaagtgtgccgtgatcccagcccacactagcctgggtgcatctgctaatgggagaccaaatctttgtccgggaagcaagaagtgggtgggagaatgtatcctgtttttgtcagtttgtttgccttactcatttctaagtgcaataagggagtgtctcacaggattgcacctgtgacatcctgatggatgcttccctgtggccctcctggggcaagggtggacagactcagacccccagcatggttagcgctgaccttcattgaggtccctttggaaccagatgtcttgttacagacaccttcctctgtgtaagtctcctcaccttgaggggtctttagtaatgcatctgggtagcatctcaactgctggtagcatttatctgacttggaaagttggagaagaggcattcctactggagaaaaatgtcagtgttttcctataagctctgtgttagctattcattatatttgtgcttaaagatgttccttcattcatcaactaggggaagtccagatgcgggttatcttgaaagaaacaaactgacattctaggcagacagttgtctatgtggtctgagggtcagcagctgttagtctccttcctttggctcttgagacccacacatatcactttagccctaacaagggctcctcccacctccacctgttgccccagttgaaaagcatccattatgagctgaggtcagcctggatctggaattgcagcccacataaacataaaggaggatgtccctggtctgttccatccccacggatggtgttgctgctgggcaacagtgttggcttcttttaagtaccccctttcctcctcacccacctccaaactgactagcactcagagggacttatgataaaggttcagctccaggggtagtacctgagtgtgtgccatgccccttcagaccagctgcttccatcagaattccagggtcacagccccaacagaagcagcagtgcctctgtaggaggggtgctgggctctggccttctcatgcagagaggtccgggacagggtcagtatcgtgggcatgtgtatagcttcccaagttcttttacagtccctgctgggactccctgacttactttggttggttcctagtgctacttgttttacaaactacactttgtagaattgattagattaccttgtttatttaatgtgagtttgtgcctttttgtctcaatcttccaatacaggtatattgagaaaaaaagcagtctaataaaatcctagacagaa

SEQ ID NO: 376953 - DNA, 2704 bp, Homo sapiens
aaatggaacgaacagaaatgaacgaacaacctgaccatggacgacattcgaaggatggaagaagagacgaagagacagctggatgaaatgagacaaaaggacccagtgaaaggaatgacagcagatgactaaagccgcctttcccctctgcactttttgcaagacagtggtcaacaggaagacccagcagctccaccctcccaagtgacaggccattttcggacgcagccgttctgtgcccattcttcaggcaactttcgattccttactgtagctaattctagatgcccttcagtattgtgaacaaatagaccgtctggtgtcacagagcccgcgtgtgcaggagcctgctcctccgagatacgtggcgtgtaggttgctgtagttacagcgcctccgtctctctccattgtgttccgatccatttctgtgtgttcccccaacctttatttccaagtgacattttcagtctttcaaatagctgccttttgtgatgtggtgatttaaatgatttaagttcatttgttctcaaccttggggtaaactgaggtattttgcttcctgggaagatcttcgcaattttgagtgctcctgtggggagcggggatgagctaaagatacaatgtttccctgccccgcaccgcttccacaaaatagcaatgtggttttgcagctctgacttctgctcccagtaacccatcgttagggcactctagcactatggaggtacccaaggctcagccagtctctatttaagaaaatttaacaaatacgagtaaccctgtcccaatcactgaatctctagttactactcttagaaacacctgtggcttcttggccctcctgttgcccgctctgaatctctctgcagtctacaaaatcgccccagtcaactctccacttggagggaattgtccagtgtggcccctagaattgagtcaccccctagataccaactgtctgaccccgaggagctctgtaagtccctgctcctcctcttccctttggggctggtgctgccactcagcaataatcctcttttctctgtgctttcttaggtccctgtcctctgtctttgaggctggttaggaagcaagagtcctgatctttcatgctgcacaatatgagcatgcaaaaagctttttccagcagaacatgttccctcgtctccagttgccggaaaggaatttggggatcaagaacttagctcgtcctacccccatgttgagttctgccctggaaaacccaaagcaagtagtgatcatagtacagaacccgaccaaagtaggctggtgaggaagtccaggctccaggggaacagacgctgcccagtgttcatagcttcctgcaacttgacagagcctgagtttgcctcttagtgggagaatgagagagagctgtagtgtcacctgacattccccaaaccttgtgaagcacgttggcctaagtgtgccgtgatcccagcccacactagcctgggtgcatctgctaatgggagaccaaatctttgtccgggaagcaagaagtgggtgggagaatgtatcctgtttttgtcagtttgtttgccttactcatttctaagtgcaataagggagtgtctcacaggattgcacctgtgacatcctgatggatgcttccctgtggccctcctggggcaagggtggacagactcagacccccagcatggttagcgctgaccttcattgaggtccctttggaaccagatgtcttgttacagacaccttcctctgtgtaagtctcctcaccttgaggggtctttagtaatgcatctgggtagcatctcaactgctggtagcatttatctgacttggaaagttggagaagaggcattcctactggagaaaaatgtcagtgttttcctataagctctgtgttagctattcattatatttgtgcttaaagatgttccttcattcatcaactaggggaagtccagatgcgggttatcttgaaagaaacaaactgacattctaggcagacagttgtctatgtggtctgagggtcagcagctgttagtctccttcctttggctcttgagacccacacatatcactttagccctaacaagggctcctcccacctccacctgttgccccagttgaaaagcatccattatgagctgaggtcagcctggatctggaattgcagcccacataaacataaaggaggatgtccctggtctgttccatccccacggatggtgttgctgctgggcaacagtgttggcttcttttaagtaccccctttcctcctcacccacctccaaactgactagcactcagagggacttatgataaaggttcagctccaggggtagtacctgagtgtgtgccatgccccttcagaccagctgcttccatcagaattccagggtcacagccccaacagaagcagcagtgcctctgtaggaggggtgctgggctctggccttctcatgcagagaggtccgggacagggtcagtatcgtgggcatgtgtatagcttcccaagttcttttacagtccctgctgggactccctgacttactttggttggttcctagtgctacttgttttacaaactacactttgtagaattgattagattaccttgtttatttaatgtgagtttgtgcctttttgtctcaatcttccaatacaggtatattgagaaaaaaagcagtctaataaaatcctagacagaa

SEQ ID NO: 376954 - DNA, 2603 bp, Homo sapiens
aagtcgccgtcaccgttgggctgatgactaaagccgcctttcccctctgcactttttgcaagacagtggtcaacaggaagacccagcagctccaccctcccaagtgacaggccattttcggacgcagccgttctgtgcccattcttcaggcaactttcgattccttactgtagctaattctagatgcccttcagtattgtgaacaaatagaccgtctggtgtcacagagcccgcgtgtgcaggagcctgctcctccgagatacgtggcgtgtaggttgctgtagttacagcgcctccgtctctctccattgtgttccgatccatttctgtgtgttcccccaacctttatttccaagtgacattttcagtctttcaaatagctgccttttgtgatgtggtgatttaaatgatttaagttcatttgttctcaaccttggggtaaactgaggtattttgcttcctgggaagatcttcgcaattttgagtgctcctgtggggagcggggatgagctaaagatacaatgtttccctgccccgcaccgcttccacaaaatagcaatgtggttttgcagctctgacttctgctcccagtaacccatcgttagggcactctagcactatggaggtacccaaggctcagccagtctctatttaagaaaatttaacaaatacgagtaaccctgtcccaatcactgaatctctagttactactcttagaaacacctgtggcttcttggccctcctgttgcccgctctgaatctctctgcagtctacaaaatcgccccagtcaactctccacttggagggaattgtccagtgtggcccctagaattgagtcaccccctagataccaactgtctgaccccgaggagctctgtaagtccctgctcctcctcttccctttggggctggtgctgccactcagcaataatcctcttttctctgtgctttcttaggtccctgtcctctgtctttgaggctggttaggaagcaagagtcctgatctttcatgctgcacaatatgagcatgcaaaaagctttttccagcagaacatgttccctcgtctccagttgccggaaaggaatttggggatcaagaacttagctcgtcctacccccatgttgagttctgccctggaaaacccaaagcaagtagtgatcatagtacagaacccgaccaaagtaggctggtgaggaagtccaggctccaggggaacagacgctgcccagtgttcatagcttcctgcaacttgacagagcctgagtttgcctcttagtgggagaatgagagagagctgtagtgtcacctgacattccccaaaccttgtgaagcacgttggcctaagtgtgccgtgatcccagcccacactagcctgggtgcatctgctaatgggagaccaaatctttgtccgggaagcaagaagtgggtgggagaatgtatcctgtttttgtcagtttgtttgccttactcatttctaagtgcaataagggagtgtctcacaggattgcacctgtgacatcctgatggatgcttccctgtggccctcctggggcaagggtggacagactcagacccccagcatggttagcgctgaccttcattgaggtccctttggaaccagatgtcttgttacagacaccttcctctgtgtaagtctcctcaccttgaggggtctttagtaatgcatctgggtagcatctcaactgctggtagcatttatctgacttggaaagttggagaagaggcattcctactggagaaaaatgtcagtgttttcctataagctctgtgttagctattcattatatttgtgcttaaagatgttccttcattcatcaactaggggaagtccagatgcgggttatcttgaaagaaacaaactgacattctaggcagacagttgtctatgtggtctgagggtcagcagctgttagtctccttcctttggctcttgagacccacacatatcactttagccctaacaagggctcctcccacctccacctgttgccccagttgaaaagcatccattatgagctgaggtcagcctggatctggaattgcagcccacataaacataaaggaggatgtccctggtctgttccatccccacggatggtgttgctgctgggcaacagtgttggcttcttttaagtaccccctttcctcctcacccacctccaaactgactagcactcagagggacttatgataaaggttcagctccaggggtagtacctgagtgtgtgccatgccccttcagaccagctgcttccatcagaattccagggtcacagccccaacagaagcagcagtgcctctgtaggaggggtgctgggctctggccttctcatgcagagaggtccgggacagggtcagtatcgtgggcatgtgtatagcttcccaagttcttttacagtccctgctgggactccctgacttactttggttggttcctagtgctacttgttttacaaactacactttgtagaattgattagattaccttgtttatttaatgtgagtttgtgcctttttgtctcaatcttccaatacaggtatattgagaaaaaaagcagtctaataaaatcctagacagaa

SEQ ID NO: 376955 - DNA, 3136 bp, Homo sapiens
tggttgccgcagagacgccccgcccccgcgcggcgctgcggaaccggagctccgggcggcgtcggcagcggcgcgagaggcgacgaggcccgggcggcaggagccggcgcggcgaccgcggcgagggcggcggggacggagcagagcacgacgaagacgcacaggcagccgggccgggccgggccacggggagagcggccggcgggcagcgggcgggaggccgggcgggccgcgggcagccaccgagccgcgaagcgacatggtgctgctcaaggagtatcgagtaatcctgcctgtgtctgtagatgagtatcaagtggggcagctgtattctgtggctgaggccagtaaaaatgaaacgggtggtggcgaaggcgtggaggtcctggtgaatgagccctacgagaaggacggtgagaaaggccagtacacacacaagatctaccacctgcagagcaaagtacccacgtttgttcgaatgctggccccagagggagccctgaatatacacgagaaagcctggaatgcttacccctactgcagaaccgttattacaaatgagtacatgaaagaagactttctgattaaaattgaaacctggcacaaaccagatcttggcacgcaggagaatgtgcataagctggagcctgaggcgtggaaacacgtggaagccgtatatatagacattgcagatcgaagccaagtgctcagcaaggattacaaggcagaggaagacccagcaaaatttaaatctatcaaaacaggccgaggacccttgggccccaattggaagcaagagcttgtaaaccagaaggactgcccatatatgtgtgcatacaaactggtgaccgtcaagttcaagtggtggggcctgcagaacaaagtggagaacttcatccataagcaagagaggcgtctgtttacaaacttccacaggcagctgttctgttggctcgataagtgggttgacctgaccatggacgacattcgaaggatggaagaagagacgaagagacagctggatgaaatgagacaaaaggacccagtgaaaggaatgacagcagatgactaaagccgcctttcccctctgcactttttgcaagacagtggtcaacaggaagacccagcagctccaccctcccaagtgacaggccattttcggacgcagccgttctgtgcccattcttcaggcaactttcgattccttactgtagctaattctagatgcccttcagtattgtgaacaaatagaccgtctggtgtcacagagcccgcgtgtgcaggagcctgctcctccgagatacgtggcgtgtaggttgctgtagttacagcgcctccgtctctctccattgtgttccgatccatttctgtgtgttcccccaacctttatttccaagtgacattttcagtctttcaaatagctgccttttgtgatgtggtgatttaaatgatttaagttcatttgttctcaaccttggggtaaactgaggtattttgcttcctgggaagatcttcgcaattttgagtgctcctgtggggagcggggatgagctaaagatacaatgtttccctgccccgcaccgcttccacaaaatagcaatgtggttttgcagctctgacttctgctcccagtaacccatcgttagggcactctagcactatggaggtacccaaggctcagccagtctctatttaagaaaatttaacaaatacgagtaaccctgtcccaatcactgaatctctagttactactcttagaaacacctgtggcttcttggccctcctgttgcccgctctgaatctctctgcagtctacaaaatcgccccagtcaactctccacttggagggaattgtccagtgtggcccctagaattgagtcaccccctagataccaactgtctgaccccgaggagctctgtaagtccctgctcctcctcttccctttggggctggtgctgccactcagcaataatcctcttttctctgtgctttcttaggtccctgtcctctgtctttgaggctggttaggaagcaagagtcctgatctttcatgctgcacaatatgagcatgcaaaaagctttttccagcagaacatgttccctcgtctccagttgccggaaaggaatttggggatcaagaacttagctcgtcctacccccatgttgagttctgccctggaaaacccaaagcaagtagtgatcatagtacagaacccgaccaaagtaggctggtgaggaagtccaggctccaggggaacagacgctgcccagtgttcatagcttcctgcaacttgacagagcctgagtttgcctcttagtgggagaatgagagagagctgtagtgtcacctgacattccccaaaccttgtgaagcacgttggcctaagtgtgccgtgatcccagcccacactagcctgggtgcatctgctaatgggagaccaaatctttgtccgggaagcaagaagtgggtgggagaatgtatcctgtttttgtcagtttgtttgccttactcatttctaagtgcaataagggagtgtctcacaggattgcacctgtgacatcctgatggatgcttccctgtggccctcctggggcaagggtggacagactcagacccccagcatggttagcgctgaccttcattgaggtccctttggaaccagatgtcttgttacagacaccttcctctgtgtaagtctcctcaccttgaggggtctttagtaatgcatctgggtagcatctcaactgctggtagcatttatctgacttggaaagttggagaagaggcattcctactggagaaaaatgtcagtgttttcctataagctctgtgttagctattcattatatttgtgcttaaagatgttccttcattcatcaactaggggaagtccagatgcgggttatcttgaaagaaacaaactgacattctaggcagacagttgtctatgtggtctgagggtcagcagctgttagtctccttcctttggctcttgagacccacacatatcactttagccctaacaagggctcctcccacctccacctgttgccccagttgaaaagcatccattatgagctgaggtcagcctggatctggaatgagttttatcctctagagtcagctatgaccat

SEQ ID NO: 376956 - DNA, 1483 bp, Homo sapiens
ggacgcgtgggtcgacccacgcgtccaaagcaagtagtgatcatagtacagaacccgaccaaagtaggctggtgaggaagtccaggctccaggggaacagacgctgcccagtgttcatagcttcctgcaacttgacagagcctgagtttgcctcttagtgggagaatgagagagagctgtagtgtcacctgacattccccaaaccttgtgaagcacgttggcctaagtgtgccgtgatcccagcccacactagcctgggtgcatctgctaatgggagaccaaatctttgtccgggaagcaagaagtgggtgggagaatgtatcctgtttttgtcagtttgtttgccttactcatttctaagtgcaataagggagtgtctcacaggattgcacctgtgacatcctgatggatgcttccctgtggccctcctggggcaagggtggacagactcagacccccagcatggttagcgctgaccttcattgaggtccctttggaaccagatgtcttgttacagacaccttcctctgtgtaagtctcctcaccttgaggggtctttagtaatgcatctgggtagcatctcaactgctggtagcatttatctgacttggaaagttggagaagaggcattcctactggagaaaaatgtcagtgttttcctataagctctgtgttagctattcattatatttgtgcttaaagatgttccttcattcatcaactaggggaagtccagatgcgggttatcttgaaagaaacaaactgacattctaggcagacagttgtctatgtggtctgagggtcagcagctgttagtctccttcctttggctcttgagacccacacatatcactttagccctaacaagggctcctcccacctccacctgttgccccagttgaaaagcatccattatgagctgaggtcagcctggatctggaattgcagcccacataaacataaaggaggatgtccctggtctgttccatccccacggatggtgttgctgctgggcaacagtgttggcttcttttaagtaccccctttcctcctcacccacctccaaactgactagcactcagagggacttatgataaaggttcagctccaggggtagtacctgagtgtgtgccatgccccttcagaccagctgcttccatcagaattccagggtcacagccccaacagaagcagcagtgcctctgtaggaggggtgctgggctctggccttctcatgcagagaggtccgggacagggtcagtatcgtgggcatgtgtatagcttcccaagttcttttacagtccctgctgggactccctgacttactttggttggttcctagtgctacttgttttacaaactacactttgtagaattgattagattaccttgtttatttaatgtgagtttgtgcctttttgtctcaatcttccaatacaggtatattgagaaaaaaagcagtctaataaaatcctagacagaa

SEQ ID NO: 376957 - DNA, 2108 bp, Homo sapiens
tggttgccgcagagacgccccgcccccgcgcggcgctgcggaaccggagctccgggcggcgtcggcagcggcgcgagaggcgacgaggcccgggcggcaggagccggcgcggcgaccgcggcgagggcggcggggacggagcagagcacgacgaagacgcacaggcagccgggccgggccgggccacggggagagcggccggcgggcagcgggcgggaggccgggcgggccgcgggcagccaccgagccgcgaagcgacatggtgctgctcaaggagtatcgagtaatcctgcctgtgtctgtagatgagtatcaagtggggcagctgtattctgtggctgaggccagtaaaaatgaaacgggtggtggcgaaggcgtggaggtcctggtgaatgagccctacgagaaggacggtgagaaaggccagtacacacacaagatctaccacctgcagagcaaagtacccacgtttgttcgaatgctggccccagagggagccctgaatatacacgagaaagcctggaatgcttacccctactgcagaaccgttattacaaatgagtacatgaaagaagactttctgattaaaattgaaacctggcacaaaccagatcttggcacgcaggagaatgtgcataagctggagcctgaggcgtggaaacacgtggaagccgtatatatagacattgcagatcgaagccaagtgctcagcaaggattacaaggcagaggaagacccagcaaaatttaaatctatcaaaacaggccgaggacccttgggccccaattggaagcaagagcttgtaaaccagaaggactgcccatatatgtgtgcatacaaactggtgaccgtcaagttcaagtggtggggcctgcagaacaaagtggagaacttcatccataagcaagagaggcgtctgtttacaaacttccacaggcagctgttctgttggctcgataagtgggttgacctgaccatggacgacattcgaaggatggaagaagagacgaagagacagctggatgaaatgagacaaaaggacccagtgaaaggaatgacagcagatgactaaagccgcctttcccctctgcactttttgcaagacagtggtcaacaggaagacccagcagctccaccctcccaagtgacaggccattttcggacgcagccgttctgtgcccattcttcaggcaactttcgattccttactgtagctaattctagatgcccttcagtattgtgaacaaatagaccgtctggtgtcacagagcccgcgtgtgcaggagcctgctcctccgagatacgtggcgtgtaggttgctgtagttacagcgcctccgtctctctccattgtgttccgatccatttctgtgtgttcccccaacctttatttccaagtgacattttcagtctttcaaatagctgccttttgtgatgtggtgatttaaatgatttaagttcatttgttctcaaccttggggtaaactgaggtattttgcttcctgggaagatcttcgcaattttgagtgctcctgtggggagcggggatgagctaaagatacaatgtttccctgccccgcaccgcttccacaaaatagcaatgtggttttgcagctctgacttctgctcccagtaacccatcgttagggcactctagcactatggaggtacccaaggctcagccagtctctatttaagaaaatttaacaaatacttatgataaaggttcagctccaggggtagtacctgagtgtgtgccatgccccttcagaccagctgcttccatcagaattccagggtcacagccccaacagaagcagcagtgcctctgtaggaggggtgctgggctctggccttctcatgcagagaggtccgggacagggtcagtatcgtgggcatgtgtatagcttcccaagttcttttacagtccctgctgggactccctgacttactttggttggttcctagtgctacttgttttacaaactacactttgtagaattgattagattaccttgtttatttaatgtgagtttgtgcctttttgtctcaatcttccaatacaggtatattgagaaaaaaagcagtctaataaaatcctagacagaa

SEQ ID NO: 376958 - DNA, 2366 bp, Homo sapiens
tggttgccgcagagacgccccgcccccgcgcggcgctgcggaaccggagctccgggcggcgtcggcagcggcgcgagaggcgacgaggcccgggcggcaggagccggcgcggcgaccgcggcgagggcggcggggacggagcagagcacgacgaagacgcacaggcagccgggccgggccgggccacggggagagcggccggcgggcagcgggcgggaggccgggcgggccgcgggcagccaccgagccgcgaagcgacatggtgctgctcaaggagtatcgagtaatcctgcctgtgtctgtagatgagtatcaagtggggcagctgtattctgtggctgaggccagtaaaaatgaaacgggtggtggcgaaggcgtggaggtcctggtgaatgagccctacgagaaggacggtgagaaaggccagtacacacacaagatctaccacctgcagagcaaagtacccacgtttgttcgaatgctggccccagagggagccctgaatatacacgagaaagcctggaatgcttacccctactgcagaaccgttattacaaatgagtacatgaaagaagactttctgattaaaattgaaacctggcacaaaccagatcttggcacgcaggagaatgtgcataagctggagcctgaggcgtggaaacacgtggaagccgtatatatagacattgcagatcgaagccaagtgctcagcaaggattacaaggcagaggaagacccagcaaaatttaaatctatcaaaacaggccgaggacccttgggccccaattggaagcaagagcttgtaaaccagaaggactgcccatatatgtgtgcatacaaactggtgaccgtcaagttcaagtggtggggcctgcagaacaaagtggagaacttcatccataagcaagagaggcgtctgtttacaaacttccacaggcagctgttctgttggctcgataagtgggttgacctgaccatggacgacattcgaaggatggaagaagagacgaagagacagctggatgaaatgagacaaaaggacccagtgaaaggaatgacagcagatgactaaagccgcctttcccctctgcactttttgcaagacagtggtcaacaggaagacccagcagctccaccctcccaagtgacaggccattttcggacgcagccgttctgtgcccattcttcaggcaactttcgattccttactgtagctaattctagatgcccttcagtattgtgaacaaatagaccgtctggtgtcacagagcccgcgtgtgcaggagcctgctcctccgagatacgtggcgtgtaggttgctgtagttacagcgcctccgtctctctccattgtgttccgatccatttctgtgtgttcccccaacctttatttccaagtgacattttcagtctttcaaatagctgccttttgtgatgtggtgatttaaatgatttaagttcatttgttctcaaccttggggtaaactgaggtattttgcttcctgggaagatcttcgcaattttgagtgctcctgtggggagcggggatgagctaaagatacaatgtttccctgccccgcaccgcttccacaaaatagcaatgtggttttgcagctctgacttctgctcccagtaacccatcgttagggcactctagcactatggaggtacccaaggctcagccagtctctatttaagaaaatttaacaaatacgagtaaccctgtcccaatcactgaatctctagttactactcttagaaacacctgtggcttcttggccctcctgttgcccgctctgaatctctctgcagtctacaaaatcgccccagtcaactctccacttggagggaattgtccagtgtggcccctagaattgagtcaccccctagataccaactgtctgaccccgaggagctctgtaagtccctgctcctcctcttccctttggggctggtgctgccactcagcaataatcctcttttctctgtgctttcttaggtccctgtcctctgtctttgaggctggttaggaagcaagagtcctgatctttcatgctgcacaatatgagcatgcaaaaagctttttccagcagaacatgttccctcgtctccagttgccggaaaggaatttggggatcaagaacttagctcgtcctacccccatgttgagttctgccctggaaaacccaaagcaagtagtgatcatagtacagaacccgaccaaagtaggctggtgaggaagtccaggctccaggggaacagacgctgcccagtgttcatagcttcctgcaacttgacagagcctgagtttgcctcttagtgaccagggggatactctagagcgagccagcagcatgcacggtgcac

SEQ ID NO: 376959 - DNA, 1805 bp, Homo sapiens
tggttgccgcagagacgccccgcccccgcgcggcgctgcggaaccggagctccgggcggcgtcggcagcggcgcgagaggcgacgaggcccgggcggcaggagccggcgcggcgaccgcggcgagggcggcggggacggagcagagcacgacgaagacgcacaggcagccgggccgggccgggccacggggagagcggccggcgggcagcgggcgggaggccgggcgggccgcgggcagccaccgagccgcgaagcgacatggtgctgctcaaggagtatcgagtaatcctgcctgtgtctgtagatgagtatcaagtggggcagctgtattctgtggctgaggccagtaaaaatgaaacgggtggtggcgaaggcgtggaggtcctggtgaatgagccctacgagaaggacggtgagaaaggccagtacacacacaagatctaccacctgcagagcaaagtacccacgtttgttcgaatgctggccccagagggagccctgaatatacacgagaaagcctggaatgcttacccctactgcagaaccgttattacaaatgagtacatgaaagaagactttctgattaaaattgaaacctggcacaaaccagatcttggcacgcaggagaatgtgcataagctggagcctgaggcgtggaaacacgtggaagccgtatatatagacattgcagatcgaagccaagtgctcagcaaggattacaaggcagaggaagacccagcaaaatttaaatctatcaaaacaggccgaggacccttgggccccaattggaagcaagagcttgtaaaccagaaggactgcccatatatgtgtgcatacaaactggtgaccgtcaagttcaagtggtggggcctgcagaacaaagtggagaacttcatccataagcaagagaggcgtctgtttacaaacttccacaggcagctgttctgttggctcgataagtgggttgacctgaccatggacgacattcgaaggatggaagaagagacgaagagacagctggatgaaatgagacaaaaggacccagtgaaaggaatgacagcagatgactaaagccgcctttcccctctgcactttttgcaagacagtggtcaacaggaagacccagcagctccaccctcccaagtgacaggccattttcggacgcagccgttctgtgcccattcttcaggcaactttcgattccttactgtagctaattctagatgcccttcagtattgtgaacaaatagaccgtctggtgtcacagagcccgcgtgtgcaggagcctgctcctccgagatacgtggcgtgtaggttgctgtagttacagcgcctccgtctctctccattgtgttccgatccatttctgtgtgttcccccaacctttatttccaagtgacattttcagtcaaaaaaaaaaaaaaaaaaaaaaaaaaaaaaaaaaaaaggggggagaaaaaaaacaaagaagcaaaaagagaggcaggaaaaaaggggaacgaacagcaacagcccaagccgcacaccaactcagaaccagacgcgccagccaaatcaatacgcaacaccaacagcgcaaccgaggcaacctctcgcaatggacaacgccccaaaccggaggcacccgccacagcgaaacacacaaacacgaaccgacacgcgctcaaggaaagacggcccacgaccaggcaacaccgctctccaacaagacacaccccaccggtggcgagaacgcacaccacacgcaagaactcccgaagaacaacagacgcgacaacaaccccccggcagacccgcgccaaaa

SEQ ID NO: 376960 - DNA, 1474 bp, Homo sapiens
tggttgccgcagagacgccccgcccccgcgcggcgctgcggaaccggagctccgggcggcgtcggcagcggcgcgagaggcgacgaggcccgggcggcaggagccggcgcggcgaccgcggcgagggcggcggggacggagcagagcacgacgaagacgcacaggcagccgggccgggccgggccacggggagagcggccggcgggcagcgggcgggaggccgggcgggccgcgggcagccaccgagccgcgaagcgacatggtgctgctcaaggagtatcgagtaatcctgcctgtgtctgtagatgagtatcaagtggggcagctgtattctgtggctgaggccagtaaaaatgaaacgggtggtggcgaaggcgtggaggtcctggtgaatgagccctacgagaaggacggtgagaaaggccagtacacacacaagatctaccacctgcagagcaaagtacccacgtttgttcgaatgctggccccagagggagccctgaatatacacgagaaagcctggaatgcttacccctactgcagaaccgttattacaaatgagtacatgaaagaagactttctgattaaaattgaaacctggcacaaaccagatcttggcacgcaggagaatgtgcataagctggagcctgaggcgtggaaacacgtggaagccgtatatatagacattgcagatcgaagccaagtgctcagcaaggattacaaggcagaggaagacccagcaaaatttaaatctatcaaaacaggccgaggacccttgggccccaattggaagcaagagcttgtaaaccagaaggactgcccatatatgtgtgcatacaaactggtgaccgtcaagttcaagtggtggggcctgcagaacaaagtggagaacttcatccataagcaagagaggcgtctgtttacaaacttccacaggcagctgttctgttggctcgataagtgggttgacctgaccatggacgacattcgaaggatggaagaagagacgaagagacagctggatgaaatgagacaaaaggacccagtgaaaggaatgacagcagatgactaaagccgcctttcccctctgcactttttgcaagacagtggtcaacaggaagacccagcagctccaccctcccaagtgacaggccattttcggacgcagccgttctgtgcccattcttcaggcaactttcgattccttactgtagctaattctagatgcccttcagtattgtgaacaaatagaccgtctggtgtcacagagcccgcgtgtgcaggagcctgctcctccgagatacgtggcgtgtaggttgctgtagttacagcgcctccgtctctctccattgtgttccgatccatttctgtgtgttcccccaacctttatttccaagtgacattttcagtctcgatttcctatgtcatataaaatcgaggggtgaggtactgttgtcctggctttactctgcaa

SEQ ID NO: 376961 - DNA, 1112 bp, Homo sapiens
tggttgccgcagagacgccccgcccccgcgcggcgctgcggaaccggagctccgggcggcgtcggcagcggcgcgagaggcgacgaggcccgggcggcaggagccggcgcggcgaccgcggcgagggcggcggggacggagcagagcacgacgaagacgcacaggcagccgggccgggccgggccacggggagagcggccggcgggcagcgggcgggaggccgggcgggccgcgggcagccaccgagccgcgaagcgacatggtgctgctcaaggagtatcgagtaatcctgcctgtgtctgtagatgagtatcaagtggggcagctgtattctgtggctgaggccagtaaaaatgaaacgggtggtggcgaaggcgtggaggtcctggtgaatgagccctacgagaaggacggtgagaaaggccagtacacacacaagatctaccacctgcagagcaaagtacccacgtttgttcgaatgctggccccagagggagccctgaatatacacgagaaagcctggaatgcttacccctactgcagaaccgttattacaaatgagtacatgaaagaagactttctgattaaaattgaaacctggcacaaaccagatcttggcacgcaggagaatgtgcataagctggagcctgaggcgtggaaacacgtggaagccgtatatatagacattgcagatcgaagccaagtgctcagcaaggattacaaggcagaggaagacccagcaaaatttaaatctatcaaaacaggccgaggacccttgggccccaattggaagcaagagcttgtaaaccagaaggactgcccatatatgtgtgcatacaaactggtgaccgtcaagttcaagtggtggggcctgcagaacaaagtggagaacttcatccataagcaagagaggcgtcactcttcaacaacttctgccctaggcctaggagaaagaataagcaagcttccttgacctgtagctctgtccttataatagacctgcgttcaaatgcaaacacattctaagagtctttcagtactcctgtatcacgcccatagcatctggcatcaggttaccctgtacagtcaacggccatagaagtcgccagcag

SEQ ID NO: 376962 - DNA, 130 bp, Homo sapiens
ggctatgggaatggcagttcctaggtgtccattctggctaaaggatattttataactgacaaaaactgcatagtggttccccacttgttcccacaggtgcataagctggagcctgaggcgtggaaacacg

SEQ ID NO: 376963 - DNA, 3644 bp, Homo sapiens
tggttgccgcagagacgccccgcccccgcgcggcgctgcggaaccggagctccgggcggcgtcggcagcggcgcgagaggcgacgaggcccgggcggcaggagccggcgcggcgaccgcggcgagggcggcggggacggagcagagcacgacgaagacgcacaggcagccgggccgggccgggccacggggagagcggccggcgggcagcgggcgggaggccgggcgggccgcgggcagccaccgagccgcgaagcgacatggtgctgctcaaggagtatcgagtaatcctgcctgtgtctgtagatgagtatcaagtggggcagctgtattctgtggctgaggccagtaaaaatgaaacgggtggtggcgaaggcgtggaggtcctggtgaatgagccctacgagaaggacggtgagaaaggccagtacacacacaagatctaccacctgcagagcaaagtacccacgtttgttcgaatgctggccccagagggagccctgaatatacacgagaaagcctggaatgcttacccctactgcagaaccgttattacaaatgagtacatgaaagaagactttctgattaaaattgaaacctggcacaaaccagatcttggcacgcaggagaatgtgcataagctggagcctgaggcgtggaaacacgtggaagccgtatatatagacattgcagatcgaagccaagtgctcagcaaggattacaaggcagaggaagacccagcaaaatttaaatctatcaaaacaggccgaggacccttgggccccaattggaagcaagagcttgtaaaccagaaggactgcccatatatgtgtgcatacaaactggtgaccgtcaagttcaagtggtggggcctgcagaacaaagtggagaacttcatccataagcaagagaggcgtctgtttacaaacttccacaggcagctgttctgttggctcgataagtgggttgacctgaccatggacgacattcgaaggatggaagaagagacgaagagacagctggatgaaatgagacaaaaggacccagtgaaaggaatgacagcagatgactaaagccgcctttcccctctgcactttttgcaagacagtggtcaacaggaagacccagcagctccaccctcccaagtgacaggccattttcggacgcagccgttctgtgcccattcttcaggcaactttcgattccttactgtagctaattctagatgcccttcagtattgtgaacaaatagaccgtctggtgtcacagagcccgcgtgtgcaggagcctgctcctccgagatacgtggcgtgtaggttgctgtagttacagcgcctccgtctctctccattgtgttccgatccatttctgtgtgttcccccaacctttatttccaagtgacattttcagtctttcaaatagctgccttttgtgatgtggtgatttaaatgatttaagttcatttgttctcaaccttggggtaaactgaggtattttgcttcctgggaagatcttcgcaattttgagtgctcctgtggggagcggggatgagctaaagatacaatgtttccctgccccgcaccgcttccacaaaatagcaatgtggttttgcagctctgacttctgctcccagtaacccatcgttagggcactctagcactatggaggtacccaaggctcagccagtctctatttaagaaaatttaacaaatacgagtaaccctgtcccaatcactgaatctctagttactactcttagaaacacctgtggcttcttggccctcctgttgcccgctctgaatctctctgcagtctacaaaatcgccccagtcaactctccacttggagggaattgtccagtgtggcccctagaattgagtcaccccctagataccaactgtctgaccccgaggagctctgtaagtccctgctcctcctcttccctttggggctggtgctgccactcagcaataatcctcttttctctgtgctttcttaggtccctgtcctctgtctttgaggctggttaggaagcaagagtcctgatctttcatgctgcacaatatgagcatgcaaaaagctttttccagcagaacatgttccctcgtctccagttgccggaaaggaatttggggatcaagaacttagctcgtcctacccccatgttgagttctgccctggaaaacccaaagcaagtagtgatcatagtacagaacccgaccaaagtaggctggtgaggaagtccaggctccaggggaacagacgctgcccagtgttcatagcttcctgcaacttgacagagcctgagtttgcctcttagtgggagaatgagagagagctgtagtgtcacctgacattccccaaaccttgtgaagcacgttggcctaagtgtgccgtgatcccagcccacactagcctgggtgcatctgctaatgggagaccaaatctttgtccgggaagcaagaagtgggtgggagaatgtatcctgtttttgtcagtttgtttgccttactcatttctaagtgcaataagggagtgtctcacaggattgcacctgtgacatcctgatggatgcttccctgtggccctcctggggcaagggtggacagactcagacccccagcatggttagcgctgaccttcattgaggtccctttggaaccagatgtcttgttacagacaccttcctctgtgtaagtctcctcaccttgaggggtctttagtaatgcatctgggtagcatctcaactgctggtagcatttatctgacttggaaagttggagaagaggcattcctactggagaaaaatgtcagtgttttcctataagctctgtgttagctattcattatatttgtgcttaaagatgttccttcattcatcaactaggggaagtccagatgcgggttatcttgaaagaaacaaactgacattctaggcagacagttgtctatgtggtctgagggtcagcagctgttagtctccttcctttggctcttgagacccacacatatcactttagccctaacaagggctcctcccacctccacctgttgccccagttgaaaagcatccattatgagctgaggtcagcctggatctggaattgcagcccacataaacataaaggaggatgtccctggtctgttccatccccacggatggtgttgctgctgggcaacagtgttggcttcttttaagtaccccctttcctcctcacccacctccaaactgactagcactcagagggacttatgataaaggttcagctccaggggtagtacctgagtgtgtgccatgccccttcagaccagctgcttccatcagaattccagggtcacagccccaacagaagcagcagtgcctctgtaggaggggtgctgggctctggccttctcatgcagagaggtccgggacagggtcagtatcgtgggcatgtgtatagcttcccaagttcttttacagtccctgctgggactccctgacttactttggttggttcctagtgctacttgttttacaaactacactttgtagaattgattagattaccttgtttatttaatgtgagtttgtgcctttttgtctcaatcttccaatacaggtatattgagaaaaaaagcagtctaataaaatcctagacagaa

SEQ ID NO: 376964 - DNA, 3922 bp, Homo sapiens
tggttgccgcagagacgccccgcccccgcgcggcgctgcggaaccggagctccgggcggcgtcggcagcggcgcgagaggcgacgaggcccgggcggcaggagccggcgcggcgaccgcggcgagggcggcggggacggagcagagcacgacgaagacgcacaggcagccgggccgggccgggccacggggagagcggccggcgggcagcgggcgggaggccgggcgggccgcgggcagccaccgagccgcgaagcgacatggtgctgctcaaggagtatcgagtaatcctgcctgtgtctgtagatgagtatcaagtggggcagctgtattctgtggctgaggccagtaaaaatgaaacgggtggtggcgaaggcgtggaggtcctggtgaatgagccctacgagaaggacggtgagaaaggccagtacacacacaagatctaccacctgcagagcaaagtacccacgtttgttcgaatgctggccccagagggagccctgaatatacacgagaaagcctggaatgcttacccctactgcagaaccgttattacaaatgagtacatgaaagaagactttctgattaaaattgaaacctggcacaaaccagatcttggcacgcaggagaatgtgcataagctggagcctgaggcgtggaaacacgtggaagccgtatatatagacattgcagatcgaagccaagtgctcagcaaggattacaaggcagaggaagacccagcaaaatttaaatctatcaaaacaggccgaggacccttgggccccaattggaagcaagagcttgtaaaccagaaggactgcccatatatgtgtgcatacaaactggtgaccgtcaagttcaagtggtggggcctgcagaacaaagtggagaacttcatccataagcaagagaggcgtctgtttacaaacttccacaggcagctgttctgttggctcgataagtgggttgacctgaccatggacgacattcgaaggatggaagaagagacgaagagacagctggatgaaatgagacaaaaggacccagtgaaaggaatgacagcagatgactaaagccgcctttcccctctgcactttttgcaagacagtggtcaacaggaagacccagcagctccaccctcccaagtgacaggccattttcggacgcagccgttctgtgcccattcttcaggcaactttcgattccttactgtagctaattctagatgcccttcagtattgtgaacaaatagaccgtctggtgtcacagagcccgcgtgtgcaggagcctgctcctccgagatacgtggcgtgtaggttgctgtagttacagcgcctccgtctctctccattgtgttccgatccatttctgtgtgttcccccaacctttatttccaagtgacattttcagtctttcaaatagctgccttttgtgatgtggtgatttaaatgatttaagttcatttgttctcaaccttggggtaaactgaggtattttgcttcctgggaagatcttcgcaattttgagtgctcctgtggggagcggggatgagctaaagatacaatgtttccctgccccgcaccgcttccacaaaatagcaatgtggttttgcagctctgacttctgctcccagtaacccatcgttagggcactctagcactatggaggtacccaaggctcagccagtctctatttaagaaaatttaacaaatacgagtaaccctgtcccaatcactgaatctctagttactactcttagaaacacctgtggcttcttggccctcctgttgcccgctctgaatctctctgcagtctacaaaatcgccccagtcaactctccacttggagggaattgtccagtgtggcccctagaattgagtcaccccctagataccaactgtctgaccccgaggagctctgtaagtccctgctcctcctcttccctttggggctggtgctgccactcagcaataatcctcttttctctgtgctttcttaggtccctgtcctctgtctttgaggctggttaggaagcaagagtcctgatctttcatgctgcacaatatgagcatgcaaaaagctttttccagcagaacatgttccctcgtctccagttgccggaaaggaatttggggatcaagaacttagctcgtcctacccccatgttgagttctgccctggaaaacccaaagcaagtagtgatcatagtacagaacccgaccaaagtaggctggtgaggaagtccaggctccaggggaacagacgctgcccagtgttcatagcttcctgcaacttgacagagcctgagtttgcctcttagtgggagaatgagagagagctgtagtgtcacctgacattccccaaaccttgtgaagcacgttggcctaagtgtgccgtgatcccagcccacactagcctgggtgcatctgctaatgggagaccaaatctttgtccgggaagcaagaagtgggtgggagaatgtatcctgtttttgtcagtttgtttgccttactcatttctaagtgcaataagggagtgtctcacaggattgcacctgtgacatcctgatggatgcttccctgtggccctcctggggcaagggtggacagactcagacccccagcatggttagcgctgaccttcattgaggtccctttggaaccagatgtcttgttacagacaccttcctctgtgtaagtctcctcaccttgaggggtctttagtaatgcatctgggtagcatctcaactgctggtagcatttatctgacttggaaagttggagaagaggcattcctactggagaaaaatgtcagtgttttcctataagctctgtgttagctattcattatatttgtgcttaaagatgttccttcattcatcaactaggggaagtccagatgcgggttatcttgaaagaaacaaactgacattctaggcagacagttgtctatgtggtctgagggtcagcagctgttagtctccttcctttggctcttgagacccacacatatcactttagccctaacaagggctcctcccacctccacctgttgccccagttgaaaagcatccattatgagctgaggtcagcctggatctggaattgcagcccacataaacataaaggaggatgtccctggtctgttccatccccacggatggtgttgctgctgggcaacagtgttggcttcttttaagtaccccctttcctcctcacccacctccaaactgactagcactcagagggacttatgataaaggttcagctccaggggtagtacctgagtgtgtgccatgccccttcagaccagctgcttccatcagaattccagggtcacagccccaacagaagcagcagtgcctctgtaggaggggtgctgggctctggccttctcatgcagagaggtccgggacagggtcagtatcgtgggcatgtgtatagcttcccaagttcttttacagtccctgctgggactccctgacttactttggttggttcctagtgctacttgttttacaaactacactttgtagaattgattagattaccttgtttatttaatgtgagtttgtgcctttttgtctcaatcttccaatacaggtatattgagaaaaaaagcagtctaataaaatcctagacagaactttctggagtccagtttggtgatgtccattttccagctgtatgtatcctcaaacttgcactgataaccgccattttaccagggcaggattaggaagaggtacaaaggtgtgtctgaaaatttttgcacgtggatttctgcatataatagtcccgtgtcagtttacttatgcaaacattgcacatctgaattgtaattcggccgtttcctactgacaggatgtccttttgcttttgtctgcctcctcttcacatcttcctctttatccaccctaccaa

SEQ ID NO: 376965 - DNA, 2911 bp, Homo sapiens
  misc_feature (22)..(22): n is a, c, g, or t
  misc_feature (45)..(45): n is a, c, g, or t
gactctagaggatcccatcgangatcagtacggcgaggaccttgngcccccaattggaagcaagagcttgtaaaccagaaggactgcccatatatgtgtgcatacaaactggtgaccgtcaagttcaagtggtggggcctgcagaacaaagtggagaacttcatccataagcaagagaggcgtctgtttacaaacttccacaggcagctgttctgttggctcgataagtgggttgacctgaccatggacgacattcgaaggatggaagaagagacgaagagacagctggatgaaatgagacaaaaggacccagtgaaaggaatgacagcagatgactaaagccgcctttcccctctgcactttttgcaagacagtggtcaacaggaagacccagcagctccaccctcccaagtgacaggccattttcggacgcagccgttctgtgcccattcttcaggcaactttcgattccttactgtagctaattctagatgcccttcagtattgtgaacaaatagaccgtctggtgtcacagagcccgcgtgtgcaggagcctgctcctccgagatacgtggcgtgtaggttgctgtagttacagcgcctccgtctctctccattgtgttccgatccatttctgtgtgttcccccaacctttatttccaagtgacattttcagtctttcaaatagctgccttttgtgatgtggtgatttaaatgatttaagttcatttgttctcaaccttggggtaaactgaggtattttgcttcctgggaagatcttcgcaattttgagtgctcctgtggggagcggggatgagctaaagatacaatgtttccctgccccgcaccgcttccacaaaatagcaatgtggttttgcagctctgacttctgctcccagtaacccatcgttagggcactctagcactatggaggtacccaaggctcagccagtctctatttaagaaaatttaacaaatacgagtaaccctgtcccaatcactgaatctctagttactactcttagaaacacctgtggcttcttggccctcctgttgcccgctctgaatctctctgcagtctacaaaatcgccccagtcaactctccacttggagggaattgtccagtgtggcccctagaattgagtcaccccctagataccaactgtctgaccccgaggagctctgtaagtccctgctcctcctcttccctttggggctggtgctgccactcagcaataatcctcttttctctgtgctttcttaggtccctgtcctctgtctttgaggctggttaggaagcaagagtcctgatctttcatgctgcacaatatgagcatgcaaaaagctttttccagcagaacatgttccctcgtctccagttgccggaaaggaatttggggatcaagaacttagctcgtcctacccccatgttgagttctgccctggaaaacccaaagcaagtagtgatcatagtacagaacccgaccaaagtaggctggtgaggaagtccaggctccaggggaacagacgctgcccagtgttcatagcttcctgcaacttgacagagcctgagtttgcctcttagtgggagaatgagagagagctgtagtgtcacctgacattccccaaaccttgtgaagcacgttggcctaagtgtgccgtgatcccagcccacactagcctgggtgcatctgctaatgggagaccaaatctttgtccgggaagcaagaagtgggtgggagaatgtatcctgtttttgtcagtttgtttgccttactcatttctaagtgcaataagggagtgtctcacaggattgcacctgtgacatcctgatggatgcttccctgtggccctcctggggcaagggtggacagactcagacccccagcatggttagcgctgaccttcattgaggtccctttggaaccagatgtcttgttacagacaccttcctctgtgtaagtctcctcaccttgaggggtctttagtaatgcatctgggtagcatctcaactgctggtagcatttatctgacttggaaagttggagaagaggcattcctactggagaaaaatgtcagtgttttcctataagctctgtgttagctattcattatatttgtgcttaaagatgttccttcattcatcaactaggggaagtccagatgcgggttatcttgaaagaaacaaactgacattctaggcagacagttgtctatgtggtctgagggtcagcagctgttagtctccttcctttggctcttgagacccacacatatcactttagccctaacaagggctcctcccacctccacctgttgccccagttgaaaagcatccattatgagctgaggtcagcctggatctggaattgcagcccacataaacataaaggaggatgtccctggtctgttccatccccacggatggtgttgctgctgggcaacagtgttggcttcttttaagtaccccctttcctcctcacccacctccaaactgactagcactcagagggacttatgataaaggttcagctccaggggtagtacctgagtgtgtgccatgccccttcagaccagctgcttccatcagaattccagggtcacagccccaacagaagcagcagtgcctctgtaggaggggtgctgggctctggccttctcatgcagagaggtccgggacagggtcagtatcgtgggcatgtgtatagcttcccaagttcttttacagtccctgctgggactccctgacttactttggttggttcctagtgctacttgttttacaaactacactttgtagaattgattagattaccttgtttatttaatgtgagtttgtgcctttttgtctcaatcttccaatacaggtatattgagaaaaaaagcagtctaataaaatcctagacagaa

SEQ ID NO: 376966 - DNA, 1172 bp, Homo sapiens
tggttgccgcagagacgccccgcccccgcgcggcgctgcggaaccggagctccgggcggcgtcggcagcggcgcgagaggcgacgaggcccgggcggcaggagccggcgcggcgaccgcggcgagggcggcggggacggagcagagcacgacgaagacgcacaggcagccgggccgggccgggccacggggagagcggccggcgggcagcgggcgggaggccgggcgggccgcgggcagccaccgagccgcgaagcgacatggtgctgctcaaggagtatcgagtaatcctgcctgtgtctgtagatgagtatcaagtggggcagctgtattctgtggctgaggccagtaaaaatgaaacgggtggtggcgaaggcgtggaggtcctggtgaatgagccctacgagaaggacggtgagaaaggccagtacacacacaagatctaccacctgcagagcaaagtacccacgtttgttcgaatgctggccccagagggagccctgaatatacacgagaaagcctggaatgcttacccctactgcagaaccgttattacaaatgagtacatgaaagaagactttctgattaaaattgaaacctggcacaaaccagatcttggcacgcaggagaatgtgcataagctggagcctgaggcgtggaaacacgtggaagccgtatatatagacattgcagatcgaagccaagtgctcagcaaggattacaaggcagaggaagacccagcaaaatttaaatctatcaaaacaggccgaggacccttgggccccaattggaagcaagagcttgtaaaccagaaggactgcccatatatgtgtgcatacaaactggtgaccgtcaagttcaagtggtggggcctgcagaacaaagtggagaacttcatccataagcaagagaggcgtctgtttacaaacttccacaggcagctgttctgttggctcgataagtgggttgcgcgagaggggttatcagagacaagattcgataggatgaaagaacgagtagcgaagagagaacgcgatcaaatggaacgaagggagatcagtaaagggagaacgagcagaggacgagaagcggcccgtaaatggccgcacatcttgggaagagcggaggtgaacaggaagaccccaggagcaccatcctgcaaaaagacacggc

SEQ ID NO: 376967 - DNA, 4908 bp, Homo sapiens
cgtccgcgtggggggggtgtgtgcccgccttgcgcatgcgtgttccctgggcatggccggctccgttccatccttctgcacagggtatcgcctctctccgtttggtacatcccctcctcccccacgcccggactggggtggtagacgcgcctccgctcatcgcccctccccatcggtttccctgaaccttcacctagccccaggattacaaggaaaagcaccaggcaaaccaccatcacatctcattttgcaaagggccctgccaaacggaaacctcaggaagagtctgaaagagccaaatcggatgagtccatcaaggaagaagacaaagaccaggatgagaagagacgtagagttacatccagagaacgagttgctagaccgcttcctgcagaagaacctgaaagagcaaaatcaggaacgcgcactgaaaaggaagaagaaagagatgaaaaagaagaaaagagactccgaagtcaaaccaaagaaccaacacccaaacagaaactgaaggaggagccggacagagaagccagggcaggcgtgcaggctgacgaggacgaagatggagacgagaaagatgagaagaagcacagaagtcaacccaaagatctagctgccaaacggaggcccgaagaaaaagaacctgaaaaagtaaatccacagatttctgatgaaaaagacgaggatgaaaaggaggagaagagacgcaaaacgacccccaaagaaccaacggagaaaaaaatggctcgcgccaaaacagtcatgaactccaagacccaccctcccaagtgcattcagtgcgggcagtacctggacgaccctgacctcaaatatgggcagcacccaccagacgcggtggatgagccacagatgctgacaaatgagaagctgtccatctttgatgccaacgagtctggctttgagagttatgaggcgcttccccagcacaaactgacctgcttcagtgtgtactgtaagcacggtcacctgtgtcccatcgacaccggcctcatcgagaagaatatcgaactcttcttttctggttcagcaaaaccaatctatgatgatgacccgtctcttgaaggtggtgttaatggcaaaaatcttggccccataaatgaatggtggatcactggctttgatggaggtgaaaaggccctcatcggcttcagcacctcatttgccgaatacattctgatggatcccagtcccgagtatgcgcccatatttgggctgatgcaggagaagatctacatcagcaagattgtggtggagttcctgcagagcaattccgactcgacctatgaggacctgatcaacaagatcgagaccacggttcctccttctggcctcaacttgaaccgcttcacagaggactccctcctgcgacacgcgcagtttgtggtggagcaggtggagagttatgacgaggccggggacagtgatgagcagcccatcttcctgacgccctgcatgcgggacctgatcaagctggctggggtcacgctgggacagaggcgagcccaggcgaggcggcagaccatcaggcattctaccagggagaaggacaggggacccacgaaagccaccaccaccaagctggtctaccagatcttcgatactttcttcgcagagcaaattgaaaaggatgacagagaagacaaggagaacgcctttaagcgccggcgatgtggcgtctgtgaggtgtgtcagcagcctgagtgtgggaaatgtaaagcctgcaaggacatggttaaatttggtggcagtggacggagcaagcaggcttgccaagagcggaggtgtcccaatatggccatgaaggaggcagatgacgatgaggaagtcgatgataacatcccagagatgccgtcacccaaaaaaatgcaccaggggaagaagaagaaacagaacaagaatcgcatctcttgggtcggagaagccgtcaagactgatgggaagaagagttactataagaaggtgtgcattgatgcggaaaccctggaagtgggggactgtgtctctgttattccagatgattcctcaaaaccgctgtatctagcaagggtcacggcgctgtgggaggacagcagcaacgggcagatgtttcacgcccactggttctgcgctgggacagacacagtcctcggggccacgtcggaccctctggagctgttcttggtggatgaatgtgaggacatgcagctttcatatatccacagcaaagtgaaagtcatctacaaagccccctccgaaaactgggccatggagggaggcatggatcccgagtccctgctggagggggacgacgggaagacctacttctaccagctgtggtatgatcaagactacgcgagattcgagtcccctccaaaaacccagccaacagaggacaacaagttcaaattctgtgtgagctgtgcccgtctggctgagatgaggcaaaaagaaatccccagggtcctggagcagctcgaggacctggatagccgggtcctctactactcagccaccaagaacggcatcctgtaccgagttggtgatggtgtgtacctgccccctgaggccttcacgttcaacatcaagctgtccagtcccgtgaaacgcccacggaaggagcccgtggatgaggacctgtacccagagcactaccggaaatactccgactacatcaaaggcagcaacctggatgcccctgagccctaccgaattggccggatcaaagagatcttctgtcccaagaagagcaacggcaggcccaatgagactgacatcaaaatccgggtcaacaagttctacaggcctgagaacacccacaagtccactccagcgagctaccacgcagacatcaacctgctctactggagcgacgaggaggccgtggtggacttcaaggctgtgcagggccgctgcaccgtggagtatggggaggacctgcccgagtgcgtccaggtgtactccatgggcggccccaaccgcttctacttcctcgaggcctataatgcaaagagcaaaagctttgaagatcctcccaaccatgcccgtagccctggaaacaaagggaagggcaagggaaaagggaagggcaagcccaagtcccaagcctgtgagccgagcgagccagagatagagatcaagctgcccaagctgcggaccctggatgtgttttctggctgcggggggttgtcggagggattccaccaagcaggcatctctgacacgctgtgggccatcgagatgtgggaccctgcggcccaggcgttccggctgaacaaccccggctccacagtgttcacagaggactgcaacatcctgctgaagctggtcatggctggggagaccaccaactcccgcggccagcggctgccccagaagggagacgtggagatgctgtgcggcgggccgccctgccagggcttcagcggcatgaaccgcttcaattcgcgcacctactccaagttcaaaaactctctggtggtttccttcctcagctactgcgactactaccggccccggttcttcctcctggagaatgtcaggaactttgtctccttcaagcgctccatggtcctgaagctcaccctccgctgcctggtccgcatgggctatcagtgcaccttcggcgtgctgcaggccggtcagtacggcgtggcccagactaggaggcgggccatcatcctggccgcggcccctggagagaagctccctctgttcccggagccactgcacgtgtttgctccccgggcctgccagctgagcgtggtggtggatgacaagaagtttgtgagcaacataaccaggttgagctcgggtcctttccggaccatcacggtgcgagacacgatgtccgacctgccggaggtgcggaatggagcctcggcactggagatctcctacaacggggagcctcagtcctggttccagaggcagctccggggcgcacagtaccagcccatcctcagggaccacatctgtaaggacatgagtgcattggtggctgcccgcatgcggcacatccccttggccccagggtcagactggcgcgatctgcccaacatcgaggtgcggctctcagacggcaccatggccaggaagctgcggtatacccaccatgacaggaagaacggccgcagcagctctggggccctccgtggggtctgctcctgcgtggaagccggcaaagcctgcgaccccgcagccaggcagttcaacaccctcatcccctggtgcctgccccacaccgggaaccggcacaaccactgggctggcctctatggaaggctcgagtgggacggcttcttcagcacaaccgtcaccaaccccgagcccatgggcaagcagggccgcgtgctccacccagagcagcaccgtgtggtgagcgtgcgggagtgtgcccgctcccagggcttccctgacacctaccggctcttcggcaacatcctggacaagcaccggcaggtgggcaatgccgtgccaccgcccctggccaaagccattggcttggagatcaagctttgtatgttggccaaagcccgagagagtgcctcagctaaaataaaggaggaggaagctgctaaggactagttctgccctcccgtcacccctgtttctggcaccaggaatccccaacatgcactgatgttgtgtttttaacatgtcaatctgtccgttcacatgtgtggtacatggtgtttgtggccttggctgacatgaagctgttgtgtgaggttcgcttatcaactaatgatttagtgatcaaattgtgcagtactttgtgcattctggattttaaaagttttttattatgcattatatcaaatctaccactgtatgagtggaaattaagactttatgtagtttttatatgttgtaatatttcttcaaataaatctctcctataaacca

SEQ ID NO: 376968 - DNA, 526 bp, Homo sapiens
ggcagagattgagccagaaggacagtccgtcgcgctaaaggagcaggctaaaacccatggtggcgacagctcactcgctgtgggcaatgccgtgccaccgcccctggccaaagccattggcttggagatcaagctttgtatgttggccaaagcccgagagagtgcctcagctaaaataaaggaggaggaagctgctaaggactagttctgccctcccgtcacccctgtttctggcaccaggaatccccaacatgcactgatgttgtgtttttaacatgtcaatctgtccgttcacatgtgtggtacatggtgtttgtggccttggctgacatgaagctgttgtgtgaggttcgcttatcaactaatgatttagtgatcaaattgtgcagtactttgtgcattctggattttaaaagttttttattatgcattatatcaaatctaccactgtatgagtggaaattaagactttatgtagtttttatatgttgtaatatttcttcaaataaatctctcctataaacca

SEQ ID NO: 376969 - DNA, 476 bp, Homo sapiens
ttgttgttactggtctaacctgcttgaactagtctgctgtcctgtcaaatgcatctttttatttacatgtcccttaaattaaagctgatcatgaaagtaaaaaaaaaaaaaaaaaaactgctaaaataaaggaggaggaagctgctaaggactagttctgccctcccgtcacccctgtttctggcaccaggaatccccaacatgcactgatgttgtgtttttaacatgtcaatctgtccgttcacatgtgtggtacatggtgtttgtggccttggctgacatgaagctgttgtgtgaggttcgcttatcaactaatgatttagtgatcaaattgtgcagtactttgtgcattctggattttaaaagttttttattatgcattatatcaaatctaccactgtatgagtggaaattaagactttatgtagtttttatatgttgtaatatttcttcaaataaatctctcctataaacca

SEQ ID NO: 376970 - DNA, 638 bp, Homo sapiens
aagcaggaaaaaatatgtagggtataaaatgtttattatattaaactgctgaattacccaaatgtctgtaagttgtcagctgaaagaaccaaaaagaaaaaaaaaaaaaaaaaaagcctgttctagaaacctgtggtgatgtagatgtgtggggaccctggggcctctgaaggcctcgtctcgggatgacaagctggcagtgtgcctatagagctcccatgggtatcttgctttcccatggggaggcattagtttgtcactttccgtgcgagttggcgatgtggttagtgtttctaagctgctacttgctgtgtatctgttcaccctgcagagctgccaaacggaggcccgaagaaaaagaacctgaaaaagtaaatccacagatttctgatgaaaaagacgaggatgaaaaggaggagaagagacgcaaaacgacccccaaagaaccgtaagaatttattcttgacattatcgaaagcagatggtaatgttaaaatgatggttctagaacaaaagggaaggggtttcagtaattgccagagcaaccttaggctcattttggatcgggttggtgaacataggaccaaggtgcgtcaggcaggatgcccctgcggtgaagagccactgtgaccacgcgc

SEQ ID NO: 376971 - DNA, 5175 bp, Homo sapiens
cccagccccagccgcggccgccctggggacgcagacgccaaggcccctccggccagggccgggagccgggccggcctagccaggctcaaagatttggaaagagacagcttaacagaaaaggaatgtgtgaaggagaaattgaatctcttgcacgaatttctgcaaacagaaataaagaatcagttatgtgacttggaaaccaaattacgtaaagaagaattatccgaggagggctacctggctaaagtcaaatcccttttaaataaagatttgtccttggagaacggtgctcatgcttacaaccgggaagtgaatggacgtctagaaaacgggaaccaagcaagaagtgaagcccgtagagtgggaatggcagatgccaacagcccccccaaacccctttccaaacctcgcacgcccaggaggagcaagtccgatggagaggctaagcctgaaccttcacctagccccaggattacaaggaaaagcaccaggcaaaccaccatcacatctcattttgcaaagggccctgccaaacggaaacctcaggaagagtctgaaagagccaaatcggatgagtccatcaaggaagaagacaaagaccaggatgagaagagacgtagagttacatccagagaacgagttgctagaccgcttcctgcagaagaacctgaaagagcaaaatcaggaacgcgcactgaaaaggaagaagaaagagatgaaaaagaagaaaagagactccgaagtcaaaccaaagaaccaacacccaaacagaaactgaaggaggagccggacagagaagccagggcaggcgtgcaggctgacgaggacgaagatggagacgagaaagatgagaagaagcacagaagtcaacccaaagatctagctgccaaacggaggcccgaagaaaaagaacctgaaaaagtaaatccacagatttctgatgaaaaagacgaggatgaaaaggaggagaagagacgcaaaacgacccccaaagaaccaacggagaaaaaaatggctcgcgccaaaacagtcatgaactccaagacccaccctcccaagtgcattcagtgcgggcagtacctggacgaccctgacctcaaatatgggcagcacccaccagacgcggtggatgagccacagatgctgacaaatgagaagctgtccatctttgatgccaacgagtctggctttgagagttatgaggcgcttccccagcacaaactgacctgcttcagtgtgtactgtaagcacggtcacctgtgtcccatcgacaccggcctcatcgagaagaatatcgaactcttcttttctggttcagcaaaaccaatctatgatgatgacccgtctcttgaaggtggtgttaatggcaaaaatcttggccccataaatgaatggtggatcactggctttgatggaggtgaaaaggccctcatcggcttcagcacctcatttgccgaatacattctgatggatcccagtcccgagtatgcgcccatatttgggctgatgcaggagaagatctacatcagcaagattgtggtggagttcctgcagagcaattccgactcgacctatgaggacctgatcaacaagatcgagaccacggttcctccttctggcctcaacttgaaccgcttcacagaggactccctcctgcgacacgcgcagtttgtggtggagcaggtggagagttatgacgaggccggggacagtgatgagcagcccatcttcctgacgccctgcatgcgggacctgatcaagctggctggggtcacgctgggacagaggcgagcccaggcgaggcggcagaccatcaggcattctaccagggagaaggacaggggacccacgaaagccaccaccaccaagctggtctaccagatcttcgatactttcttcgcagagcaaattgaaaaggatgacagagaagacaaggagaacgcctttaagcgccggcgatgtggcgtctgtgaggtgtgtcagcagcctgagtgtgggaaatgtaaagcctgcaaggacatggttaaatttggtggcagtggacggagcaagcaggcttgccaagagcggaggtgtcccaatatggccatgaaggaggcagatgacgatgaggaagtcgatgataacatcccagagatgccgtcacccaaaaaaatgcaccaggggaagaagaagaaacagaacaagaatcgcatctcttgggtcggagaagccgtcaagactgatgggaagaagagttactataagaaggtgtgcattgatgcggaaaccctggaagtgggggactgtgtctctgttattccagatgattcctcaaaaccgctgtatctagcaagggtcacggcgctgtgggaggacagcagcaacgggcagatgtttcacgcccactggttctgcgctgggacagacacagtcctcggggccacgtcggaccctctggagctgttcttggtggatgaatgtgaggacatgcagctttcatatatccacagcaaagtgaaagtcatctacaaagccccctccgaaaactgggccatggagggaggcatggatcccgagtccctgctggagggggacgacgggaagacctacttctaccagctgtggtatgatcaagactacgcgagattcgagtcccctccaaaaacccagccaacagaggacaacaagttcaaattctgtgtgagctgtgcccgtctggctgagatgaggcaaaaagaaatccccagggtcctggagcagctcgaggacctggatagccgggtcctctactactcagccaccaagaacggcatcctgtaccgagttggtgatggtgtgtacctgccccctgaggccttcacgttcaacatcaagctgtccagtcccgtgaaacgcccacggaaggagcccgtggatgaggacctgtacccagagcactaccggaaatactccgactacatcaaaggcagcaacctggatgcccctgagccctaccgaattggccggatcaaagagatcttctgtcccaagaagagcaacggcaggcccaatgagactgacatcaaaatccgggtcaacaagttctacaggcctgagaacacccacaagtccactccagcgagctaccacgcagacatcaacctgctctactggagcgacgaggaggccgtggtggacttcaaggctgtgcagggccgctgcaccgtggagtatggggaggacctgcccgagtgcgtccaggtgtactccatgggcggccccaaccgcttctacttcctcgaggcctataatgcaaagagcaaaagctttgaagatcctcccaaccatgcccgtagccctggaaacaaagggaagggcaagggaaaagggaagggcaagcccaagtcccaagcctgtgagccgagcgagccagagatagagatcaagctgcccaagctgcggaccctggatgtgttttctggctgcggggggttgtcggagggattccaccaagcaggcatctctgacacgctgtgggccatcgagatgtgggaccctgcggcccaggcgttccggctgaacaaccccggctccacagtgttcacagaggactgcaacatcctgctgaagctggtcatggctggggagaccaccaactcccgcggccagcggctgccccagaagggagacgtggagatgctgtgcggcgggccgccctgccagggcttcagcggcatgaaccgcttcaattcgcgcacctactccaagttcaaaaactctctggtggtttccttcctcagctactgcgactactaccggccccggttcttcctcctggagaatgtcaggaactttgtctccttcaagcgctccatggtcctgaagctcaccctccgctgcctggtccgcatgggctatcagtgcaccttcggcgtgctgcaggccggtcagtacggcgtggcccagactaggaggcgggccatcatcctggccgcggcccctggagagaagctccctctgttcccggagccactgcacgtgtttgctccccgggcctgccagctgagcgtggtggtggatgacaagaagtttgtgagcaacataaccaggttgagctcgggtcctttccggaccatcacggtgcgagacacgatgtccgacctgccggaggtgcggaatggagcctcggcactggagatctcctacaacggggagcctcagtcctggttccagaggcagctccggggcgcacagtaccagcccatcctcagggaccacatctgtaaggacatgagtgcattggtggctgcccgcatgcggcacatccccttggccccagggtcagactggcgcgatctgcccaacatcgaggtgcggctctcagacggcaccatggccaggaagctgcggtatacccaccatgacaggaagaacggccgcagcagctctggggccctccgtggggtctgctcctgcgtggaagccggcaaagcctgcgaccccgcagccaggcagttcaacaccctcatcccctggtgcctgccccacaccgggaaccggcacaaccactgggctggcctctatggaaggctcgagtgggacggcttcttcagcacaaccgtcaccaaccccgagcccatgggcaagcagggccgcgtgctccacccagagcagcaccgtgtggtgagcgtgcgggagtgtgcccgctcccagggcttccctgacacctaccggctcttcggcaacatcctggacaagcaccggcaggtgggcaatgccgtgccaccgcccctggccaaagccattggcttggagatcaagctttgtatgttggccaaagcccgagagagtgcctcagctaaaataaaggaggaggaagctgctaaggactagttctgccctcccgtcacccctgtttctggcaccaggaatccccaacatgcactgatgttgtgtttttaacatgtcaatctgtccgttcacatgtgtggtacatggtgtttgtggccttggctgacatgaagctgttgtgtgaggttcgcttatcaactaatgatttagtgatcaaattgtgcagtactttgtgcattctggattttaaaagttttttattatgcattatatcaaatctaccactgtatgagtggaaattaagactttatgtagtttttatatgttgtaatatttcttcaaataaatctctcctataaacca

SEQ ID NO: 376972 - DNA, 5293 bp, Homo sapiens
cccagccccagccgcggccgccctggggacgcagacgccaaggcccctccggccagggccgggagccgggccggcctagccagggtctgactctgtcacccaggctggagtgcagtgacgtaatcacagctcaccgcagccttgacctcctgggctcaagccatcctcccacctcaatctcccaagtaggtggaactacaggctcaaagatttggaaagagacagcttaacagaaaaggaatgtgtgaaggagaaattgaatctcttgcacgaatttctgcaaacagaaataaagaatcagttatgtgacttggaaaccaaattacgtaaagaagaattatccgaggagggctacctggctaaagtcaaatcccttttaaataaagatttgtccttggagaacggtgctcatgcttacaaccgggaagtgaatggacgtctagaaaacgggaaccaagcaagaagtgaagcccgtagagtgggaatggcagatgccaacagcccccccaaacccctttccaaacctcgcacgcccaggaggagcaagtccgatggagaggctaagcctgaaccttcacctagccccaggattacaaggaaaagcaccaggcaaaccaccatcacatctcattttgcaaagggccctgccaaacggaaacctcaggaagagtctgaaagagccaaatcggatgagtccatcaaggaagaagacaaagaccaggatgagaagagacgtagagttacatccagagaacgagttgctagaccgcttcctgcagaagaacctgaaagagcaaaatcaggaacgcgcactgaaaaggaagaagaaagagatgaaaaagaagaaaagagactccgaagtcaaaccaaagaaccaacacccaaacagaaactgaaggaggagccggacagagaagccagggcaggcgtgcaggctgacgaggacgaagatggagacgagaaagatgagaagaagcacagaagtcaacccaaagatctagctgccaaacggaggcccgaagaaaaagaacctgaaaaagtaaatccacagatttctgatgaaaaagacgaggatgaaaaggaggagaagagacgcaaaacgacccccaaagaaccaacggagaaaaaaatggctcgcgccaaaacagtcatgaactccaagacccaccctcccaagtgcattcagtgcgggcagtacctggacgaccctgacctcaaatatgggcagcacccaccagacgcggtggatgagccacagatgctgacaaatgagaagctgtccatctttgatgccaacgagtctggctttgagagttatgaggcgcttccccagcacaaactgacctgcttcagtgtgtactgtaagcacggtcacctgtgtcccatcgacaccggcctcatcgagaagaatatcgaactcttcttttctggttcagcaaaaccaatctatgatgatgacccgtctcttgaaggtggtgttaatggcaaaaatcttggccccataaatgaatggtggatcactggctttgatggaggtgaaaaggccctcatcggcttcagcacctcatttgccgaatacattctgatggatcccagtcccgagtatgcgcccatatttgggctgatgcaggagaagatctacatcagcaagattgtggtggagttcctgcagagcaattccgactcgacctatgaggacctgatcaacaagatcgagaccacggttcctccttctggcctcaacttgaaccgcttcacagaggactccctcctgcgacacgcgcagtttgtggtggagcaggtggagagttatgacgaggccggggacagtgatgagcagcccatcttcctgacgccctgcatgcgggacctgatcaagctggctggggtcacgctgggacagaggcgagcccaggcgaggcggcagaccatcaggcattctaccagggagaaggacaggggacccacgaaagccaccaccaccaagctggtctaccagatcttcgatactttcttcgcagagcaaattgaaaaggatgacagagaagacaaggagaacgcctttaagcgccggcgatgtggcgtctgtgaggtgtgtcagcagcctgagtgtgggaaatgtaaagcctgcaaggacatggttaaatttggtggcagtggacggagcaagcaggcttgccaagagcggaggtgtcccaatatggccatgaaggaggcagatgacgatgaggaagtcgatgataacatcccagagatgccgtcacccaaaaaaatgcaccaggggaagaagaagaaacagaacaagaatcgcatctcttgggtcggagaagccgtcaagactgatgggaagaagagttactataagaaggtgtgcattgatgcggaaaccctggaagtgggggactgtgtctctgttattccagatgattcctcaaaaccgctgtatctagcaagggtcacggcgctgtgggaggacagcagcaacgggcagatgtttcacgcccactggttctgcgctgggacagacacagtcctcggggccacgtcggaccctctggagctgttcttggtggatgaatgtgaggacatgcagctttcatatatccacagcaaagtgaaagtcatctacaaagccccctccgaaaactgggccatggagggaggcatggatcccgagtccctgctggagggggacgacgggaagacctacttctaccagctgtggtatgatcaagactacgcgagattcgagtcccctccaaaaacccagccaacagaggacaacaagttcaaattctgtgtgagctgtgcccgtctggctgagatgaggcaaaaagaaatccccagggtcctggagcagctcgaggacctggatagccgggtcctctactactcagccaccaagaacggcatcctgtaccgagttggtgatggtgtgtacctgccccctgaggccttcacgttcaacatcaagctgtccagtcccgtgaaacgcccacggaaggagcccgtggatgaggacctgtacccagagcactaccggaaatactccgactacatcaaaggcagcaacctggatgcccctgagccctaccgaattggccggatcaaagagatcttctgtcccaagaagagcaacggcaggcccaatgagactgacatcaaaatccgggtcaacaagttctacaggcctgagaacacccacaagtccactccagcgagctaccacgcagacatcaacctgctctactggagcgacgaggaggccgtggtggacttcaaggctgtgcagggccgctgcaccgtggagtatggggaggacctgcccgagtgcgtccaggtgtactccatgggcggccccaaccgcttctacttcctcgaggcctataatgcaaagagcaaaagctttgaagatcctcccaaccatgcccgtagccctggaaacaaagggaagggcaagggaaaagggaagggcaagcccaagtcccaagcctgtgagccgagcgagccagagatagagatcaagctgcccaagctgcggaccctggatgtgttttctggctgcggggggttgtcggagggattccaccaagcaggcatctctgacacgctgtgggccatcgagatgtgggaccctgcggcccaggcgttccggctgaacaaccccggctccacagtgttcacagaggactgcaacatcctgctgaagctggtcatggctggggagaccaccaactcccgcggccagcggctgccccagaagggagacgtggagatgctgtgcggcgggccgccctgccagggcttcagcggcatgaaccgcttcaattcgcgcacctactccaagttcaaaaactctctggtggtttccttcctcagctactgcgactactaccggccccggttcttcctcctggagaatgtcaggaactttgtctccttcaagcgctccatggtcctgaagctcaccctccgctgcctggtccgcatgggctatcagtgcaccttcggcgtgctgcaggccggtcagtacggcgtggcccagactaggaggcgggccatcatcctggccgcggcccctggagagaagctccctctgttcccggagccactgcacgtgtttgctccccgggcctgccagctgagcgtggtggtggatgacaagaagtttgtgagcaacataaccaggttgagctcgggtcctttccggaccatcacggtgcgagacacgatgtccgacctgccggaggtgcggaatggagcctcggcactggagatctcctacaacggggagcctcagtcctggttccagaggcagctccggggcgcacagtaccagcccatcctcagggaccacatctgtaaggacatgagtgcattggtggctgcccgcatgcggcacatccccttggccccagggtcagactggcgcgatctgcccaacatcgaggtgcggctctcagacggcaccatggccaggaagctgcggtatacccaccatgacaggaagaacggccgcagcagctctggggccctccgtggggtctgctcctgcgtggaagccggcaaagcctgcgaccccgcagccaggcagttcaacaccctcatcccctggtgcctgccccacaccgggaaccggcacaaccactgggctggcctctatggaaggctcgagtgggacggcttcttcagcacaaccgtcaccaaccccgagcccatgggcaagcagggccgcgtgctccacccagagcagcaccgtgtggtgagcgtgcgggagtgtgcccgctcccagggcttccctgacacctaccggctcttcggcaacatcctggacaagcaccggcaggtgggcaatgccgtgccaccgcccctggccaaagccattggcttggagatcaagctttgtatgttggccaaagcccgagagagtgcctcagctaaaataaaggaggaggaagctgctaaggactagttctgccctcccgtcacccctgtttctggcaccaggaatccccaacatgcactgatgttgtgtttttaacatgtcaatctgtccgttcacatgtgtggtacatggtgtttgtggccttggctgacatgaagctgttgtgtgaggttcgcttatcaactaatgatttagtgatcaaattgtgcagtactttgtgcattctggattttaaaagttttttattatgcattatatcaaatctaccactgtatgagtggaaattaagactttatgtagtttttatatgttgtaatatttcttcaaataaatctctcctataaacca

SEQ ID NO: 376973 - DNA, 5366 bp, Homo sapiens
cgtccgcgtggggggggtgtgtgcccgccttgcgcatgcgtgttccctgggcatggccggctccgttccatccttctgcacagggtatcgcctctctccgtttggtacatcccctcctcccccacgcccggactggggtggtagacgcgcctccgctcatcgcccctccccatcggtttccgcgcgaaaagccggggcgcctgcgctgccgccgccgcgtctgctgaagcctccgagatgccggcgcgtaccgccccagcccgggtgcccacactggccgtcccggccatctcgctgcccgacgatgtccgcaggcggctcaaagatttggaaagagacagcttaacagaaaaggaatgtgtgaaggagaaattgaatctcttgcacgaatttctgcaaacagaaataaagaatcagttatgtgacttggaaaccaaattacgtaaagaagaattatccgaggagggctacctggctaaagtcaaatcccttttaaataaagatttgtccttggagaacggtgctcatgcttacaaccgggaagtgaatggacgtctagaaaacgggaaccaagcaagaagtgaagcccgtagagtgggaatggcagatgccaacagcccccccaaacccctttccaaacctcgcacgcccaggaggagcaagtccgatggagaggctaagcctgaaccttcacctagccccaggattacaaggaaaagcaccaggcaaaccaccatcacatctcattttgcaaagggccctgccaaacggaaacctcaggaagagtctgaaagagccaaatcggatgagtccatcaaggaagaagacaaagaccaggatgagaagagacgtagagttacatccagagaacgagttgctagaccgcttcctgcagaagaacctgaaagagcaaaatcaggaacgcgcactgaaaaggaagaagaaagagatgaaaaagaagaaaagagactccgaagtcaaaccaaagaaccaacacccaaacagaaactgaaggaggagccggacagagaagccagggcaggcgtgcaggctgacgaggacgaagatggagacgagaaagatgagaagaagcacagaagtcaacccaaagatctagctgccaaacggaggcccgaagaaaaagaacctgaaaaagtaaatccacagatttctgatgaaaaagacgaggatgaaaaggaggagaagagacgcaaaacgacccccaaagaaccaacggagaaaaaaatggctcgcgccaaaacagtcatgaactccaagacccaccctcccaagtgcattcagtgcgggcagtacctggacgaccctgacctcaaatatgggcagcacccaccagacgcggtggatgagccacagatgctgacaaatgagaagctgtccatctttgatgccaacgagtctggctttgagagttatgaggcgcttccccagcacaaactgacctgcttcagtgtgtactgtaagcacggtcacctgtgtcccatcgacaccggcctcatcgagaagaatatcgaactcttcttttctggttcagcaaaaccaatctatgatgatgacccgtctcttgaaggtggtgttaatggcaaaaatcttggccccataaatgaatggtggatcactggctttgatggaggtgaaaaggccctcatcggcttcagcacctcatttgccgaatacattctgatggatcccagtcccgagtatgcgcccatatttgggctgatgcaggagaagatctacatcagcaagattgtggtggagttcctgcagagcaattccgactcgacctatgaggacctgatcaacaagatcgagaggactccctcctgcgacacgcgcagtttgtggtggagcaggtggagagttatgacgaggccggggacagtgatgagcagcccatcttcctgacgccctgcatgcgggacctgatcaagctggctggggtcacgctgggacagaggcgagcccaggcgaggcggcagaccatcaggcattctaccagggagaaggacaggggacccacgaaagccaccaccaccaagctggtctaccagatcttcgatactttcttcgcagagcaaattgaaaaggatgacagagaagacaaggagaacgcctttaagcgccggcgatgtggcgtctgtgaggtgtgtcagcagcctgagtgtgggaaatgtaaagcctgcaaggacatggttaaatttggtggcagtggacggagcaagcaggcttgccaagagcggaggtgtcccaatatggccatgaaggaggcagatgacgatgaggaagtcgatgataacatcccagagatgccgtcacccaaaaaaatgcaccaggggaagaagaagaaacagaacaagaatcgcatctcttgggtcggagaagccgtcaagactgatgggaagaagagttactataagaaggtgtgcattgatgcggaaaccctggaagtgggggactgtgtctctgttattccagatgattcctcaaaaccgctgtatctagcaagggtcacggcgctgtgggaggacagcagcaacgggcagatgtttcacgcccactggttctgcgctgggacagacacagtcctcggggccacgtcggaccctctggagctgttcttggtggatgaatgtgaggacatgcagctttcatatatccacagcaaagtgaaagtcatctacaaagccccctccgaaaactgggccatggagggaggcatggatcccgagtccctgctggagggggacgacgggaagacctacttctaccagctgtggtatgatcaagactacgcgagattcgagtcccctccaaaaacccagccaacagaggacaacaagttcaaattctgtgtgagctgtgcccgtctggctgagatgaggcaaaaagaaatccccagggtcctggagcagctcgaggacctggatagccgggtcctctactactcagccaccaagaacggcatcctgtaccgagttggtgatggtgtgtacctgccccctgaggccttcacgttcaacatcaagctgtccagtcccgtgaaacgcccacggaaggagcccgtggatgaggacctgtacccagagcactaccggaaatactccgactacatcaaaggcagcaacctggatgcccctgagccctaccgaattggccggatcaaagagatcttctgtcccaagaagagcaacggcaggcccaatgagactgacatcaaaatccgggtcaacaagttctacaggcctgagaacacccacaagtccactccagcgagctaccacgcagacatcaacctgctctactggagcgacgaggaggccgtggtggacttcaaggctgtgcagggccgctgcaccgtggagtatggggaggacctgcccgagtgcgtccaggtgtactccatgggcggccccaaccgcttctacttcctcgaggcctataatgcaaagagcaaaagctttgaagatcctcccaaccatgcccgtagccctggaaacaaagggaagggcaagggaaaagggaagggcaagcccaagtcccaagcctgtgagccgagcgagccagagatagagatcaagctgcccaagctgcggaccctggatgtgttttctggctgcggggggttgtcggagggattccaccaagcaggcatctctgacacgctgtgggccatcgagatgtgggaccctgcggcccaggcgttccggctgaacaaccccggctccacagtgttcacagaggactgcaacatcctgctgaagctggtcatggctggggagaccaccaactcccgcggccagcggctgccccagaagggagacgtggagatgctgtgcggcgggccgccctgccagggcttcagcggcatgaaccgcttcaattcgcgcacctactccaagttcaaaaactctctggtggtttccttcctcagctactgcgactactaccggccccggttcttcctcctggagaatgtcaggaactttgtctccttcaagcgctccatggtcctgaagctcaccctccgctgcctggtccgcatgggctatcagtgcaccttcggcgtgctgcaggccggtcagtacggcgtggcccagactaggaggcgggccatcatcctggccgcggcccctggagagaagctccctctgttcccggagccactgcacgtgtttgctccccgggcctgccagctgagcgtggtggtggatgacaagaagtttgtgagcaacataaccaggttgagctcgggtcctttccggaccatcacggtgcgagacacgatgtccgacctgccggaggtgcggaatggagcctcggcactggagatctcctacaacggggagcctcagtcctggttccagaggcagctccggggcgcacagtaccagcccatcctcagggaccacatctgtaaggacatgagtgcattggtggctgcccgcatgcggcacatccccttggccccagggtcagactggcgcgatctgcccaacatcgaggtgcggctctcagacggcaccatggccaggaagctgcggtatacccaccatgacaggaagaacggccgcagcagctctggggccctccgtggggtctgctcctgcgtggaagccggcaaagcctgcgaccccgcagccaggcagttcaacaccctcatcccctggtgcctgccccacaccgggaaccggcacaaccactgggctggcctctatggaaggctcgagtgggacggcttcttcagcacaaccgtcaccaaccccgagcccatgggcaagcagggccgcgtgctccacccagagcagcaccgtgtggtgagcgtgcgggagtgtgcccgctcccagggcttccctgacacctaccggctcttcggcaacatcctggacaagcaccggcaggtgggcaatgccgtgccaccgcccctggccaaagccattggcttggagatcaagctttgtatgttggccaaagcccgagagagtgcctcagctaaaataaaggaggaggaagctgctaaggactagttctgccctcccgtcacccctgtttctggcaccaggaatccccaacatgcactgatgttgtgtttttaacatgtcaatctgtccgttcacatgtgtggtacatggtgtttgtggccttggctgacatgaagctgttgtgtgaggttcgcttatcaactaatgatttagtgatcaaattgtgcagtactttgtgcattctggattttaaaagttttttattatgcattatatcaaatctaccactgtatgagtggaaattaagactttatgtagtttttatatgttgtaatatttcttcaaataaatctctcctataaacca

SEQ ID NO: 376974 - DNA, 4626 bp, Homo sapiens
cccagccccagccgcggccgccctggggacgcagacgccaaggcccctccggccagggccgggagccgggccggcctagccaggctcaaagatttggaaagagacagcttaacagaaaaggaatgtgtgaaggagaaattgaatctcttgcacgaatttctgcaaacagaaataaagaatcagttatgtgacttggaaaccaaattacgtaaagaagaattatccgaggagggctacctggctaaagtcaaatcccttttaaataaagatttgtccttggagaacggtgctcatgcttacaaccgggaagtgaatggacgtctagaaaacgggaaccaagcaagaagtgaagcccgtagagtgggaatggcagatgccaacagcccccccaaacccctttccaaacctcgcacgcccaggaggagcaagtccgatggagaggctaagcgttcaagagaccctcctgcctcagcctcccaagtaactgggattagagctgaaccttcacctagccccaggattacaaggaaaagcaccaggcaaaccaccatcacatctcattttgcaaagggccctgccaaacggaaacctcaggaagagtctgaaagagccaaatcggatgagtccatcaaggaagaagacaaagaccaggatgagaagagacgtagagttacatccagagaacgtgtgtactgtaagcacggtcacctgtgtcccatcgacaccggcctcatcgagaagaatatcgaactcttcttttctggttcagcaaaaccaatctatgatgatgacccgtctcttgaaggtggtgttaatggcaaaaatcttggccccataaatgaatggtggatcactggctttgatggaggtgaaaaggccctcatcggcttcagcacctcatttgccgaatacattctgatggatcccagtcccgagtatgcgcccatatttgggctgatgcaggagaagatctacatcagcaagattgtggtggagttcctgcagagcaattccgactcgacctatgaggacctgatcaacaagatcgagaccacggttcctccttctggcctcaacttgaaccgcttcacagaggactccctcctgcgacacgcgcagtttgtggtggagcaggtggagagttatgacgaggccggggacagtgatgagcagcccatcttcctgacgccctgcatgcgggacctgatcaagctggctggggtcacgctgggacagaggcgagcccaggcgaggcggcagaccatcaggcattctaccagggagaaggacaggggacccacgaaagccaccaccaccaagctggtctaccagatcttcgatactttcttcgcagagcaaattgaaaaggatgacagagaagacaaggagaacgcctttaagcgccggcgatgtggcgtctgtgaggtgtgtcagcagcctgagtgtgggaaatgtaaagcctgcaaggacatggttaaatttggtggcagtggacggagcaagcaggcttgccaagagcggaggtgtcccaatatggccatgaaggaggcagatgacgatgaggaagtcgatgataacatcccagagatgccgtcacccaaaaaaatgcaccaggggaagaagaagaaacagaacaagaatcgcatctcttgggtcggagaagccgtcaagactgatgggaagaagagttactataagaaggtgtgcattgatgcggaaaccctggaagtgggggactgtgtctctgttattccagatgattcctcaaaaccgctgtatctagcaagggtcacggcgctgtgggaggacagcagcaacgggcagatgtttcacgcccactggttctgcgctgggacagacacagtcctcggggccacgtcggaccctctggagctgttcttggtggatgaatgtgaggacatgcagctttcatatatccacagcaaagtgaaagtcatctacaaagccccctccgaaaactgggccatggagggaggcatggatcccgagtccctgctggagggggacgacgggaagacctacttctaccagctgtggtatgatcaagactacgcgagattcgagtcccctccaaaaacccagccaacagaggacaacaagttcaaattctgtgtgagctgtgcccgtctggctgagatgaggcaaaaagaaatccccagggtcctggagcagctcgaggacctggatagccgggtcctctactactcagccaccaagaacggcatcctgtaccgagttggtgatggtgtgtacctgccccctgaggccttcacgttcaacatcaagctgtccagtcccgtgaaacgcccacggaaggagcccgtggatgaggacctgtacccagagcactaccggaaatactccgactacatcaaaggcagcaacctggatgcccctgagccctaccgaattggccggatcaaagagatcttctgtcccaagaagagcaacggcaggcccaatgagactgacatcaaaatccgggtcaacaagttctacaggcctgagaacacccacaagtccactccagcgagctaccacgcagacatcaacctgctctactggagcgacgaggaggccgtggtggacttcaaggctgtgcagggccgctgcaccgtggagtatggggaggacctgcccgagtgcgtccaggtgtactccatgggcggccccaaccgcttctacttcctcgaggcctataatgcaaagagcaaaagctttgaagatcctcccaaccatgcccgtagccctggaaacaaagggaagggcaagggaaaagggaagggcaagcccaagtcccaagcctgtgagccgagcgagccagagatagagatcaagctgcccaagctgcggaccctggatgtgttttctggctgcggggggttgtcggagggattccaccaagcaggcatctctgacacgctgtgggccatcgagatgtgggaccctgcggcccaggcgttccggctgaacaaccccggctccacagtgttcacagaggactgcaacatcctgctgaagctggtcatggctggggagaccaccaactcccgcggccagcggctgccccagaagggagacgtggagatgctgtgcggcgggccgccctgccagggcttcagcggcatgaaccgcttcaattcgcgcacctactccaagttcaaaaactctctggtggtttccttcctcagctactgcgactactaccggccccggttcttcctcctggagaatgtcaggaactttgtctccttcaagcgctccatggtcctgaagctcaccctccgctgcctggtccgcatgggctatcagtgcaccttcggcgtgctgcaggccggtcagtacggcgtggcccagactaggaggcgggccatcatcctggccgcggcccctggagagaagctccctctgttcccggagccactgcacgtgtttgctccccgggcctgccagctgagcgtggtggtggatgacaagaagtttgtgagcaacataaccaggttgagctcgggtcctttccggaccatcacggtgcgagacacgatgtccgacctgccggaggtgcggaatggagcctcggcactggagatctcctacaacggggagcctcagtcctggttccagaggcagctccggggcgcacagtaccagcccatcctcagggaccacatctgtaaggacatgagtgcattggtggctgcccgcatgcggcacatccccttggccccagggtcagactggcgcgatctgcccaacatcgaggtgcggctctcagacggcaccatggccaggaagctgcggtatacccaccatgacaggaagaacggccgcagcagctctggggccctccgtggggtctgctcctgcgtggaagccggcaaagcctgcgaccccgcagccaggcagttcaacaccctcatcccctggtgcctgccccacaccgggaaccggcacaaccactgggctggcctctatggaaggctcgagtgggacggcttcttcagcacaaccgtcaccaaccccgagcccatgggcaagcagggccgcgtgctccacccagagcagcaccgtgtggtgagcgtgcgggagtgtgcccgctcccagggcttccctgacacctaccggctcttcggcaacatcctggacaagcaccggcaggtgggcaatgccgtgccaccgcccctggccaaagccattggcttggagatcaagctttgtatgttggccaaagcccgagagagtgcctcagctaaaataaaggaggaggaagctgctaaggactagttctgccctcccgtcacccctgtttctggcaccaggaatccccaacatgcactgatgttgtgtttttaacatgtcaatctgtccgttcacatgtgtggtacatggtgtttgtggccttggctgacatgaagctgttgtgtgaggttcgcttatcaactaatgatttagtgatcaaattgtgcagtactttgtgcattctggattttaaaagttttttattatgcattatatcaaatctaccactgtatgagtggaaattaagactttatgtagtttttatatgttgtaatatttcttcaaataaatctctcctataaacca

SEQ ID NO: 376975 - DNA, 5453 bp, Homo sapiens
  misc_feature (5431)..(5431): n is a, c, g, or t
  misc_feature (5433)..(5433): n is a, c, g, or t
  misc_feature (5435)..(5435): n is a, c, g, or t
  misc_feature (5438)..(5438): n is a, c, g, or t
  misc_feature (5443)..(5443): n is a, c, g, or t
  misc_feature (5446)..(5446): n is a, c, g, or t
cgtccgcgtggggggggtgtgtgcccgccttgcgcatgcgtgttccctgggcatggccggctccgttccatccttctgcacagggtatcgcctctctccgtttggtacatcccctcctcccccacgcccggactggggtggtagacgcgcctccgctcatcgcccctccccatcggtttccgcgcgaaaagccggggcgcctgcgctgccgccgccgcgtctgctgaagcctccgagatgccggcgcgtaccgccccagcccgggtgcccacactggccgtcccggccatctcgctgcccgacgatgtccgcaggcggctcaaagatttggaaagagacagcttaacagaaaaggaatgtgtgaaggagaaattgaatctcttgcacgaatttctgcaaacagaaataaagaatcagttatgtgacttggaaaccaaattacgtaaagaagaattatccgaggagggctacctggctaaagtcaaatcccttttaaataaagatttgtccttggagaacggtgctcatgcttacaaccgggaagtgaatggacgtctagaaaacgggaaccaagcaagaagtgaagcccgtagagtgggaatggcagatgccaacagcccccccaaacccctttccaaacctcgcacgcccaggaggagcaagtccgatggagaggctaagcctgaaccttcacctagccccaggattacaaggaaaagcaccaggcaaaccaccatcacatctcattttgcaaagggccctgccaaacggaaacctcaggaagagtctgaaagagccaaatcggatgagtccatcaaggaagaagacaaagaccaggatgagaagagacgtagagttacatccagagaacgagttgctagaccgcttcctgcagaagaacctgaaagagcaaaatcaggaacgcgcactgaaaaggaagaagaaagagatgaaaaagaagaaaagagactccgaagtcaaaccaaagaaccaacacccaaacagaaactgaaggaggagccggacagagaagccagggcaggcgtgcaggctgacgaggacgaagatggagacgagaaagatgagaagaagcacagaagtcaacccaaagatctagctgccaaacggaggcccgaagaaaaagaacctgaaaaagtaaatccacagatttctgatgaaaaagacgaggatgaaaaggaggagaagagacgcaaaacgacccccaaagaaccaacggagaaaaaaatggctcgcgccaaaacagtcatgaactccaagacccaccctcccaagtgcattcagtgcgggcagtacctggacgaccctgacctcaaatatgggcagcacccaccagacgcggtggatgagccacagatgctgacaaatgagaagctgtccatctttgatgccaacgagtctggctttgagagttatgaggcgcttccccagcacaaactgacctgcttcagtgtgtactgtaagcacggtcacctgtgtcccatcgacaccggcctcatcgagaagaatatcgaactcttcttttctggttcagcaaaaccaatctatgatgatgacccgtctcttgaaggtggtgttaatggcaaaaatcttggccccataaatgaatggtggatcactggctttgatggaggtgaaaaggccctcatcggcttcagcacctcatttgccgaatacattctgatggatcccagtcccgagtatgcgcccatatttgggctgatgcaggagaagatctacatcagcaagattgtggtggagttcctgcagagcaattccgactcgacctatgaggacctgatcaacaagatcgagaccacggttcctccttctggcctcaacttgaaccgcttcacagaggactccctcctgcgacacgcgcagtttgtggtggagcaggtggagagttatgacgaggccggggacagtgatgagcagcccatcttcctgacgccctgcatgcgggacctgatcaagctggctggggtcacgctgggacagaggcgagcccaggcgaggcggcagaccatcaggcattctaccagggagaaggacaggggacccacgaaagccaccaccaccaagctggtctaccagatcttcgatactttcttcgcagagcaaattgaaaaggatgacagagaagacaaggagaacgcctttaagcgccggcgatgtggcgtctgtgaggtgtgtcagcagcctgagtgtgggaaatgtaaagcctgcaaggacatggttaaatttggtggcagtggacggagcaagcaggcttgccaagagcggaggtgtcccaatatggccatgaaggaggcagatgacgatgaggaagtcgatgataacatcccagagatgccgtcacccaaaaaaatgcaccaggggaagaagaagaaacagaacaagaatcgcatctcttgggtcggagaagccgtcaagactgatgggaagaagagttactataagaaggtgtgcattgatgcggaaaccctggaagtgggggactgtgtctctgttattccagatgattcctcaaaaccgctgtatctagcaagggtcacggcgctgtgggaggacagcagcaacgggcagatgtttcacgcccactggttctgcgctgggacagacacagtcctcggggccacgtcggaccctctggagctgttcttggtggatgaatgtgaggacatgcagctttcatatatccacagcaaagtgaaagtcatctacaaagccccctccgaaaactgggccatggagggaggcatggatcccgagtccctgctggagggggacgacgggaagacctacttctaccagctgtggtatgatcaagactacgcgagattcgagtcccctccaaaaacccagccaacagaggacaacaagttcaaattctgtgtgagctgtgcccgtctggctgagatgaggcaaaaagaaatccccagggtcctggagcagctcgaggacctggatagccgggtcctctactactcagccaccaagaacggcatcctgtaccgagttggtgatggtgtgtacctgccccctgaggccttcacgttcaacatcaagctgtccagtcccgtgaaacgcccacggaaggagcccgtggatgaggacctgtacccagagcactaccggaaatactccgactacatcaaaggcagcaacctggatgcccctgagccctaccgaattggccggatcaaagagatcttctgtcccaagaagagcaacggcaggcccaatgagactgacatcaaaatccgggtcaacaagttctacaggcctgagaacacccacaagtccactccagcgagctaccacgcagacatcaacctgctctactggagcgacgaggaggccgtggtggacttcaaggctgtgcagggccgctgcaccgtggagtatggggaggacctgcccgagtgcgtccaggtgtactccatgggcggccccaaccgcttctacttcctcgaggcctataatgcaaagagcaaaagctttgaagatcctcccaaccatgcccgtagccctggaaacaaagggaagggcaagggaaaagggaagggcaagcccaagtcccaagcctgtgagccgagcgagccagagatagagatcaagctgcccaagctgcggaccctggatgtgttttctggctgcggggggttgtcggagggattccaccaagcaggcatctctgacacgctgtgggccatcgagatgtgggaccctgcggcccaggcgttccggctgaacaaccccggctccacagtgttcacagaggactgcaacatcctgctgaagctggtcatggctggggagaccaccaactcccgcggccagcggctgccccagaagggagacgtggagatgctgtgcggcgggccgccctgccagggcttcagcggcatgaaccgcttcaattcgcgcacctactccaagttcaaaaactctctggtggtttccttcctcagctactgcgactactaccggccccggttcttcctcctggagaatgtcaggaactttgtctccttcaagcgctccatggtcctgaagctcaccctccgctgcctggtccgcatgggctatcagtgcaccttcggcgtgctgcaggccggtcagtacggcgtggcccagactaggaggcgggccatcatcctggccgcggcccctggagagaagctccctctgttcccggagccactgcacgtgtttgctccccgggcctgccagctgagcgtggtggtggatgacaagaagtttgtgagcaacataaccaggttgagctcgggtcctttccggaccatcacggtgcgagacacgatgtccgacctgccggaggtgcggaatggagcctcggcactggagatctcctacaacggggagcctcagtcctggttccagaggcagctccggggcgcacagtaccagcccatcctcagggaccacatctgtaaggacatgagtgcattggtggctgcccgcatgcggcacatccccttggccccagggtcagactggcgcgatctgcccaacatcgaggtgcggctctcagacggcaccatggccaggaagctgcggtatacccaccatgacaggaagaacggccgcagcagctctggggccctccgtggggtctgctcctgcgtggaagccggcaaagcctgcgaccccgcagccaggcagttcaacaccctcatcccctggtgcctgccccacaccgggaaccggcacaaccactgggctggcctctatggaaggctcgagtgggacggcttcttcagcacaaccgtcaccaaccccgagcccatgggcaagcagggccgcgtgctccacccagagcagcaccgtgtggtgagcgtgcgggagtgtgcccgctcccagggcttccctgacacctaccggctcttcggcaacatcctggacaagcaccggcaggtgggcaatgccgtgccaccgcccctggccaaagccattggcttggagatcaagctttgtatgttggccaaagcccgagagagtgcctcagctaaaataaaggaggaggaagctgctaaggactagttctgccctcccgtcacccctgtttctggcaccaggaatccccaacatgcactgatgttgtgtttttaacatgtcaatctgtccgttcacatgtgtggtacatggtgtttgtggccttggctgacatgaagctgttgtgtgaggttcgcttatcaactaatgatttagtgatcaaattgtgcagtactttgtgcattctggattttaaaagttttttattatgcattatatcaaatctaccactgtatgagtggaaattaagactttatgtagtttttatatgttgtaatatttcttcaaataaatctctcctataaaccaaaaaaaaaaacaaacaaaaaanananaanaaaanaancaagaaa

SEQ ID NO: 376976 - DNA, 5511 bp, Homo sapiens
  misc_feature (5489)..(5489): n is a, c, g, or t
  misc_feature (5491)..(5491): n is a, c, g, or t
  misc_feature (5493)..(5493): n is a, c, g, or t
  misc_feature (5496)..(5496): n is a, c, g, or t
  misc_feature (5501)..(5501): n is a, c, g, or t
  misc_feature (5504)..(5504): n is a, c, g, or t
cgtccgcgtggggggggtgtgtgcccgccttgcgcatgcgtgttccctgggcatggccggctccgttccatccttctgcacagggtatcgcctctctccgtttggtacatcccctcctcccccacgcccggactggggtggtagacgcgcctccgctcatcgcccctccccatcggtttccgcgcgaaaagccggggcgcctgcgctgccgccgccgcgtctgctgaagcctccgagatgccggcgcgtaccgccccagcccgggtgcccacactggccgtcccggccatctcgctgcccgacgatgtccgcaggcggctcaaagatttggaaagagacagcttaacagaaaaggaatgtgtgaaggagaaattgaatctcttgcacgaatttctgcaaacagaaataaagaatcagttatgtgacttggaaaccaaattacgtaaagaagaattatccgaggagggctacctggctaaagtcaaatcccttttaaataaagatttgtccttggagaacggtgctcatgcttacaaccgggaagtgaatggacgtctagaaaacgggaaccaagcaagaagtgaagcccgtagagtgggaatggcagatgccaacagcccccccaaacccctttccaaacctcgcacgcccaggaggagcaagtccgatggagaggctaagcctgaaccttcacctagccccaggattacaaggaaaagcaccaggcaaaccaccatcacatctcattttgcaaagggccctgccaaacggaaacctcaggaagagtctgaaagagccaaatcggatgagtccatcaaggaagaagacaaagaccaggatgagaagagacgtagagttacatccagagaacgagttgctagaccgcttcctgcagaagaacctgaaagagcaaaatcaggaacgcgcactgaaaaggaagaagaaagagatgaaaaagaagaaaagagactccgaagtcaaaccaaagaaccaacacccaaacagaaactgaaggaggagccggacagagaagccagggcaggcgtgcaggctgacgaggacgaagatggagacgagaaagatgagaagaagcacagaagtcaacccaaagatctagctgccaaacggaggcccgaagaaaaagaacctgaaaaagtaaatccacagatttctgatgaaaaagacgaggatgaaaaggaggagaagagacgcaaaacgacccccaaagaaccaacggagaaaaaaatggctcgcgccaaaacagtcatgaactccaagacccaccctcccaagtgcattcagtgcgggcagtacctggacgaccctgacctcaaatatgggcagcacccaccagacgcggtggatgagccacagatgctgacaaatgagaagctgtccatctttgatgccaacgagtctggctttgagagttatgaggcgcttccccagcacaaactgacctgcttcagtgtgtactgtaagcacggtcacctgtgtcccatcgacaccggcctcatcgagaagaatatcgaactcttcttttctggttcagcaaaaccaatctatgatgatgacccgtctcttgaaggtggtgttaatggcaaaaatcttggccccataaatgaatggtggatcactggctttgatggaggtgaaaaggccctcatcggcttcagcacctcatttgccgaatacattctgatggatcccagtcccgagtatgcgcccatatttgggctgatgcaggagaagatctacatcagcaagattgtggtggagttcctgcagagcaattccgactcgacctatgaggacctgatcaacaagatcgagaccacggttcctccttctggcctcaacttgaaccgcttcacagaggactccctcctgcgacacgcgcagtttgtggtggagcaggtggagagttatgacgaggccggggacagtgatgagcagcccatcttcctgacgccctgcatgcgggacctgatcaagctggctggggtcacgctgggacagaggcgagcccaggcgaggcggcagaccatcaggcattctaccagggagaaggacaggggacccacgaaagccaccaccaccaagctggtctaccagatcttcgatactttcttcgcagagcaaattgaaaaggatgacagagaagacaaggagaacgcctttaagcgccggcgatgtggcgtctgtgaggtgtgtcagcagcctgagtgtgggaaatgtaaagcctgcaaggacatggttaaatttggtggcagtggacggagcaagcaggcttgccaagagcggaggtgtcccaatatggccatgaaggaggcagatgacgatgaggaagtcgatgataacatcccagagatgccgtcacccaaaaaaatgcaccaggggaagaagaagaaacagaacaagaatcgcatctcttgggtcggagaagccgtcaagactgatgggaagaagagttactataagaaggtgtgcattgatgcggaaaccctggaagtgggggactgtgtctctgttattccagatgattcctcaaaaccgctgtatctagcaagggtcacggcgctgtgggaggacagcagcaacgggcagatgtttcacgcccactggttctgcgctgggacagacacagtcctcggggccacgtcggaccctctggagctgttcttggtggatgaatgtgaggacatgcagctttcatatatccacagcaaagtgaaagtcatctacaaagccccctccgaaaactgggccatggagggaggcatggatcccgagtccctgctggagggggacgacgggaagacctacttctaccagctgtggtatgatcaagactacgcgagattcgagtcccctccaaaaacccagccaacagaggacaacaagttcaaattctgtgtgagctgtgcccgtctggctgagatgaggcaaaaagaaatccccagggtcctggagcagctcgaggacctggatagccgggtcctctactactcagccaccaagaacggcatcctgtaccgagttggtgatggtgtgtacctgccccctgaggccttcacgttcaacatcaagctgtccagtcccgtgaaacgcccacggaaggagcccgtggatgaggacctgtacccagagcactaccggaaatactccgactacatcaaaggcagcaacctggatgcccctgagccctaccgaattggccggatcaaagagatcttctgtcccaagaagagcaacggcaggcccaatgagactgacatcaaaatccgggtcaacaagttctacaggcctgagaacacccacaagtccactccagcgagctaccacgcagacatcaacctgctctactggagcgacgaggaggccgtggtggacttcaaggctgtgcagggccgctgcaccgtggagtatggggaggacctgcccgagtgcgtccaggtgtactccatgggcggccccaaccgcttctacttcctcgaggcctataatgcaaagagcaaaagctttgaagatcctcccaaccatgcccgtagccctggaaacaaagggaagggcaagggaaaagggaagggcaagcccaagtcccaagcctgtgagccgagcgagccagagatagagatcaagctgcccaagctgcggaccctggatgtgttttctggctgcggggggttgtcggagggattccaccaagcaggcatctctgacacgctgtgggccatcgagatgtgggaccctgcggcccaggcgttccggctgaacaaccccggctccacagtgttcacagaggactgcaacatcctgctgaagctggtcatggctggggagaccaccaactcccgcggccagcggctgccccagaagggagacgtggagatgctgtgcggcgggccgccctgccagggcttcagcggcatgaaccgcttcaattcgcgcacctactccaagttcaaaaactctctggtggtttccttcctcagctactgcgactactaccggccccggttcttcctcctggagaatgtcaggaactttgtctccttcaagcgctccatggtcctgaagctcaccctccgctgcctggtccgcatgggctatcagtgcaccttcggcgtgctgcaggccggtcagtacggcgtggcccagactaggaggcgggccatcatcctggccgcggcccctggagagaagctccctctgttcccggagccactgcacgtgtttgctccccgggcctgccagctgagcgtggtggtggatgacaagaagtttgtgagcaacataaccaggttgagctcgggtcctttccggaccatcacggtgcgagacacgatgtccgacctgccggaggtgcggaatggagcctcggcactggagatctcctacaacggggagcctcagtcctggttccagaggcagctccggggcgcacagtaccagcccatcctcagggaccacatctgtaaggacatgagtgcattggtggctgcccgcatgcggcacatccccttggccccagggtcagactggcgcgatctgcccaacatcgaggtgcggctctcagacggcaccatggccaggaagctgcggtatacccaccatgacaggaagaacggccgcagcagctctggggccctccgtggggtctgctcctgcgtggaagccggcaaagcctgcgaccccgcagccaggcagttcaacaccctcatcccctggtgcctgccccacaccgggaaccggcacaaccactgggctggcctctatggaaggctcgagtgggacggcttcttcagcacaaccgtcaccaaccccgagcccatgggcaagcagggccgcgtgctccacccagagcagcaccgtgtggtgagcgtgcgggagtgtgcccgctcccagggcttccctgacacctaccggctcttcggcaacatcctggacaagcaccggcaggtgggcaatgccgtgccaccgcccctggccaaagccattggcttggagatcaagctttgtatgttggccaaagcccgagagagtgcctcagctaaaataaaggaggaggaagctgctaaggactagttctgccctcccgtcacccctgtttctggcaccaggaatccccaacatgcactgatgttgtgtttttaacatgtcaatctgtccgttcacatgtgtggtacatggtgtttgtggccttggctgacatgaagctgttgtgtgaggttcgcttatcaactaatgatttagtgatcaaattgtgcagtactttgtgcattctggattttaaaagttttttattatgcattatatcaaatctaccactgtatgagtggaaattaagactttatgtagtttttatatgttgtaatatttcttcaaataaatctctcctataaaccaaaaaaaaaaaaaaaaaaaaaaaaaaaaaaaaaaaaaaaaaaaaaaaaaaaaaaaaaaaaaaaaaaaaacaaacaaaaaanananaanaaaanaancaagaaa

SEQ ID NO: 376977 - DNA, 5359 bp, Homo sapiens
cgtccgcgtggggggggtgtgtgcccgccttgcgcatgcgtgttccctgggcatggccggctccgttccatccttctgcacagggtatcgcctctctccgtttggtacatcccctcctcccccacgcccggactggggtggtagacgcgcctccgctcatcgcccctccccatcggtttccgcgcgaaaagccggggcgcctgcgctgccgccgccgcgtctgctgaagcctccgagatgccggcgcgtaccgccccagcccgggtgcccacactggccgtcccggccatctcgctgcccgacgatgtccgcaggcggctcaaagatttggaaagagacagcttaacagaaaaggaatgtgtgaaggagaaattgaatctcttgcacgaatttctgcaaacagaaataaagaatcagttatgtgacttggaaaccaaattacgtaaagaagaattatccgaggagggctacctggctaaagtcaaatcccttttaaataaagatttgtccttggagaacggtgctcatgcttacaaccgggaagtgaatggacgtctagaaaacgggaaccaagcaagaagtgaagcccgtagagtgggaatggcagatgccaacagcccccccaaacccctttccaaacctcgcacgcccaggaggagcaagtccgatggagaggctaagcctgaaccttcacctagccccaggattacaaggaaaagcaccaggcaaaccaccatcacatctcattttgcaaagggccctgccaaacggaaacctcaggaagagtctgaaagagccaaatcggatgagtccatcaaggaagaagacaaagaccaggatgagaagagacgtagagttacatccagagaacgagttgctagaccgcttcctgcagaagaacctgaaagagcaaaatcaggaacgcgcactgaaaaggaagaagaaagagatgaaaaagaagaaaagagactccgaagtcaaaccaaagaaccaacacccaaacagaaactgaaggaggagccggacagagaagccagggcaggcgtgcaggctgacgaggacgaagatggagacgagaaagatgagaagaagcacagaagtcaacccaaagatctagctgccaaacggaggcccgaagaaaaagaacctgaaaaagtaaatccacagatttctgatgaaaaagacgaggatgaaaaggaggagaagagacgcaaaacgacccccaaagaaccaacggagaaaaaaatggctcgcgccaaaacagtcatgaactccaagacccaccctcccaagtgcattcagtgcgggcagtacctggacgaccctgacctcaaatatgggcagcacccaccagacgcggtggatgagccacagatgctgacaaatgagaagctgtccatctttgatgccaacgagtctggctttgagagttatgaggcgcttccccagcacaaactgacctgcttcagtgtgtactgtaagcacggtcacctgtgtcccatcgacaccggcctcatcgagaagaatatcgaactcttcttttctggttcagcaaaaccaatctatgatgatgacccgtctcttgaaggtggtgttaatggcaaaaatcttggccccataaatgaatggtggatcactggctttgatggaggtgaaaaggccctcatcggcttcagcacctcatttgccgaatacattctgatggatcccagtcccgagtatgcgcccatatttgggctgatgcaggagaagatctacatcagcaagattgtggtggagttcctgcagagcaattccgactcgacctatgaggacctgatcaacaagatcgagaccacggttcctccttctggcctcaacttgaaccgcttcacagaggactccctcctgcgacacgcgcagtttgtggtggagcaggtggagagttatgacgaggccggggacagtgatgagcagcccatcttcctgacgccctgcatgcgggacctgatcaagctggctggggtcacgctgggacagaggcgagcccaggcgaggcggcagaccatcaggcattctaccagggagaaggacaggggacccacgaaagccaccaccaccaagctggtctaccagatcttcgatactttcttcgcagagcaaattgaaaaggatgacagagaagacaaggagaacgcctttaagcgccggcgatgtggcgtctgtgaggtgtgtcagcagcctgagtgtgggaaatgtaaagcctgcaaggacatggttaaatttggtggcagtggacggagcaagcaggcttgccaagagcggaggtgtcccaatatggccatgaaggaggcagatgacgatgaggaagtcgatgataacatcccagagatgccgtcacccaaaaaaatgcaccaggggaagaagaagaaacagaacaagaatcgcatctcttgggtcggagaagccgtcaagactgatgggaagaagagttactataagaaggtgtgcattgatgcggaaaccctggaagtgggggactgtgtctctgttattccagatgattcctcaaaaccgctgtatctagcaagggtcacggcgctgtgggaggacagcagcaacgggcagatgtttcacgcccactggttctgcgctgggacagacacagtcctcggggccacgtcggaccctctggagctgttcttggtggatgaatgtgaggacatgcagctttcatatatccacagcaaagtgaaagtcatctacaaagccccctccgaaaactgggccatggagggaggcatggatcccgagtccctgctggagggggacgacgggaagacctacttctaccagctgtggtatgatcaagactacgcgagattcgagtcccctccaaaaacccagccaacagaggacaacaagttcaaattctgtgtgagctgtgcccgtctggctgagatgaggcaaaaagaaatccccagggtcctggagcagctcgaggacctggatagccgggtcctctactactcagccaccaagaacggcatcctgtaccgagttggtgatggtgtgtacctgccccctgaggccttcacgttcaacatcaagctgtccagtcccgtgaaacgcccacggaaggagcccgtggatgaggacctgtacccagagcactaccggaaatactccgactacatcaaaggcagcaacctggatgcccctgagccctaccgaattggccggatcaaagagatcttctgtcccaagaagagcaacggcaggcccaatgagactgacatcaaaatccgggtcaacaagttctacaggcctgagaacacccacaagtccactccagcgagctaccacgcagacatcaacctgctctactggagcgacgaggaggccgtggtggacttcaaggctgtgcagggccgctgcaccgtggagtatggggaggacctgcccgagtgcgtccaggtgtactccatgggcggccccaaccgcttctacttcctcgaggcctataatgcaaagagcaaaagctttgaagatcctcccaaccatgcccgtagccctggaaacaaagggaagggcaagggaaaagggaagggcaagcccaagtcccaagcctgtgagccgagcgagccagagatagagatcaagctgcccaagctgcggaccctggatgtgttttctggctgcggggggttgtcggagggattccaccaagcaggcatctctgacacgctgtgggccatcgagatgtgggaccctgcggcccaggcgttccggctgaacaaccccggctccacagtgttcacagaggactgcaacatcctgctgaagctggtcatggctggggagaccaccaactcccgcggccagcggctgccccagaagggagacgtggagatgctgtgcggcgggccgccctgccagggcttcagcggcatgaaccgcttcaattcgcgcacctactccaagttcaaaaactctctggtggtttccttcctcagctactgcgactactaccggccccggttcttcctcctggagaatgtcaggaactttgtctccttcaagcgctccatggtcctgaagctcaccctccgctgcctggtccgcatgggctatcagtgcaccttcggcgtgctgcaggccggtcagtacggcgtggcccagactaggaggcgggccatcatcctggccgcggcccctggagagaagctccctctgttcccggagccactgcacgtgtttgctccccgggcctgccagctgagcgtggtggtggatgacaagaagtttgtgagcaacataaccaggttgagctcgggtcctttccggaccatcacggtgcgagacacgatgtccgacctgccggaggtgcggaatggagcctcggcactggagatctcctacaacggggagcctcagtcctggttccagaggcagctccggggcgcacagtaccagcccatcctcagggaccacatctgtaaggacatgagtgcattggtggctgcccgcatgcggcacatccccttggccccagggtcagactggcgcgatctgcccaacatcgaggtgcggctctcagacggcaccatggccaggaagctgcggtatacccaccatgacaggaagaacggccgcagcagctctggggccctccgtggggtctgctcctgcgtggaagccggcaaagcctgcgaccccgcagccaggcagttcaacaccctcatcccctggtgcctgccccacaccgggaaccggcacaaccactgggctggcctctatggaaggctcgagtgggacggcttcttcagcacaaccgtcaccaaccccgagcccatgggcaagcagggccgcgtgctccacccagagcagcaccgtgtggtgagcgtgcgggagtgtgcccgctcccagggcttccctgacacctaccggctcttcggcaacatcctggacaagcaccggcaggtgggcaatgccgtgccaccgcccctggccaaagccattggctaaaataaaggaggaggaagctgctaaggactagttctgccctcccgtcacccctgtttctggcaccaggaatccccaacatgcactgatgttgtgtttttaacatgtcaatctgtccgttcacatgtgtggtacatggtgtttgtggccttggctgacatgaagctgttgtgtgaggttcgcttatcaactaatgatttagtgatcaaattgtgcagtactttgtgcattctggattttaaaagttttttattatgcattatatcaaatctaccactgtatgagtggaaattaagactttatgtagtttttatatgttgtaatatttcttcaaataaatctctcctataaacca

SEQ ID NO: 376978 - DNA, 5318 bp, Homo sapiens
cgtccgcgtggggggggtgtgtgcccgccttgcgcatgcgtgttccctgggcatggccggctccgttccatccttctgcacagggtatcgcctctctccgtttggtacatcccctcctcccccacgcccggactggggtggtagacgcgcctccgctcatcgcccctccccatcggtttccgcgcgaaaagccggggcgcctgcgctgccgccgccgcgtctgctgaagcctccgagatgccggcgcgtaccgccccagcccgggtgcccacactggccgtcccggccatctcgctgcccgacgatgtccgcaggcggctcaaagatttggaaagagacagcttaacagaaaaggaatgtgtgaaggagaaattgaatctcttgcacgaatttctgcaaacagaaataaagaatcagttatgtgacttggaaaccaaattacgtaaagaagaattatccgaggagggctacctggctaaagtcaaatcccttttaaataaagatttgtccttggagaacggtgctcatgcttacaaccgggaagtgaatggacgtctagaaaacgggaaccaagcaagaagtgaagcccgtagagtgggaatggcagatgccaacagcccccccaaacccctttccaaacctcgcacgcccaggaggagcaagtccgatggagaggctaagcctgaaccttcacctagccccaggattacaaggaaaagcaccaggcaaaccaccatcacatctcattttgcaaagggccctgccaaacggaaacctcaggaagagtctgaaagagccaaatcggatgagtccatcaaggaagaagacaaagaccaggatgagaagagacgtagagttacatccagagaacgagttgctagaccgcttcctgcagaagaacctgaaagagcaaaatcaggaacgcgcactgaaaaggaagaagaaagagatgaaaaagaagaaaagagactccgaagtcaaaccaaagaaccaacacccaaacagaaactgaaggaggagccggacagagaagccagggcaggcgtgcaggctgacgaggacgaagatggagacgagaaagatgagaagaagcacagaagtcaacccaaagatctagctgccaaacggaggcccgaagaaaaagaacctgaaaaagtaaatccacagatttctgatgaaaaagacgaggatgaaaaggaggagaagagacgcaaaacgacccccaaagaaccaacggagaaaaaaatggctcgcgccaaaacagtcatgaactccaagacccaccctcccaagtgcattcagtgcgggcagtacctggacgaccctgacctcaaatatgggcagcacccaccagacgcggtggatgagccacagatgctgacaaatgagaagctgtccatctttgatgccaacgagtctggctttgagagttatgaggcgcttccccagcacaaactgacctgcttcagtgtgtactgtaagcacggtcacctgtgtcccatcgacaccggcctcatcgagaagaatatcgaactcttcttttctggttcagcaaaaccaatctatgatgatgacccgtctcttgaaggtggtgttaatggcaaaaatcttggccccataaatgaatggtggatcactggctttgatggaggtgaaaaggccctcatcggcttcagcacctcatttgccgaatacattctgatggatcccagtcccgagtatgcgcccatatttgggctgatgcaggagaagatctacatcagcaagattgtggtggagttcctgcagagcaattccgactcgacctatgaggacctgatcaacaagatcgagaccacggttcctccttctggcctcaacttgaaccgcttcacagaggactccctcctgcgacacgcgcagtttgtggtggagcaggtggagagttatgacgaggccggggacagtgatgagcagcccatcttcctgacgccctgcatgcgggacctgatcaagctggctggggtcacgctgggacagaggcgagcccaggcgaggcggcagaccatcaggcattctaccagggagaaggacaggggacccacgaaagccaccaccaccaagctggtctaccagatcttcgatactttcttcgcagagcaaattgaaaaggatgacagagaagacaaggagaacgcctttaagcgccggcgatgtggcgtctgtgaggtgtgtcagcagcctgagtgtgggaaatgtaaagcctgcaaggacatggttaaatttggtggcagtggacggagcaagcaggcttgccaagagcggaggtgtcccaatatggccatgaaggaggcagatgacgatgaggaagtcgatgataacatcccagagatgccgtcacccaaaaaaatgcaccaggggaagaagaagaaacagaacaagaatcgcatctcttgggtcggagaagccgtcaagactgatgggaagaagagttactataagaaggtgtgcattgatgcggaaaccctggaagtgggggactgtgtctctgttattccagatgattcctcaaaaccgctgtatctagcaagggtcacggcgctgtgggaggacagcagcaacgggcagatgtttcacgcccactggttctgcgctgggacagacacagtcctcggggccacgtcggaccctctggagctgttcttggtggatgaatgtgaggacatgcagctttcatatatccacagcaaagtgaaagtcatctacaaagccccctccgaaaactgggccatggagggaggcatggatcccgagtccctgctggagggggacgacgggaagacctacttctaccagctgtggtatgatcaagactacgcgagattcgagtcccctccaaaaacccagccaacagaggacaacaagttcaaattctgtgtgagctgtgcccgtctggctgagatgaggcaaaaagaaatccccagggtcctggagcagctcgaggacctggatagccgggtcctctactactcagccaccaagaacggcatcctgtaccgagttggtgatggtgtgtacctgccccctgaggccttcacgttcaacatcaagctgtccagtcccgtgaaacgcccacggaaggagcccgtggatgaggacctgtacccagagcactaccggaaatactccgactacatcaaaggcagcaacctggatgcccctgagccctaccgaattggccggatcaaagagatcttctgtcccaagaagagcaacggcaggcccaatgagactgacatcaaaatccgggtcaacaagttctacaggcctgagaacacccacaagtccactccagcgagctaccacgcagacatcaacctgctctactggagcgacgaggaggccgtggtggacttcaaggctgtgcagggccgctgcaccgtggagtatggggaggacctgcccgagtgcgtccaggtgtactccatgggcggccccaaccgcttctacttcctcgaggcctataatgcaaagagcaaaagctttgaagatcctcccaaccatgcccgtagccctggaaacaaagggaagggcaagggaaaagggaagggcaagcccaagtcccaagcctgtgagccgagcgagccagagatagagatcaagctgcccaagctgcggaccctggatgtgttttctggctgcggggggttgtcggagggattccaccaagcaggcatctctgacacgctgtgggccatcgagatgtgggaccctgcggcccaggcgttccggctgaacaaccccggctccacagtgttcacagaggactgcaacatcctgctgaagctggtcatggctggggagaccaccaactcccgcggccagcggctgccccagaagggagacgtggagatgctgtgcggcgggccgccctgccagggcttcagcggcatgaaccgcttcaattcgcgcacctactccaagttcaaaaactctctggtggtttccttcctcagctactgcgactactaccggccccggttcttcctcctggagaatgtcaggaactttgtctccttcaagcgctccatggtcctgaagctcaccctccgctgcctggtccgcatgggctatcagtgcaccttcggcgtgctgcaggccggtcagtacggcgtggcccagactaggaggcgggccatcatcctggccgcggcccctggagagaagctccctctgttcccggagccactgcacgtgtttgctccccgggcctgccagctgagcgtggtggtggatgacaagaagtttgtgagcaacataaccaggttgagctcgggtcctttccggaccatcacggtgcgagacacgatgtccgacctgccggaggtgcggaatggagcctcggcactggagatctcctacaacggggagcctcagtcctggttccagaggcagctccggggcgcacagtaccagcccatcctcagggaccacatctgtaaggacatgagtgcattggtggctgcccgcatgcggcacatccccttggccccagggtcagactggcgcgatctgcccaacatcgaggtgcggctctcagacggcaccatggccaggaagctgcggtatacccaccatgacaggaagaacggccgcagcagctctggggccctccgtggggtctgctcctgcgtggaagccggcaaagcctgcgaccccgcagccaggcagttcaacaccctcatcccctggtgcctgccccacaccgggaaccggcacaaccactgggctggcctctatggaaggctcgagtgggacggcttcttcagcacaaccgtcaccaaccccgagcccatgggcaagcagggccgcgtgctccacccagagcagcaccgtgtggtgagcgtgcgggagtgtgcccgctcccagggcttccctgacacctaccggctcttcggcaacatcctggacaagcaccggcagctaaaataaaggaggaggaagctgctaaggactagttctgccctcccgtcacccctgtttctggcaccaggaatccccaacatgcactgatgttgtgtttttaacatgtcaatctgtccgttcacatgtgtggtacatggtgtttgtggccttggctgacatgaagctgttgtgtgaggttcgcttatcaactaatgatttagtgatcaaattgtgcagtactttgtgcattctggattttaaaagttttttattatgcattatatcaaatctaccactgtatgagtggaaattaagactttatgtagtttttatatgttgtaatatttcttcaaataaatctctcctataaacca

SEQ ID NO: 376979 - DNA, 2167 bp, Homo sapiens
  misc_feature (22)..(22): n is a, c, g, or t
  misc_feature (77)..(77): n is a, c, g, or t
  misc_feature (101)..(101): n is a, c, g, or t
aagaagagaaaaggcaaggaanaatgagaatgaaataaaaataagggtaaaaaagttataaaggaatgagaaaaaanaaaagtaaaataaagagagataanaagaagaaataaaaatgatataatggagcgacgaggaggccgtggtggacttcaaggctgtgcagggccgctgcaccgtggagtatggggaggacctgcccgagtgcgtccaggtgtactccatgggcggccccaaccgcttctacttcctcgaggcctataatgcaaagagcaaaagctttgaagatcctcccaaccatgcccgtagccctggaaacaaagggaagggcaagggaaaagggaagggcaagcccaagtcccaagcctgtgagccgagcgagccagagatagagatcaagctgcccaagctgcggaccctggatgtgttttctggctgcggggggttgtcggagggattccaccaagcaggcatctctgacacgctgtgggccatcgagatgtgggaccctgcggcccaggcgttccggctgaacaaccccggctccacagtgttcacagaggactgcaacatcctgctgaagctggtcatggctggggagaccaccaactcccgcggccagcggctgccccagaagggagacgtggagatgctgtgcggcgggccgccctgccagggcttcagcggcatgaaccgcttcaattcgcgcacctactccaagttcaaaaactctctggtggtttccttcctcagctactgcgactactaccggccccggttcttcctcctggagaatgtcaggaactttgtctccttcaagcgctccatggtcctgaagctcaccctccgctgcctggtccgcatgggctatcagtgcaccttcggcgtgctgcaggccggtcagtacggcgtggcccagactaggaggcgggccatcatcctggccgcggcccctggagagaagctccctctgttcccggagccactgcacgtgtttgctccccgggcctgccagctgagcgtggtggtggatgacaagaagtttgtgagcaacataaccaggttgagctcgggtcctttccggaccatcacggtgcgagacacgatgtccgacctgccggaggtgcggaatggagcctcggcactggagatctcctacaacggggagcctcagtcctggttccagaggcagctccggggcgcacagtaccagcccatcctcagggaccacatctgtaaggacatgagtgcattggtggctgcccgcatgcggcacatccccttggccccagggtcagactggcgcgatctgcccaacatcgaggtgcggctctcagacggcaccatggccaggaagctgcggtatacccaccatgacaggaagaacggccgcagcagctctggggccctccgtggggtctgctcctgcgtggaagccggcaaagcctgcgaccccgcagccaggcagttcaacaccctcatcccctggtgcctgccccacaccgggaaccggcacaaccactgggctggcctctatggaaggctcgagtgggacggcttcttcagcacaaccgtcaccaaccccgagcccatgggcaagcagggccgcgtgctccacccagagcagcaccgtgtggtgagcgtgcgggagtgtgcccgctcccagggcttccctgacacctaccggctcttcggcaacatcctggacaagcaccggcaggtgggcaatgccgtgccaccgcccctggccaaagccattggcttggagatcaagctttgtatgttggccaaagcccgagagagtgcctcagctaaaataaaggaggaggaagctgctaaggactagttctgccctcccgtcacccctgtttctggcaccaggaatccccaacatgcactgatgttgtgtttttaacatgtcaatctgtccgttcacatgtgtggtacatggtgtttgtggccttggctgacatgaagctgttgtgtgaggttcgcttatcaactaatgatttagtgatcaaattgtgcagtactttgtgcattctggattttaaaagttttttattatgcattatatcaaatctaccactgtatgagtggaaattaagactttatgtagtttttatatgttgtaatatttcttcaaataaatctctcctataaacca

SEQ ID NO: 376980 - DNA, 3656 bp, Homo sapiens
cgtccgcgtggggggggtgtgtgcccgccttgcgcatgcgtgttccctgggcatggccggctccgttccatccttctgcacagggtatcgcctctctccgtttggtacatcccctcctcccccacgcccggactggggtggtagacgcgcctccgctcatcgcccctccccatcggtttccgcgcgaaaagccggggcgcctgcgctgccgccgccgcgtctgctgaagcctccgagatgccggcgcgtaccgccccagcccgggtgcccacactggccgtcccggccatctcgctgcccgacgatgtccgcaggcggctcaaagatttggaaagagacagcttaacagaaaaggaatgtgtgaaggagaaattgaatctcttgcacgaatttctgcaaacagaaataaagaatcagttatgtgacttggaaaccaaattacgtaaagaagaattatccgaggagggctacctggctaaagtcaaatcccttttaaataaagatttgtccttggagaacggtgctcatgcttacaaccgggaagtgaatggacgtctagaaaacgggaaccaagcaagaagtgaagcccgtagagtgggaatggcagatgccaacagcccccccaaacccctttccaaacctcgcacgcccaggaggagcaagtccgatggagaggctaagcctgaaccttcacctagccccaggattacaaggaaaagcaccaggcaaaccaccatcacatctcattttgcaaagggccctgccaaacggaaacctcaggaagagtctgaaagagccaaatcggatgagtccatcaaggaagaagacaaagaccaggatgagaagagacgtagagttacatccagagaacgagttgctagaccgcttcctgcagaagaacctgaaagagcaaaatcaggaacgcgcactgaaaaggaagaagaaagagatgaaaaagaagaaaagagactccgaagtcaaaccaaagaaccaacacccaaacagaaactgaaggaggagccggacagagaagccagggcaggcgtgcaggctgacgaggacgaagatggagacgagaaagatgagaagaagcacagaagtcaacccaaagatctagctgccaaacggaggcccgaagaaaaagaacctgaaaaagtaaatccacagatttctgatgaaaaagacgaggatgaaaaggaggagaagagacgcaaaacgacccccaaagaaccaacggagaaaaaaatggctcgcgccaaaacagtcatgaactccaagacccaccctcccaagtgcattcagtgcgggcagtacctggacgaccctgacctcaaatatgggcagcacccaccagacgcggtggatgagccacagatgctgacaaatgagaagctgtccatctttgatgccaacgagtctggctttgagagttatgaggcgcttccccagcacaaactgacctgcttcagtgtgtactgtaagcacggtcacctgtgtcccatcgacaccggcctcatcgagaagaatatcgaactcttcttttctggttcagcaaaaccaatctatgatgatgacccgtctcttgaaggtggtgttaatggcaaaaatcttggccccataaatgaatggtggatcactggctttgatggaggtgaaaaggccctcatcggcttcagcacctcatttgccgaatacattctgatggatcccagtcccgagtatgcgcccatatttgggctgatgcaggagaagatctacatcagcaagattgtggtggagttcctgcagagcaattccgactcgacctatgaggacctgatcaacaagatcgagaccacggttcctccttctggcctcaacttgaaccgcttcacagaggactccctcctgcgacacgcgcagtttgtggtggagcaggtggagagttatgacgaggccggggacagtgatgagcagcccatcttcctgacgccctgcatgcgggacctgatcaagctggctggggtcacgctgggacagaggcgagcccaggcgaggcggcagaccatcaggcattctaccagggagaaggacaggggacccacgaaagccaccaccaccaagctggtctaccagatcttcgatactttcttcgcagagcaaattgaaaaggatgacagagaagacaaggagaacgcctttaagcgccggcgatgtggcgtctgtgaggtgtgtcagcagcctgagtgtgggaaatgtaaagcctgcaaggacatggttaaatttggtggcagtggacggagcaagcaggcttgccaagagcggaggtgtcccaatatggccatgaaggaggcagatgacgatgaggaagtcgatgataacatcccagagatgccgtcacccaaaaaaatgcaccaggggaagaagaagaaacagaacaagaatcgcatctcttgggtcggagaagccgtcaagactgatgggaagaagagttactataagaaggtgtgcattgatgcggaaaccctggaagtgggggactgtgtctctgttattccagatgattcctcaaaaccgctgtatctagcaagggtcacggcgctgtgggaggacagcagcaacgggcagatgtttcacgcccactggttctgcgctgggacagacacagtcctcggggccacgtcggaccctctggagctgttcttggtggatgaatgtgaggacatgcagctttcatatatccacagcaaagtgaaagtcatctacaaagccccctccgaaaactgggccatggagggaggcatggatcccgagtccctgctggagggggacgacgggaagacctacttctaccagctgtggtatgatcaagactacgcgagattcgagtcccctccaaaaacccagccaacagaggacaacaagttcaaattctgtgtgagctgtgcccgtctggctgagatgaggcaaaaagaaatccccagggtcctggagcagctcgaggacctggatagccgggtcctctactactcagccaccaagaacggcatcctgtaccgagttggtgatggtgtgtacctgccccctgaggccttcacgttcaacatcaagctgtccagtcccgtgaaacgcccacggaaggagcccgtggatgaggacctgtacccagagcactaccggaaatactccgactacatcaaaggcagcaacctggatgcccctgagccctaccgaattggccggatcaaagagatcttctgtcccaagaagagcaacggcaggcccaatgagactgacatcaaaatccgggtcaacaagttctacaggtcagcagaggcctctgttcttccacgaggccacagactcttctagaaggctctgcctgaaacaaggttgtggcatagcacccacagttgttctaagagttaggttgaagtagctgtttttccaagtgtttctgattatcggtgggcactgataatgactagaattctagttcccagccctcacttttaggtccttattttaatgttgcagagccctttttccaaaagaaatccttaagctggctgggcactgtagctcacgcctctaatcctagcactttgggaggctgaggcaggaagatcacttgagtctaggagttcaagaccagcttgaggaaacgtagtgagacc

SEQ ID NO: 376981 - DNA, 3603 bp, Homo sapiens
cgtccgcgtggggggggtgtgtgcccgccttgcgcatgcgtgttccctgggcatggccggctccgttccatccttctgcacagggtatcgcctctctccgtttggtacatcccctcctcccccacgcccggactggggtggtagacgcgcctccgctcatcgcccctccccatcggtttccgcgcgaaaagccggggcgcctgcgctgccgccgccgcgtctgctgaagcctccgagatgccggcgcgtaccgccccagcccgggtgcccacactggccgtcccggccatctcgctgcccgacgatgtccgcaggcggctcaaagatttggaaagagacagcttaacagaaaaggaatgtgtgaaggagaaattgaatctcttgcacgaatttctgcaaacagaaataaagaatcagttatgtgacttggaaaccaaattacgtaaagaagaattatccgaggagggctacctggctaaagtcaaatcccttttaaataaagatttgtccttggagaacggtgctcatgcttacaaccgggaagtgaatggacgtctagaaaacgggaaccaagcaagaagtgaagcccgtagagtgggaatggcagatgccaacagcccccccaaacccctttccaaacctcgcacgcccaggaggagcaagtccgatggagaggctaagcctgaaccttcacctagccccaggattacaaggaaaagcaccaggcaaaccaccatcacatctcattttgcaaagggccctgccaaacggaaacctcaggaagagtctgaaagagccaaatcggatgagtccatcaaggaagaagacaaagaccaggatgagaagagacgtagagttacatccagagaacgagttgctagaccgcttcctgcagaagaacctgaaagagcaaaatcaggaacgcgcactgaaaaggaagaagaaagagatgaaaaagaagaaaagagactccgaagtcaaaccaaagaaccaacacccaaacagaaactgaaggaggagccggacagagaagccagggcaggcgtgcaggctgacgaggacgaagatggagacgagaaagatgagaagaagcacagaagtcaacccaaagatctagctgccaaacggaggcccgaagaaaaagaacctgaaaaagtaaatccacagatttctgatgaaaaagacgaggatgaaaaggaggagaagagacgcaaaacgacccccaaagaaccaacggagaaaaaaatggctcgcgccaaaacagtcatgaactccaagacccaccctcccaagtgcattcagtgcgggcagtacctggacgaccctgacctcaaatatgggcagcacccaccagacgcggtggatgagccacagatgctgacaaatgagaagctgtccatctttgatgccaacgagtctggctttgagagttatgaggcgcttccccagcacaaactgacctgcttcagtgtgtactgtaagcacggtcacctgtgtcccatcgacaccggcctcatcgagaagaatatcgaactcttcttttctggttcagcaaaaccaatctatgatgatgacccgtctcttgaaggtggtgttaatggcaaaaatcttggccccataaatgaatggtggatcactggctttgatggaggtgaaaaggccctcatcggcttcagcacctcatttgccgaatacattctgatggatcccagtcccgagtatgcgcccatatttgggctgatgcaggagaagatctacatcagcaagattgtggtggagttcctgcagagcaattccgactcgacctatgaggacctgatcaacaagatcgagaccacggttcctccttctggcctcaacttgaaccgcttcacagaggactccctcctgcgacacgcgcagtttgtggtggagcaggtggagagttatgacgaggccggggacagtgatgagcagcccatcttcctgacgccctgcatgcgggacctgatcaagctggctggggtcacgctgggacagaggcgagcccaggcgaggcggcagaccatcaggcattctaccagggagaaggacaggggacccacgaaagccaccaccaccaagctggtctaccagatcttcgatactttcttcgcagagcaaattgaaaaggatgacagagaagacaaggagaacgcctttaagcgccggcgatgtggcgtctgtgaggtgtgtcagcagcctgagtgtgggaaatgtaaagcctgcaaggacatggttaaatttggtggcagtggacggagcaagcaggcttgccaagagcggaggtgtcccaatatggccatgaaggaggcagatgacgatgaggaagtcgatgataacatcccagagatgccgtcacccaaaaaaatgcaccaggggaagaagaagaaacagaacaagaatcgcatctcttgggtcggagaagccgtcaagactgatgggaagaagagttactataagaaggtgtgcattgatgcggaaaccctggaagtgggggactgtgtctctgttattccagatgattcctcaaaaccgctgtatctagcaagggtcacggcgctgtgggaggacagcagcaacgggcagatgtttcacgcccactggttctgcgctgggacagacacagtcctcggggccacgtcggaccctctggagctgttcttggtggatgaatgtgaggacatgcagctttcatatatccacagcaaagtgaaagtcatctacaaagccccctccgaaaactgggccatggagggaggcatggatcccgagtccctgctggagggggacgacgggaagacctacttctaccagctgtggtatgatcaagactacgcgagattcgagtcccctccaaaaacccagccaacagaggacaacaagttcaaattctgtgtgagctgtgcccgtctggctgagatgaggcaaaaagaaatccccagggtcctggagcagctcgaggacctggatagccgggtcctctactactcagccaccaagaacggcatcctgtaccgagttggtgatggtgtgtacctgccccctgaggccttcacgttcaagtaagtgccccctcggagcagccggggccagggcgctccaggctgagccaggctggctttgtggtgtccccctccttacagacattgccaatccctccgcaccagctgttgtcctagccgtcacgttggcataggtgggcaaacagacaacataaatcgtgtagactgaccatgatgctattgcagagcaaagctgagcgtaaaagtcaactcgctggtttggctgggtgtggtttctcacgcctgtaatcccagcgctttgggaggccgaggcagtggggaatcatctgaggtcaggagtctgagaccagcctggccaacatggtgaaacctcgtctctactaaaaatacaaaaattagccgggtgtggtggtgcgcgcctgtagtcccagctactcgagaggcagagacaggagaatcacttgaacctgggaggcagaggttgcagtgagccaagatcatgccactgcactccatcctgggcaacagagtgtgactccgtctcaaaataaaaaaagaa

SEQ ID NO: 376982 - DNA, 2694 bp, Homo sapiens
cgtccgcgtggggggggtgtgtgcccgccttgcgcatgcgtgttccctgggcatggccggctccgttccatccttctgcacagggtatcgcctctctccgtttggtacatcccctcctcccccacgcccggactggggtggtagacgcgcctccgctcatcgcccctccccatcggtttccgcgcgaaaagccggggcgcctgcgctgccgccgccgcgtctgctgaagcctccgagatgccggcgcgtaccgccccagcccgggtgcccacactggccgtcccggccatctcgctgcccgacgatgtccgcaggcggctcaaagatttggaaagagacagcttaacagaaaaggaatgtgtgaaggagaaattgaatctcttgcacgaatttctgcaaacagaaataaagaatcagttatgtgacttggaaaccaaattacgtaaagaagaattatccgaggagggctacctggctaaagtcaaatcccttttaaataaagatttgtccttggagaacggtgctcatgcttacaaccgggaagtgaatggacgtctagaaaacgggaaccaagcaagaagtgaagcccgtagagtgggaatggcagatgccaacagcccccccaaacccctttccaaacctcgcacgcccaggaggagcaagtccgatggagaggctaagcctgaaccttcacctagccccaggattacaaggaaaagcaccaggcaaaccaccatcacatctcattttgcaaagggccctgccaaacggaaacctcaggaagagtctgaaagagccaaatcggatgagtccatcaaggaagaagacaaagaccaggatgagaagagacgtagagttacatccagagaacgagttgctagaccgcttcctgcagaagaacctgaaagagcaaaatcaggaacgcgcactgaaaaggaagaagaaagagatgaaaaagaagaaaagagactccgaagtcaaaccaaagaaccaacacccaaacagaaactgaaggaggagccggacagagaagccagggcaggcgtgcaggctgacgaggacgaagatggagacgagaaagatgagaagaagcacagaagtcaacccaaagatctagctgccaaacggaggcccgaagaaaaagaacctgaaaaagtaaatccacagatttctgatgaaaaagacgaggatgaaaaggaggagaagagacgcaaaacgacccccaaagaaccaacggagaaaaaaatggctcgcgccaaaacagtcatgaactccaagacccaccctcccaagtgcattcagtgcgggcagtacctggacgaccctgacctcaaatatgggcagcacccaccagacgcggtggatgagccacagatgctgacaaatgagaagctgtccatctttgatgccaacgagtctggctttgagagttatgaggcgcttccccagcacaaactgacctgcttcagtgtgtactgtaagcacggtcacctgtgtcccatcgacaccggcctcatcgagaagaatatcgaactcttcttttctggttcagcaaaaccaatctatgatgatgacccgtctcttgaaggtggtgttaatggcaaaaatcttggccccataaatgaatggtggatcactggctttgatggaggtgaaaaggccctcatcggcttcagcacctcatttgccgaatacattctgatggatcccagtcccgagtatgcgcccatatttgggctgatgcaggagaagatctacatcagcaagattgtggtggagttcctgcagagcaattccgactcgacctatgaggacctgatcaacaagatcgagaccacggttcctccttctggcctcaacttgaaccgcttcacagaggactccctcctgcgacacgcgcagtttgtggtggagcaggtggagagttatgacgaggccggggacagtgatgagcagcccatcttcctgacgccctgcatgcgggacctgatcaagctggctggggtcacgctgggacagaggcgagcccaggcgaggcggcagaccatcaggcattctaccagggagaaggacaggggacccacgaaagccaccaccaccaagctggtctaccagatcttcgatactttcttcgcagagcaaattgaaaaggatgacagagaagacaaggagaacgcctttaagcgccggcgatgtggcgtctgtgaggtgtgtcagcagcctgagtgtgggaaatgtaaagcctgcaaggacatggttaaatttggtggcagtggacggagcaagcaggcttgccaagagcggaggtgtcccatatgcatcaaggaggcagatgacgatgacggacgtcgcgatactcccagagatgcgcggccaagcaaaatgccaaggaagaacgagcacccgacacggatcgcacccctgcgtcgacacaccggcggacggctgggaacagcgtcacatacacaacggcgcgatgacggcgaaactggactgccgacgggcacgactaccgcgacaccaaacgagatagtgcatctcttgtcaatgcgagtctaggattcaaccacggctacggcgacaagctcggcagactacagagattgagaagggtacgtaacacacatgtacccgaaaaccgagccacgcaacacaacagcgcgacacaactgcgtcgtccgtcaccgcggccgc

SEQ ID NO: 376983 - DNA, 2020 bp, Homo sapiens
cgtccgcgtggggggggtgtgtgcccgccttgcgcatgcgtgttccctgggcatggccggctccgttccatccttctgcacagggtatcgcctctctccgtttggtacatcccctcctcccccacgcccggactggggtggtagacgcgcctccgctcatcgcccctccccatcggtttccgcgcgaaaagccggggcgcctgcgctgccgccgccgcgtctgctgaagcctccgagatgccggcgcgtaccgccccagcccgggtgcccacactggccgtcccggccatctcgctgcccgacgatgtccgcaggcggctcaaagatttggaaagagacagcttaacagaaaaggaatgtgtgaaggagaaattgaatctcttgcacgaatttctgcaaacagaaataaagaatcagttatgtgacttggaaaccaaattacgtaaagaagaattatccgaggagggctacctggctaaagtcaaatcccttttaaataaagatttgtccttggagaacggtgctcatgcttacaaccgggaagtgaatggacgtctagaaaacgggaaccaagcaagaagtgaagcccgtagagtgggaatggcagatgccaacagcccccccaaacccctttccaaacctcgcacgcccaggaggagcaagtccgatggagaggctaagcctgaaccttcacctagccccaggattacaaggaaaagcaccaggcaaaccaccatcacatctcattttgcaaagggccctgccaaacggaaacctcaggaagagtctgaaagagccaaatcggatgagtccatcaaggaagaagacaaagaccaggatgagaagagacgtagagttacatccagagaacgagttgctagaccgcttcctgcagaagaacctgaaagagcaaaatcaggaacgcgcactgaaaaggaagaagaaagagatgaaaaagaagaaaagagactccgaagtcaaaccaaagaaccaacacccaaacagaaactgaaggaggagccggacagagaagccagggcaggcgtgcaggctgacgaggacgaagatggagacgagaaagatgagaagaagcacagaagtcaacccaaagatctagctgccaaacggaggcccgaagaaaaagaacctgaaaaagtaaatccacagatttctgatgaaaaagacgaggatgaaaaggaggagaagagacgcaaaacgacccccaaagaaccaacggagaaaaaaatggctcgcgccaaaacagtcatgaactccaagacccaccctcccaagtgcattcagtgcgggcagtacctggacgaccctgacctcaaatatgggcagcacccaccagacgcggtggatgagccacagatgctgacaaatgagaagctgtccatctttgatgccaacgagtctggctttgagagttatgaggcgcttccccagcacaaactgacctgcttcagtgtgtactgtaagcacggtcacctgtgtcccatcgacaccggcctcatcgagaagaatatcgaactcttcttttctggttcagcaaaaccaatctatgatgatgacccgtctcttgaaggtggtgttaatggcaaaaatcttggccccataaatgaatggtggatcactggctttgatggaggtgaaaaggccctcatcggcttcagcacctcatttgccgaatacattctgatggatcccagtcccgagtatgcgcccatatttgggctgatgcaggagaagatctacatcagcaagattgtggtggagttcctgcagagcaattccgactcgacctatgaggacctgatcaacaagatcgagaccacggttcctccttctggcctcaacttgaaccgcttcacagaggactccctcctgcgacacgcgcagtttgtggtggagcaggtggagagttatgacgaggccggggacagtgatgagacgagaaagatgagaagaagcacagaagtcaacccaaagatctagctgccaaacggaggcccgaaga

SEQ ID NO: 376984 - DNA, 931 bp, Homo sapiens
cccagccccagccgcggccgccctggggacgcagacgccaaggcccctccggccagggccgggagccgggccggcctagccaggctcaaagatttggaaagagacagcttaacagaaaaggaatgtgtgaaggagaaattgaatctcttgcacgaatttctgcaaacagaaataaagaatcagttatgtgacttggaaaccaaattacgtaaagaagaattatccgaggagggctacctggctaaagtcaaatcccttttaaataaagatttgtccttggagaacggtgctcatgcttacaaccgggaagtgaatggacgtctagaaaacgggaaccaagcaagaagtgaagcccgtagagtgggaatggcagatgccaacagcccccccaaacccctttccaaacctcgcacgcccaggaggagcaagtccgatggagaggctaagcgttcaagagaccctcctgcctcagcctcccaagtaactgggattagagctgaaccttcacctagccccaggattacaaggaaaagcaccaggcaaaccaccatcacatctcattttgcaaagggccctgccaaacggaaacctcaggaagagtctgaaagagccaaatcggatgagtccatcaaggaagaagacaaagaccaggatgagaagagacgtagagttacatccagagaacgagttgctagaccgcttcctgcagaagaacctgaaagagcaaaatcaggaacgcgcactgaaaaggaagaagaaagagatgaaaaagaagaaaagagactccgaagtcaaaccaaagaaccaacacccaaacagaaactgaaggaggagccggacagagaagccagggcaggcgtgcaggctgacgaggacgaagatggagacgagaaatgtgaaaagcacagaaggcgacccgaaacaacttccc

SEQ ID NO: 376985 - DNA, 310 bp, Homo sapiens
tcaattcgcgcacctactccaagttcaaaaactctctggtggtttccttcctcaggtaaacgggtagaagccccccagtgttgccagacggcccggggctgtgccgcatgtcagcagtggtcattttcgccctgcactgaggcctctgccccccggaagctcacagctcagctctcaccagggagagactttgataacattcgtgaggggcttccggcacagtgggtcgtttcttccctctgtctgtggaggtgactcctgcagtctctcctgccccctacagctactgcgactactaccggccccggtt

SEQ ID NO: 376986 - DNA, 438 bp, Homo sapiens
ctcccgcagtcctggacttggtctggaatggtgtcaagccactgcccacccaccactgccttcccccttgctgcctctccccgcatgttttcccaggatgccaagaccagccctttcaccatcccctggcaccactccccttcccccaccctaaaggctcagcttagattcccacgctctcctacacctgcgctgcctcaggtccctgccgtggcctcgagccaagtgcgatatccctgactgtctctttcccgatgggcgtgagccccagggggcttcctggtcaccatggtgttcccagctcccagcccaccatggatgctcggatgctgctcacatgaggtgacagctgggccccccacactctttcaggacatgagtgcattggtggctgcccgcatgcggcacatccccttggccccagggtcagactggcgc

SEQ ID NO: 376987 - DNA, 394 bp, Homo sapiens
aggaagctgcggtatacccaccatgacaggaagaacggccgcagcagctctggggccctccgtggggtctgctcctgcgtggaaggtgggtcctgtaagttgtggttcccggtgggctgaggggaaggaaggcagagccctgggcctttggcctgtgaacctggaggccagggcagggcacagacacaccaagcctgggtgtcccagagaaggtagctgctgaccatgttgagtagtaaaagcaggctgggttcatggcccacacctataatcccagcactttgggaaaccaaggcgggaggatcacttgagcctgggaggttgaggaggctacagtgagctgtgattgtgccattgcactccagcctgggagacagagtgagaccctgtctct

SEQ ID NO: 376988 - DNA, 496 bp, Homo sapiens
ctctgtccttgtgaccacagccatcagggaagcgacagggctcctggtctccagtgttctccccgagtgctaagaccttggggcccttgcagtgctttcagagctggccggacttccccgcagggtttgctcccaccttccccagtggctgtcccctgggctcagctgcttttgttctttatctgctccaaactcctctgaccaggagcacgcctgctgaggtaactggggatttctgcaagtgcactccgcattggccagccactcccgactcaggctgctgaccctgggcctgggtctggccagtccagttgggagtgtcccactgacggtggggttgtccgtccttctcccccacaggccggtcagtacggcgtggcccagactaggaggcgggccatcatcctggccgcggcccctggagagaagctccctctgttcccggagccactgcacgtgtttgctccccgggcctgccagctgagcgtggtggtgg

SEQ ID NO: 376989 - DNA, 473 bp, Homo sapiens
tggggcttggcctttccgtgttgttaccttaaaacgatacatccacgttctcccaggcatggatgaggtagcccaattggacagcagattctgcatagcactttttcctgttctagaaggtactctcaagtgcttgtaataggcatttcagtgtcagccagatcaaatgttagtattaataaaatggattgttttaagtttctattgtagcaaagtcaaactactcttattggtggctaattggtcatggccccactgagggagaaattaagtgactatcaaattgccttcttactagtctgcgttagagaggggacagtgcgtttctctcccaaacgattgcagttctctccttttcaggccgcctataatgcaaagagcaaaagctttgaagatcctcccaaccatgcccgtagccctggaaacaaagggaagggcaagggaaaaggtacgtcattgtatgagtttctttt

SEQ ID NO: 376990 - DNA, 523 bp, Homo sapiens
gcctcagcctcctgagtagctgggattacaagtgcccgccacaacccctggctaatgtttgtatttttggtagagacagggttttaccacgttggccaggctggtctgaaactcctgaactcaggtgatcctcatgccttggactcccaaagtgctgggattataggcgtgagccactgcacctggtctgaggctgactttatggatggtgctgtgtccctccatcagaaaggtgtgtgaggtctcttctctgacactagcagctgttgatcggtgtttagacccgtgatttcttaggacttacaagatggcaagacaacattctaaacccgtcattcagagaaacattaaacttgaagcctctttcaacatcctggtgaatgagggtccacttcaggccagctggaggcctagggtcttgttccactaatggttggcctcactgtgtgtgacagccctgccaaacggaaacctcaggaagagtctgaaagagccaaatcggatgagtccatcaaggaagaag

SEQ ID NO: 376991 - DNA, 418 bp, Homo sapiens
gtttgtgtccaaaacttctttagaactgtgatattcttacaggcaaatgaagttgcttaacaagtgtttgtattttctcccctatttcttcctcccaggctcaaagatttggaaagagacagcttaacagaaaaggtaatctccaccttaaaatttttcttattaccaaatctgactgacacactttgtggctcataaaaagaaatttgttttctttaaatggattttgcattttttcccatggagtttcaaagataatttggatattcttgttaaatgtcagcactaatttgctgctaatagttgggtggtggtggtgtttttttttgttgttgtttttgttttttgagacagagtctcactctgtcacccaggctagagtgcaatggcatgatctcggctcactgtgacctctgcc

SEQ ID NO: 376992 - DNA, 5409 bp, Homo sapiens
cgtccgcgtggggggggtgtgtgcccgccttgcgcatgcgtgttccctgggcatggccggctccgttccatccttctgcacagggtatcgcctctctccgtttggtacatcccctcctcccccacgcccggactggggtggtagacgcgcctccgctcatcgcccctccccatcggtttccgcgcgaaaagccggggcgcctgcgctgccgccgccgcgtctgctgaagcctccgagatgccggcgcgtaccgccccagcccgggtgcccacactggccgtcccggccatctcgctgcccgacgatgtccgcaggcggctcaaagatttggaaagagacagcttaacagaaaaggaatgtgtgaaggagaaattgaatctcttgcacgaatttctgcaaacagaaataaagaatcagttatgtgacttggaaaccaaattacgtaaagaagaattatccgaggagggctacctggctaaagtcaaatcccttttaaataaagatttgtccttggagaacggtgctcatgcttacaaccgggaagtgaatggacgtctagaaaacgggaaccaagcaagaagtgaagcccgtagagtgggaatggcagatgccaacagcccccccaaacccctttccaaacctcgcacgcccaggaggagcaagtccgatggagaggctaagcctgaaccttcacctagccccaggattacaaggaaaagcaccaggcaaaccaccatcacatctcattttgcaaagggccctgccaaacggaaacctcaggaagagtctgaaagagccaaatcggatgagtccatcaaggaagaagacaaagaccaggatgagaagagacgtagagttacatccagagaacgagttgctagaccgcttcctgcagaagaacctgaaagagcaaaatcaggaacgcgcactgaaaaggaagaagaaagagatgaaaaagaagaaaagagactccgaagtcaaaccaaagaaccaacacccaaacagaaactgaaggaggagccggacagagaagccagggcaggcgtgcaggctgacgaggacgaagatggagacgagaaagatgagaagaagcacagaagtcaacccaaagatctagctgccaaacggaggcccgaagaaaaagaacctgaaaaagtaaatccacagatttctgatgaaaaagacgaggatgaaaaggaggagaagagacgcaaaacgacccccaaagaaccaacggagaaaaaaatggctcgcgccaaaacagtcatgaactccaagacccaccctcccaagtgcattcagtgcgggcagtacctggacgaccctgacctcaaatatgggcagcacccaccagacgcggtggatgagccacagatgctgacaaatgagaagctgtccatctttgatgccaacgagtctggctttgagagttatgaggcgcttccccagcacaaactgacctgcttcagtgtgtactgtaagcacggtcacctgtgtcccatcgacaccggcctcatcgagaagaatatcgaactcttcttttctggttcagcaaaaccaatctatgatgatgacccgtctcttgaaggtggtgttaatggcaaaaatcttggccccataaatgaatggtggatcactggctttgatggaggtgaaaaggccctcatcggcttcagcacctcatttgccgaatacattctgatggatcccagtcccgagtatgcgcccatatttgggctgatgcaggagaagatctacatcagcaagattgtggtggagttcctgcagagcaattccgactcgacctatgaggacctgatcaacaagatcgagaccacggttcctccttctggcctcaacttgaaccgcttcacagaggactccctcctgcgacacgcgcagtttgtggtggagcaggtggagagttatgacgaggccggggacagtgatgagcagcccatcttcctgacgccctgcatgcgggacctgatcaagctggctggggtcacgctgggacagaggcgagcccaggcgaggcggcagaccatcaggcattctaccagggagaaggacaggggacccacgaaagccaccaccaccaagctggtctaccagatcttcgatactttcttcgcagagcaaattgaaaaggatgacagagaagacaaggagaacgcctttaagcgccggcgatgtggcgtctgtgaggtgtgtcagcagcctgagtgtgggaaatgtaaagcctgcaaggacatggttaaatttggtggcagtggacggagcaagcaggcttgccaagagcggaggtgtcccaatatggccatgaaggaggcagatgacgatgaggaagtcgatgataacatcccagagatgccgtcacccaaaaaaatgcaccaggggaagaagaagaaacagaacaagaatcgcatctcttgggtcggagaagccgtcaagactgatgggaagaagagttactataagaaggtgtgcattgatgcggaaaccctggaagtgggggactgtgtctctgttattccagatgattcctcaaaaccgctgtatctagcaagggtcacggcgctgtgggaggacagcagcaacgggcagatgtttcacgcccactggttctgcgctgggacagacacagtcctcggggccacgtcggaccctctggagctgttcttggtggatgaatgtgaggacatgcagctttcatatatccacagcaaagtgaaagtcatctacaaagccccctccgaaaactgggccatggagggaggcatggatcccgagtccctgctggagggggacgacgggaagacctacttctaccagctgtggtatgatcaagactacgcgagattcgagtcccctccaaaaacccagccaacagaggacaacaagttcaaattctgtgtgagctgtgcccgtctggctgagatgaggcaaaaagaaatccccagggtcctggagcagctcgaggacctggatagccgggtcctctactactcagccaccaagaacggcatcctgtaccgagttggtgatggtgtgtacctgccccctgaggccttcacgttcaacatcaagctgtccagtcccgtgaaacgcccacggaaggagcccgtggatgaggacctgtacccagagcactaccggaaatactccgactacatcaaaggcagcaacctggatgcccctgagccctaccgaattggccggatcaaagagatcttctgtcccaagaagagcaacggcaggcccaatgagactgacatcaaaatccgggtcaacaagttctacaggcctgagaacacccacaagtccactccagcgagctaccacgcagacatcaacctgctctactggagcgacgaggaggccgtggtggacttcaaggctgtgcagggccgctgcaccgtggagtatggggaggacctgcccgagtgcgtccaggtgtactccatgggcggccccaaccgcttctacttcctcgaggcctataatgcaaagagcaaaagctttgaagatcctcccaaccatgcccgtagccctggaaacaaagggaagggcaagggaaaagggaagggcaagcccaagtcccaagcctgtgagccgagcgagccagagatagagatcaagctgcccaagctgcggaccctggatgtgttttctggctgcggggggttgtcggagggattccaccaagcaggcatctctgacacgctgtgggccatcgagatgtgggaccctgcggcccaggcgttccggctgaacaaccccggctccacagtgttcacagaggactgcaacatcctgctgaagctggtcatggctggggagaccaccaactcccgcggccagcggctgccccagaagggagacgtggagatgctgtgcggcgggccgccctgccagggcttcagcggcatgaaccgcttcaattcgcgcacctactccaagttcaaaaactctctggtggtttccttcctcagctactgcgactactaccggccccggttcttcctcctggagaatgtcaggaactttgtctccttcaagcgctccatggtcctgaagctcaccctccgctgcctggtccgcatgggctatcagtgcaccttcggcgtgctgcaggccggtcagtacggcgtggcccagactaggaggcgggccatcatcctggccgcggcccctggagagaagctccctctgttcccggagccactgcacgtgtttgctccccgggcctgccagctgagcgtggtggtggatgacaagaagtttgtgagcaacataaccaggttgagctcgggtcctttccggaccatcacggtgcgagacacgatgtccgacctgccggaggtgcggaatggagcctcggcactggagatctcctacaacggggagcctcagtcctggttccagaggcagctccggggcgcacagtaccagcccatcctcagggaccacatctgtaaggacatgagtgcattggtggctgcccgcatgcggcacatccccttggccccagggtcagactggcgcgatctgcccaacatcgaggtgcggctctcagacggcaccatggccaggaagctgcggtatacccaccatgacaggaagaacggccgcagcagctctggggccctccgtggggtctgctcctgcgtggaagccggcaaagcctgcgaccccgcagccaggcagttcaacaccctcatcccctggtgcctgccccacaccgggaaccggcacaaccactgggctggcctctatggaaggctcgagtgggacggcttcttcagcacaaccgtcaccaaccccgagcccatgggcaagcagggccgcgtgctccacccagagcagcaccgtgtggtgagcgtgcgggagtgtgcccgctcccagggcttccctgacacctaccggctcttcggcaacatcctggacaagcaccggcaggtgggcaatgccgtgccaccgcccctggccaaagccattggcttggagatcaagctttgtatgttggccaaagcccgagagagtgcctcagctaaaataaaggaggaggaagctgctaaggactagttctgccctcccgtcacccctgtttctggcaccaggaatccccaacatgcactgatgttgtgtttttaacatgtcaatctgtccgttcacatgtgtggtacatggtgtttgtggccttggctgacatgaagctgttgtgtgaggttcgcttatcaactaatgatttagtgatcaaattgtgcagtactttgtgcattctggattttaaaagttttttattatgcattatatcaaatctaccactgtatgagtggaaattaagactttatgtagtttttatatgttgtaatatttcttcaaataaatctctcctataaacca

SEQ ID NO: 376993 - DNA, 5605 bp, Homo sapiens
agactctagaggttccccagttcgacggagactctcaagcagacgcggtggatgagccacagatgctgacaaatgagaagctgtccatctttgatgccaacgagtctggcttgagagttatgaggcgcttccccagcacaaactgacctgcttcagtgtgtactgtaagcacggtcacctgtgtcccatcgacaccggcctcatcgagaagaatatcgaactcttcttttctggttcagcaaaaccaatctatgatgatgacccgtctcttgaaggtggtgttaatggcaaaaatcttggccccataaatgaatggtggatcactggctttgatggaggtgaaaaggccctcatcggcttcagcacctcatttgccgaatacattctgatggatcccagacccgagtatgcgcccatatttgggctgatgcaggagaagatctacatcagcaagattgtggtggagttcctggccgtcccggccatctcgctgcccgacgatgtccgcaggcggctcaaagatttggaaagagacagcttaacagaaaaggaatgtgtgaaggagaaattgaatctcttgcacgaatttctgcaaacagaaataaagaatcagttatgtgacttggaaaccaaattacgtaaagaagaattatccgaggagggctacctggctaaagtcaaatcccttttaaataaagatttgtccttggagaacggtgctcatgcttacaaccgggaagtgaatggacgtctagaaaacgggaaccaagcaagaagtgaagcccgtagagtgggaatggcagatgccaacagcccccccaaacccctttccaaacctcgcacgcccaggaggagcaagtccgatggagaggctaagcctgaaccttcacctagccccaggattacaaggaaaagcaccaggcaaaccaccatcacatctcattttgcaaagggccctgccaaacggaaacctcaggaagagtctgaaagagccaaatcggatgagtccatcaaggaagaagacaaagaccaggatgagaagagacgtagagttacatccagagaacgagttgctagaccgcttcctgcagaagaacctgaaagagcaaaatcaggaacgcgcactgaaaaggaagaagaaagagatgaaaaagaagaaaagagactccgaagtcaaaccaaagaaccaacacccaaacagaaactgaaggaggagccggacagagaagccagggcaggcgtgcaggctgacgaggacgaagatggagacgagaaagatgagaagaagcacagaagtcaacccaaagatctagctgccaaacggaggcccgaagaaaaagaacctgaaaaagtaaatccacagatttctgatgaaaaagacgaggatgaaaaggaggagaagagacgcaaaacgacccccaaagaaccaacggagaaaaaaatggctcgcgccaaaacagtcatgaactccaagacccaccctcccaagtgcattcagtgcgggcagtacctggacgaccctgacctcaaatatgggcagcacccaccagacgcggtggatgagccacagatgctgacaaatgagaagctgtccatctttgatgccaacgagtctggctttgagagttatgaggcgcttccccagcacaaactgacctgcttcagtgtgtactgtaagcacggtcacctgtgtcccatcgacaccggcctcatcgagaagaatatcgaactcttcttttctggttcagcaaaaccaatctatgatgatgacccgtctcttgaaggtggtgttaatggcaaaaatcttggccccataaatgaatggtggatcactggctttgatggaggtgaaaaggccctcatcggcttcagcacctcatttgccgaatacattctgatggatcccagtcccgagtatgcgcccatatttgggctgatgcaggagaagatctacatcagcaagattgtggtggagttcctgcagagcaattccgactcgacctatgaggacctgatcaacaagatcgagaccacggttcctccttctggcctcaacttgaaccgcttcacagaggactccctcctgcgacacgcgcagtttgtggtggagcaggtggagagttatgacgaggccggggacagtgatgagcagcccatcttcctgacgccctgcatgcgggacctgatcaagctggctggggtcacgctgggacagaggcgagcccaggcgaggcggcagaccatcaggcattctaccagggagaaggacaggggacccacgaaagccaccaccaccaagctggtctaccagatcttcgatactttcttcgcagagcaaattgaaaaggatgacagagaagacaaggagaacgcctttaagcgccggcgatgtggcgtctgtgaggtgtgtcagcagcctgagtgtgggaaatgtaaagcctgcaaggacatggttaaatttggtggcagtggacggagcaagcaggcttgccaagagcggaggtgtcccaatatggccatgaaggaggcagatgacgatgaggaagtcgatgataacatcccagagatgccgtcacccaaaaaaatgcaccaggggaagaagaagaaacagaacaagaatcgcatctcttgggtcggagaagccgtcaagactgatgggaagaagagttactataagaaggtgtgcattgatgcggaaaccctggaagtgggggactgtgtctctgttattccagatgattcctcaaaaccgctgtatctagcaagggtcacggcgctgtgggaggacagcagcaacgggcagatgtttcacgcccactggttctgcgctgggacagacacagtcctcggggccacgtcggaccctctggagctgttcttggtggatgaatgtgaggacatgcagctttcatatatccacagcaaagtgaaagtcatctacaaagccccctccgaaaactgggccatggagggaggcatggatcccgagtccctgctggagggggacgacgggaagacctacttctaccagctgtggtatgatcaagactacgcgagattcgagtcccctccaaaaacccagccaacagaggacaacaagttcaaattctgtgtgagctgtgcccgtctggctgagatgaggcaaaaagaaatccccagggtcctggagcagctcgaggacctggatagccgggtcctctactactcagccaccaagaacggcatcctgtaccgagttggtgatggtgtgtacctgccccctgaggccttcacgttcaacatcaagctgtccagtcccgtgaaacgcccacggaaggagcccgtggatgaggacctgtacccagagcactaccggaaatactccgactacatcaaaggcagcaacctggatgcccctgagccctaccgaattggccggatcaaagagatcttctgtcccaagaagagcaacggcaggcccaatgagactgacatcaaaatccgggtcaacaagttctacaggcctgagaacacccacaagtccactccagcgagctaccacgcagacatcaacctgctctactggagcgacgaggaggccgtggtggacttcaaggctgtgcagggccgctgcaccgtggagtatggggaggacctgcccgagtgcgtccaggtgtactccatgggcggccccaaccgcttctacttcctcgaggcctataatgcaaagagcaaaagctttgaagatcctcccaaccatgcccgtagccctggaaacaaagggaagggcaagggaaaagggaagggcaagcccaagtcccaagcctgtgagccgagcgagccagagatagagatcaagctgcccaagctgcggaccctggatgtgttttctggctgcggggggttgtcggagggattccaccaagcaggcatctctgacacgctgtgggccatcgagatgtgggaccctgcggcccaggcgttccggctgaacaaccccggctccacagtgttcacagaggactgcaacatcctgctgaagctggtcatggctggggagaccaccaactcccgcggccagcggctgccccagaagggagacgtggagatgctgtgcggcgggccgccctgccagggcttcagcggcatgaaccgcttcaattcgcgcacctactccaagttcaaaaactctctggtggtttccttcctcagctactgcgactactaccggccccggttcttcctcctggagaatgtcaggaactttgtctccttcaagcgctccatggtcctgaagctcaccctccgctgcctggtccgcatgggctatcagtgcaccttcggcgtgctgcaggccggtcagtacggcgtggcccagactaggaggcgggccatcatcctggccgcggcccctggagagaagctccctctgttcccggagccactgcacgtgtttgctccccgggcctgccagctgagcgtggtggtggatgacaagaagtttgtgagcaacataaccaggttgagctcgggtcctttccggaccatcacggtgcgagacacgatgtccgacctgccggaggtgcggaatggagcctcggcactggagatctcctacaacggggagcctcagtcctggttccagaggcagctccggggcgcacagtaccagcccatcctcagggaccacatctgtaaggacatgagtgcattggtggctgcccgcatgcggcacatccccttggccccagggtcagactggcgcgatctgcccaacatcgaggtgcggctctcagacggcaccatggccaggaagctgcggtatacccaccatgacaggaagaacggccgcagcagctctggggccctccgtggggtctgctcctgcgtggaagccggcaaagcctgcgaccccgcagccaggcagttcaacaccctcatcccctggtgcctgccccacaccgggaaccggcacaaccactgggctggcctctatggaaggctcgagtgggacggcttcttcagcacaaccgtcaccaaccccgagcccatgggcaagcagggccgcgtgctccacccagagcagcaccgtgtggtgagcgtgcgggagtgtgcccgctcccagggcttccctgacacctaccggctcttcggcaacatcctggacaagcaccggcaggtgggcaatgccgtgccaccgcccctggccaaagccattggcttggagatcaagctttgtatgttggccaaagcccgagagagtgcctcagctaaaataaaggaggaggaagctgctaaggactagttctgccctcccgtcacccctgtttctggcaccaggaatccccaacatgcactgatgttgtgtttttaacatgtcaatctgtccgttcacatgtgtggtacatggtgtttgtggccttggctgacatgaagctgttgtgtgaggttcgcttatcaactaatgatttagtgatcaaattgtgcagtactttgtgcattctggattttaaaagttttttattatgcattatatcaaatctaccactgtatgagtggaaattaagactttatgtagtttttatatgttgtaatatttcttcaaataaatctctcctataaacca

SEQ ID NO: 376994 - DNA, 5313 bp, Homo sapiens
gttctgacaggtttatgggcctaaggttcactctggtgagactgtcttctgtcattccctttctgttcctaccctagtccagcttccttcaagtgctatccctttggtctcccatggcctggacaactggccatccctggggccactgttttgccctcaggttctggatgaaagacagctggattcatggtccgtactgctgagtgagtctatgatcttgggctcaaagatttggaaagagacagcttaacagaaaaggaatgtgtgaaggagaaattgaatctcttgcacgaatttctgcaaacagaaataaagaatcagttatgtgacttggaaaccaaattacgtaaagaagaattatccgaggagggctacctggctaaagtcaaatcccttttaaataaagatttgtccttggagaacggtgctcatgcttacaaccgggaagtgaatggacgtctagaaaacgggaaccaagcaagaagtgaagcccgtagagtgggaatggcagatgccaacagcccccccaaacccctttccaaacctcgcacgcccaggaggagcaagtccgatggagaggctaagcctgaaccttcacctagccccaggattacaaggaaaagcaccaggcaaaccaccatcacatctcattttgcaaagggccctgccaaacggaaacctcaggaagagtctgaaagagccaaatcggatgagtccatcaaggaagaagacaaagaccaggatgagaagagacgtagagttacatccagagaacgagttgctagaccgcttcctgcagaagaacctgaaagagcaaaatcaggaacgcgcactgaaaaggaagaagaaagagatgaaaaagaagaaaagagactccgaagtcaaaccaaagaaccaacacccaaacagaaactgaaggaggagccggacagagaagccagggcaggcgtgcaggctgacgaggacgaagatggagacgagaaagatgagaagaagcacagaagtcaacccaaagatctagctgccaaacggaggcccgaagaaaaagaacctgaaaaagtaaatccacagatttctgatgaaaaagacgaggatgaaaaggaggagaagagacgcaaaacgacccccaaagaaccaacggagaaaaaaatggctcgcgccaaaacagtcatgaactccaagacccaccctcccaagtgcattcagtgcgggcagtacctggacgaccctgacctcaaatatgggcagcacccaccagacgcggtggatgagccacagatgctgacaaatgagaagctgtccatctttgatgccaacgagtctggctttgagagttatgaggcgcttccccagcacaaactgacctgcttcagtgtgtactgtaagcacggtcacctgtgtcccatcgacaccggcctcatcgagaagaatatcgaactcttcttttctggttcagcaaaaccaatctatgatgatgacccgtctcttgaaggtggtgttaatggcaaaaatcttggccccataaatgaatggtggatcactggctttgatggaggtgaaaaggccctcatcggcttcagcacctcatttgccgaatacattctgatggatcccagtcccgagtatgcgcccatatttgggctgatgcaggagaagatctacatcagcaagattgtggtggagttcctgcagagcaattccgactcgacctatgaggacctgatcaacaagatcgagaccacggttcctccttctggcctcaacttgaaccgcttcacagaggactccctcctgcgacacgcgcagtttgtggtggagcaggtggagagttatgacgaggccggggacagtgatgagcagcccatcttcctgacgccctgcatgcgggacctgatcaagctggctggggtcacgctgggacagaggcgagcccaggcgaggcggcagaccatcaggcattctaccagggagaaggacaggggacccacgaaagccaccaccaccaagctggtctaccagatcttcgatactttcttcgcagagcaaattgaaaaggatgacagagaagacaaggagaacgcctttaagcgccggcgatgtggcgtctgtgaggtgtgtcagcagcctgagtgtgggaaatgtaaagcctgcaaggacatggttaaatttggtggcagtggacggagcaagcaggcttgccaagagcggaggtgtcccaatatggccatgaaggaggcagatgacgatgaggaagtcgatgataacatcccagagatgccgtcacccaaaaaaatgcaccaggggaagaagaagaaacagaacaagaatcgcatctcttgggtcggagaagccgtcaagactgatgggaagaagagttactataagaaggtgtgcattgatgcggaaaccctggaagtgggggactgtgtctctgttattccagatgattcctcaaaaccgctgtatctagcaagggtcacggcgctgtgggaggacagcagcaacgggcagatgtttcacgcccactggttctgcgctgggacagacacagtcctcggggccacgtcggaccctctggagctgttcttggtggatgaatgtgaggacatgcagctttcatatatccacagcaaagtgaaagtcatctacaaagccccctccgaaaactgggccatggagggaggcatggatcccgagtccctgctggagggggacgacgggaagacctacttctaccagctgtggtatgatcaagactacgcgagattcgagtcccctccaaaaacccagccaacagaggacaacaagttcaaattctgtgtgagctgtgcccgtctggctgagatgaggcaaaaagaaatccccagggtcctggagcagctcgaggacctggatagccgggtcctctactactcagccaccaagaacggcatcctgtaccgagttggtgatggtgtgtacctgccccctgaggccttcacgttcaacatcaagctgtccagtcccgtgaaacgcccacggaaggagcccgtggatgaggacctgtacccagagcactaccggaaatactccgactacatcaaaggcagcaacctggatgcccctgagccctaccgaattggccggatcaaagagatcttctgtcccaagaagagcaacggcaggcccaatgagactgacatcaaaatccgggtcaacaagttctacaggcctgagaacacccacaagtccactccagcgagctaccacgcagacatcaacctgctctactggagcgacgaggaggccgtggtggacttcaaggctgtgcagggccgctgcaccgtggagtatggggaggacctgcccgagtgcgtccaggtgtactccatgggcggccccaaccgcttctacttcctcgaggcctataatgcaaagagcaaaagctttgaagatcctcccaaccatgcccgtagccctggaaacaaagggaagggcaagggaaaagggaagggcaagcccaagtcccaagcctgtgagccgagcgagccagagatagagatcaagctgcccaagctgcggaccctggatgtgttttctggctgcggggggttgtcggagggattccaccaagcaggcatctctgacacgctgtgggccatcgagatgtgggaccctgcggcccaggcgttccggctgaacaaccccggctccacagtgttcacagaggactgcaacatcctgctgaagctggtcatggctggggagaccaccaactcccgcggccagcggctgccccagaagggagacgtggagatgctgtgcggcgggccgccctgccagggcttcagcggcatgaaccgcttcaattcgcgcacctactccaagttcaaaaactctctggtggtttccttcctcagctactgcgactactaccggccccggttcttcctcctggagaatgtcaggaactttgtctccttcaagcgctccatggtcctgaagctcaccctccgctgcctggtccgcatgggctatcagtgcaccttcggcgtgctgcaggccggtcagtacggcgtggcccagactaggaggcgggccatcatcctggccgcggcccctggagagaagctccctctgttcccggagccactgcacgtgtttgctccccgggcctgccagctgagcgtggtggtggatgacaagaagtttgtgagcaacataaccaggttgagctcgggtcctttccggaccatcacggtgcgagacacgatgtccgacctgccggaggtgcggaatggagcctcggcactggagatctcctacaacggggagcctcagtcctggttccagaggcagctccggggcgcacagtaccagcccatcctcagggaccacatctgtaaggacatgagtgcattggtggctgcccgcatgcggcacatccccttggccccagggtcagactggcgcgatctgcccaacatcgaggtgcggctctcagacggcaccatggccaggaagctgcggtatacccaccatgacaggaagaacggccgcagcagctctggggccctccgtggggtctgctcctgcgtggaagccggcaaagcctgcgaccccgcagccaggcagttcaacaccctcatcccctggtgcctgccccacaccgggaaccggcacaaccactgggctggcctctatggaaggctcgagtgggacggcttcttcagcacaaccgtcaccaaccccgagcccatgggcaagcagggccgcgtgctccacccagagcagcaccgtgtggtgagcgtgcgggagtgtgcccgctcccagggcttccctgacacctaccggctcttcggcaacatcctggacaagcaccggcaggtgggcaatgccgtgccaccgcccctggccaaagccattggcttggagatcaagctttgtatgttggccaaagcccgagagagtgcctcagctaaaataaaggaggaggaagctgctaaggactagttctgccctcccgtcacccctgtttctggcaccaggaatccccaacatgcactgatgttgtgtttttaacatgtcaatctgtccgttcacatgtgtggtacatggtgtttgtggccttggctgacatgaagctgttgtgtgaggttcgcttatcaactaatgatttagtgatcaaattgtgcagtactttgtgcattctggattttaaaagttttttattatgcattatatcaaatctaccactgtatgagtggaaattaagactttatgtagtttttatatgttgtaatatttcttcaaataaatctctcctataaacca

SEQ ID NO: 376995 - DNA, 5337 bp, Homo sapiens
tagctggggttacaggcacgcagcaccgcggcactgcaccggctattgttcttttatttttttccctctttgtccctgaaagagtcaagctactaattgtcagtaatcaaatcagaccacgatttcccaggcaaactcctggcagttctacatttaggaatgactagctagagacatcctgaagaatgagttattcggggaggcgccagccacctcctctaacttcacctctatctgccctctgtgctcaaagatttggaaagagacagcttaacagaaaaggaatgtgtgaaggagaaattgaatctcttgcacgaatttctgcaaacagaaataaagaatcagttatgtgacttggaaaccaaattacgtaaagaagaattatccgaggagggctacctggctaaagtcaaatcccttttaaataaagatttgtccttggagaacggtgctcatgcttacaaccgggaagtgaatggacgtctagaaaacgggaaccaagcaagaagtgaagcccgtagagtgggaatggcagatgccaacagcccccccaaacccctttccaaacctcgcacgcccaggaggagcaagtccgatggagaggctaagcctgaaccttcacctagccccaggattacaaggaaaagcaccaggcaaaccaccatcacatctcattttgcaaagggccctgccaaacggaaacctcaggaagagtctgaaagagccaaatcggatgagtccatcaaggaagaagacaaagaccaggatgagaagagacgtagagttacatccagagaacgagttgctagaccgcttcctgcagaagaacctgaaagagcaaaatcaggaacgcgcactgaaaaggaagaagaaagagatgaaaaagaagaaaagagactccgaagtcaaaccaaagaaccaacacccaaacagaaactgaaggaggagccggacagagaagccagggcaggcgtgcaggctgacgaggacgaagatggagacgagaaagatgagaagaagcacagaagtcaacccaaagatctagctgccaaacggaggcccgaagaaaaagaacctgaaaaagtaaatccacagatttctgatgaaaaagacgaggatgaaaaggaggagaagagacgcaaaacgacccccaaagaaccaacggagaaaaaaatggctcgcgccaaaacagtcatgaactccaagacccaccctcccaagtgcattcagtgcgggcagtacctggacgaccctgacctcaaatatgggcagcacccaccagacgcggtggatgagccacagatgctgacaaatgagaagctgtccatctttgatgccaacgagtctggctttgagagttatgaggcgcttccccagcacaaactgacctgcttcagtgtgtactgtaagcacggtcacctgtgtcccatcgacaccggcctcatcgagaagaatatcgaactcttcttttctggttcagcaaaaccaatctatgatgatgacccgtctcttgaaggtggtgttaatggcaaaaatcttggccccataaatgaatggtggatcactggctttgatggaggtgaaaaggccctcatcggcttcagcacctcatttgccgaatacattctgatggatcccagtcccgagtatgcgcccatatttgggctgatgcaggagaagatctacatcagcaagattgtggtggagttcctgcagagcaattccgactcgacctatgaggacctgatcaacaagatcgagaccacggttcctccttctggcctcaacttgaaccgcttcacagaggactccctcctgcgacacgcgcagtttgtggtggagcaggtggagagttatgacgaggccggggacagtgatgagcagcccatcttcctgacgccctgcatgcgggacctgatcaagctggctggggtcacgctgggacagaggcgagcccaggcgaggcggcagaccatcaggcattctaccagggagaaggacaggggacccacgaaagccaccaccaccaagctggtctaccagatcttcgatactttcttcgcagagcaaattgaaaaggatgacagagaagacaaggagaacgcctttaagcgccggcgatgtggcgtctgtgaggtgtgtcagcagcctgagtgtgggaaatgtaaagcctgcaaggacatggttaaatttggtggcagtggacggagcaagcaggcttgccaagagcggaggtgtcccaatatggccatgaaggaggcagatgacgatgaggaagtcgatgataacatcccagagatgccgtcacccaaaaaaatgcaccaggggaagaagaagaaacagaacaagaatcgcatctcttgggtcggagaagccgtcaagactgatgggaagaagagttactataagaaggtgtgcattgatgcggaaaccctggaagtgggggactgtgtctctgttattccagatgattcctcaaaaccgctgtatctagcaagggtcacggcgctgtgggaggacagcagcaacgggcagatgtttcacgcccactggttctgcgctgggacagacacagtcctcggggccacgtcggaccctctggagctgttcttggtggatgaatgtgaggacatgcagctttcatatatccacagcaaagtgaaagtcatctacaaagccccctccgaaaactgggccatggagggaggcatggatcccgagtccctgctggagggggacgacgggaagacctacttctaccagctgtggtatgatcaagactacgcgagattcgagtcccctccaaaaacccagccaacagaggacaacaagttcaaattctgtgtgagctgtgcccgtctggctgagatgaggcaaaaagaaatccccagggtcctggagcagctcgaggacctggatagccgggtcctctactactcagccaccaagaacggcatcctgtaccgagttggtgatggtgtgtacctgccccctgaggccttcacgttcaacatcaagctgtccagtcccgtgaaacgcccacggaaggagcccgtggatgaggacctgtacccagagcactaccggaaatactccgactacatcaaaggcagcaacctggatgcccctgagccctaccgaattggccggatcaaagagatcttctgtcccaagaagagcaacggcaggcccaatgagactgacatcaaaatccgggtcaacaagttctacaggcctgagaacacccacaagtccactccagcgagctaccacgcagacatcaacctgctctactggagcgacgaggaggccgtggtggacttcaaggctgtgcagggccgctgcaccgtggagtatggggaggacctgcccgagtgcgtccaggtgtactccatgggcggccccaaccgcttctacttcctcgaggcctataatgcaaagagcaaaagctttgaagatcctcccaaccatgcccgtagccctggaaacaaagggaagggcaagggaaaagggaagggcaagcccaagtcccaagcctgtgagccgagcgagccagagatagagatcaagctgcccaagctgcggaccctggatgtgttttctggctgcggggggttgtcggagggattccaccaagcaggcatctctgacacgctgtgggccatcgagatgtgggaccctgcggcccaggcgttccggctgaacaaccccggctccacagtgttcacagaggactgcaacatcctgctgaagctggtcatggctggggagaccaccaactcccgcggccagcggctgccccagaagggagacgtggagatgctgtgcggcgggccgccctgccagggcttcagcggcatgaaccgcttcaattcgcgcacctactccaagttcaaaaactctctggtggtttccttcctcagctactgcgactactaccggccccggttcttcctcctggagaatgtcaggaactttgtctccttcaagcgctccatggtcctgaagctcaccctccgctgcctggtccgcatgggctatcagtgcaccttcggcgtgctgcaggccggtcagtacggcgtggcccagactaggaggcgggccatcatcctggccgcggcccctggagagaagctccctctgttcccggagccactgcacgtgtttgctccccgggcctgccagctgagcgtggtggtggatgacaagaagtttgtgagcaacataaccaggttgagctcgggtcctttccggaccatcacggtgcgagacacgatgtccgacctgccggaggtgcggaatggagcctcggcactggagatctcctacaacggggagcctcagtcctggttccagaggcagctccggggcgcacagtaccagcccatcctcagggaccacatctgtaaggacatgagtgcattggtggctgcccgcatgcggcacatccccttggccccagggtcagactggcgcgatctgcccaacatcgaggtgcggctctcagacggcaccatggccaggaagctgcggtatacccaccatgacaggaagaacggccgcagcagctctggggccctccgtggggtctgctcctgcgtggaagccggcaaagcctgcgaccccgcagccaggcagttcaacaccctcatcccctggtgcctgccccacaccgggaaccggcacaaccactgggctggcctctatggaaggctcgagtgggacggcttcttcagcacaaccgtcaccaaccccgagcccatgggcaagcagggccgcgtgctccacccagagcagcaccgtgtggtgagcgtgcgggagtgtgcccgctcccagggcttccctgacacctaccggctcttcggcaacatcctggacaagcaccggcaggtgggcaatgccgtgccaccgcccctggccaaagccattggcttggagatcaagctttgtatgttggccaaagcccgagagagtgcctcagctaaaataaaggaggaggaagctgctaaggactagttctgccctcccgtcacccctgtttctggcaccaggaatccccaacatgcactgatgttgtgtttttaacatgtcaatctgtccgttcacatgtgtggtacatggtgtttgtggccttggctgacatgaagctgttgtgtgaggttcgcttatcaactaatgatttagtgatcaaattgtgcagtactttgtgcattctggattttaaaagttttttattatgcattatatcaaatctaccactgtatgagtggaaattaagactttatgtagtttttatatgttgtaatatttcttcaaataaatctctcctataaacca

SEQ ID NO: 376996 - DNA, 5223 bp, Homo sapiens
cccagccccagccgcggccgccctggggacgcagacgccaaggcccctccggccagggccgggagccgggccggcctagccaggctcaaagatttggaaagagacagcttaacagaaaaggaatgtgtgaaggagaaattgaatctcttgcacgaatttctgcaaacagaaataaagaatcagttatgtgacttggaaaccaaattacgtaaagaagaattatccgaggagggctacctggctaaagtcaaatcccttttaaataaagatttgtccttggagaacggtgctcatgcttacaaccgggaagtgaatggacgtctagaaaacgggaaccaagcaagaagtgaagcccgtagagtgggaatggcagatgccaacagcccccccaaacccctttccaaacctcgcacgcccaggaggagcaagtccgatggagaggctaagcgttcaagagaccctcctgcctcagcctcccaagtaactgggattagagctgaaccttcacctagccccaggattacaaggaaaagcaccaggcaaaccaccatcacatctcattttgcaaagggccctgccaaacggaaacctcaggaagagtctgaaagagccaaatcggatgagtccatcaaggaagaagacaaagaccaggatgagaagagacgtagagttacatccagagaacgagttgctagaccgcttcctgcagaagaacctgaaagagcaaaatcaggaacgcgcactgaaaaggaagaagaaagagatgaaaaagaagaaaagagactccgaagtcaaaccaaagaaccaacacccaaacagaaactgaaggaggagccggacagagaagccagggcaggcgtgcaggctgacgaggacgaagatggagacgagaaagatgagaagaagcacagaagtcaacccaaagatctagctgccaaacggaggcccgaagaaaaagaacctgaaaaagtaaatccacagatttctgatgaaaaagacgaggatgaaaaggaggagaagagacgcaaaacgacccccaaagaaccaacggagaaaaaaatggctcgcgccaaaacagtcatgaactccaagacccaccctcccaagtgcattcagtgcgggcagtacctggacgaccctgacctcaaatatgggcagcacccaccagacgcggtggatgagccacagatgctgacaaatgagaagctgtccatctttgatgccaacgagtctggctttgagagttatgaggcgcttccccagcacaaactgacctgcttcagtgtgtactgtaagcacggtcacctgtgtcccatcgacaccggcctcatcgagaagaatatcgaactcttcttttctggttcagcaaaaccaatctatgatgatgacccgtctcttgaaggtggtgttaatggcaaaaatcttggccccataaatgaatggtggatcactggctttgatggaggtgaaaaggccctcatcggcttcagcacctcatttgccgaatacattctgatggatcccagtcccgagtatgcgcccatatttgggctgatgcaggagaagatctacatcagcaagattgtggtggagttcctgcagagcaattccgactcgacctatgaggacctgatcaacaagatcgagaccacggttcctccttctggcctcaacttgaaccgcttcacagaggactccctcctgcgacacgcgcagtttgtggtggagcaggtggagagttatgacgaggccggggacagtgatgagcagcccatcttcctgacgccctgcatgcgggacctgatcaagctggctggggtcacgctgggacagaggcgagcccaggcgaggcggcagaccatcaggcattctaccagggagaaggacaggggacccacgaaagccaccaccaccaagctggtctaccagatcttcgatactttcttcgcagagcaaattgaaaaggatgacagagaagacaaggagaacgcctttaagcgccggcgatgtggcgtctgtgaggtgtgtcagcagcctgagtgtgggaaatgtaaagcctgcaaggacatggttaaatttggtggcagtggacggagcaagcaggcttgccaagagcggaggtgtcccaatatggccatgaaggaggcagatgacgatgaggaagtcgatgataacatcccagagatgccgtcacccaaaaaaatgcaccaggggaagaagaagaaacagaacaagaatcgcatctcttgggtcggagaagccgtcaagactgatgggaagaagagttactataagaaggtgtgcattgatgcggaaaccctggaagtgggggactgtgtctctgttattccagatgattcctcaaaaccgctgtatctagcaagggtcacggcgctgtgggaggacagcagcaacgggcagatgtttcacgcccactggttctgcgctgggacagacacagtcctcggggccacgtcggaccctctggagctgttcttggtggatgaatgtgaggacatgcagctttcatatatccacagcaaagtgaaagtcatctacaaagccccctccgaaaactgggccatggagggaggcatggatcccgagtccctgctggagggggacgacgggaagacctacttctaccagctgtggtatgatcaagactacgcgagattcgagtcccctccaaaaacccagccaacagaggacaacaagttcaaattctgtgtgagctgtgcccgtctggctgagatgaggcaaaaagaaatccccagggtcctggagcagctcgaggacctggatagccgggtcctctactactcagccaccaagaacggcatcctgtaccgagttggtgatggtgtgtacctgccccctgaggccttcacgttcaacatcaagctgtccagtcccgtgaaacgcccacggaaggagcccgtggatgaggacctgtacccagagcactaccggaaatactccgactacatcaaaggcagcaacctggatgcccctgagccctaccgaattggccggatcaaagagatcttctgtcccaagaagagcaacggcaggcccaatgagactgacatcaaaatccgggtcaacaagttctacaggcctgagaacacccacaagtccactccagcgagctaccacgcagacatcaacctgctctactggagcgacgaggaggccgtggtggacttcaaggctgtgcagggccgctgcaccgtggagtatggggaggacctgcccgagtgcgtccaggtgtactccatgggcggccccaaccgcttctacttcctcgaggcctataatgcaaagagcaaaagctttgaagatcctcccaaccatgcccgtagccctggaaacaaagggaagggcaagggaaaagggaagggcaagcccaagtcccaagcctgtgagccgagcgagccagagatagagatcaagctgcccaagctgcggaccctggatgtgttttctggctgcggggggttgtcggagggattccaccaagcaggcatctctgacacgctgtgggccatcgagatgtgggaccctgcggcccaggcgttccggctgaacaaccccggctccacagtgttcacagaggactgcaacatcctgctgaagctggtcatggctggggagaccaccaactcccgcggccagcggctgccccagaagggagacgtggagatgctgtgcggcgggccgccctgccagggcttcagcggcatgaaccgcttcaattcgcgcacctactccaagttcaaaaactctctggtggtttccttcctcagctactgcgactactaccggccccggttcttcctcctggagaatgtcaggaactttgtctccttcaagcgctccatggtcctgaagctcaccctccgctgcctggtccgcatgggctatcagtgcaccttcggcgtgctgcaggccggtcagtacggcgtggcccagactaggaggcgggccatcatcctggccgcggcccctggagagaagctccctctgttcccggagccactgcacgtgtttgctccccgggcctgccagctgagcgtggtggtggatgacaagaagtttgtgagcaacataaccaggttgagctcgggtcctttccggaccatcacggtgcgagacacgatgtccgacctgccggaggtgcggaatggagcctcggcactggagatctcctacaacggggagcctcagtcctggttccagaggcagctccggggcgcacagtaccagcccatcctcagggaccacatctgtaaggacatgagtgcattggtggctgcccgcatgcggcacatccccttggccccagggtcagactggcgcgatctgcccaacatcgaggtgcggctctcagacggcaccatggccaggaagctgcggtatacccaccatgacaggaagaacggccgcagcagctctggggccctccgtggggtctgctcctgcgtggaagccggcaaagcctgcgaccccgcagccaggcagttcaacaccctcatcccctggtgcctgccccacaccgggaaccggcacaaccactgggctggcctctatggaaggctcgagtgggacggcttcttcagcacaaccgtcaccaaccccgagcccatgggcaagcagggccgcgtgctccacccagagcagcaccgtgtggtgagcgtgcgggagtgtgcccgctcccagggcttccctgacacctaccggctcttcggcaacatcctggacaagcaccggcaggtgggcaatgccgtgccaccgcccctggccaaagccattggcttggagatcaagctttgtatgttggccaaagcccgagagagtgcctcagctaaaataaaggaggaggaagctgctaaggactagttctgccctcccgtcacccctgtttctggcaccaggaatccccaacatgcactgatgttgtgtttttaacatgtcaatctgtccgttcacatgtgtggtacatggtgtttgtggccttggctgacatgaagctgttgtgtgaggttcgcttatcaactaatgatttagtgatcaaattgtgcagtactttgtgcattctggattttaaaagttttttattatgcattatatcaaatctaccactgtatgagtggaaattaagactttatgtagtttttatatgttgtaatatttcttcaaataaatctctcctataaacca

SEQ ID NO: 376997 - DNA, 6250 bp, Homo sapiens
cgtccgcgtggggggggtgtgtgcccgccttgcgcatgcgtgttccctgggcatggccggctccgttccatccttctgcacagggtatcgcctctctccgtttggtacatcccctcctcccccacgcccggactggggtggtagacgcgcctccgctcatcgcccctccccatcggtttccgcgcgaaaagccggggcgcctgcgctgccgccgccgcgtctgctgaagcctccgagatgccggcgcgtaccgccccagcccgggtgcccacactggccgtcccggccatctcgctgcccgacgatgtccgcaggcggctcaaagatttggaaagagacagcttaacagaaaaggaatgtgtgaaggagaaattgaatctcttgcacgaatttctgcaaacagaaataaagaatcagttatgtgacttggaaaccaaattacgtaaagaagaattatccgaggagggctacctggctaaagtcaaatcccttttaaataaagatttgtccttggagaacggtgctcatgcttacaaccgggaagtgaatggacgtctagaaaacgggaaccaagcaagaagtgaagcccgtagagtgggaatggcagatgccaacagcccccccaaacccctttccaaacctcgcacgcccaggaggagcaagtccgatggagaggctaagcctgaaccttcacctagccccaggattacaaggaaaagcaccaggcaaaccaccatcacatctcattttgcaaagggccctgccaaacggaaacctcaggaagagtctgaaagagccaaatcggatgagtccatcaaggaagaagacaaagaccaggatgagaagagacgtagagttacatccagagaacgagttgctagaccgcttcctgcagaagaacctgaaagagcaaaatcaggaacgcgcactgaaaaggaagaagaaagagatgaaaaagaagaaaagagactccgaagtcaaaccaaagaaccaacacccaaacagaaactgaaggaggagccggacagagaagccagggcaggcgtgcaggctgacgaggacgaagatggagacgagaaagatgagaagaagcacagaagtcaacccaaagatctagctgccaaacggaggcccgaagaaaaagaacctgaaaaagtaaatccacagatttctgatgaaaaagacgaggatgaaaaggaggagaagagacgcaaaacgacccccaaagaaccaacggagaaaaaaatggctcgcgccaaaacagtcatgaactccaagacccaccctcccaagtgcattcagtgcgggcagtacctggacgaccctgacctcaaatatgggcagcacccaccagacgcggtggatgagccacagatgctgacaaatgagaagctgtccatctttgatgccaacgagtctggctttgagagttatgaggcgcttccccagcacaaactgacctgcttcagtgtgtactgtaagcacggtcacctgtgtcccatcgacaccggcctcatcgagaagaatatcgaactcttcttttctggttcagcaaaaccaatctatgatgatgacccgtctcttgaaggtggtgttaatggcaaaaatcttggccccataaatgaatggtggatcactggctttgatggaggtgaaaaggccctcatcggcttcagcacctcatttgccgaatacattctgatggatcccagtcccgagtatgcgcccatatttgggctgatgcaggagaagatctacatcagcaagattgtggtggagttcctgcagagcaattccgactcgacctatgaggacctgatcaacaagatcgagaccacggttcctccttctggcctcaacttgaaccgcttcacagaggactccctcctgcgacacgcgcagtttgtggtggagcaggtggagagttatgacgaggccggggacagtgatgagcagcccatcttcctgacgccctgcatgcgggacctgatcaagctggctggggtcacgctgggacagaggcgagcccaggcgaggcggcagaccatcaggcattctaccagggagaaggacaggggacccacgaaagccaccaccaccaagctggtctaccagatcttcgatactttcttcgcagagcaaattgaaaaggatgacagagaagacaaggagaacgcctttaagcgccggcgatgtggcgtctgtgaggtgtgtcagcagcctgagtgtgggaaatgtaaagcctgcaaggacatggttaaatttggtggcagtggacggagcaagcaggcttgccaagagcggaggtgtcccaatatggccatgaaggaggcagatgacgatgaggaagtcgatgataacatcccagagatgccgtcacccaaaaaaatgcaccaggggaagaagaagaaacagaacaagaatcgcatctcttgggtcggagaagccgtcaagactgatgggaagaagagttactataagaaggtgtgcattgatgcggaaaccctggaagtgggggactgtgtctctgttattccagatgattcctcaaaaccgctgtatctagcaagggtcacggcgctgtgggaggacagcagcaacgggcagatgtttcacgcccactggttctgcgctgggacagacacagtcctcggggccacgtcggaccctctggagctgttcttggtggatgaatgtgaggacatgcagctttcatatatccacagcaaagtgaaagtcatctacaaagccccctccgaaaactgggccatggagggaggcatggatcccgagtccctgctggagggggacgacgggaagacctacttctaccagctgtggtatgatcaagactacgcgagattcgagtcccctccaaaaacccagccaacagaggacaacaagttcaaattctgtgtgagctgtgcccgtctggctgagatgaggcaaaaagaaatccccagggtcctggagcagctcgaggacctggatagccgggtcctctactactcagccaccaagaacggcatcctgtaccgagttggtgatggtgtgtacctgccccctgaggccttcacgttcaacatcaagctgtccagtcccgtgaaacgcccacggaaggagcccgtggatgaggacctgtacccagagcactaccggaaatactccgactacatcaaaggcagcaacctggatgcccctgagccctaccgaattggccggatcaaagagatcttctgtcccaagaagagcaacggcaggcccaatgagactgacatcaaaatccgggtcaacaagttctacaggcctgagaacacccacaagtccactccagcgagctaccacgcagacatcaacctgctctactggagcgacgaggaggccgtggtggacttcaaggctgtgcagggccgctgcaccgtggagtatggggaggacctgcccgagtgcgtccaggtgtactccatgggcggccccaaccgcttctacttcctcgaggtggtgcccctgcttgctagagggaaggcttcggggtcaaagttggccagaaggagtctgatgtcgggttatacacaaggcggcttggctgcagggtttcagcttttgtaagaagtgggtggttggctgacgtgaagctgttctgcaggagctttacgggggtctgagcagggttctccagagcacaagttgtatgagattcaagtggtcccggagtttaacactcctggtttttaaaaagtacgtcattagagaacctaacgttttagtgtcttggtgcaactgaacgttgaggaccatgaggcagcttccaccagcctgactggtgtcttagtatgagttggagaaggtgcccctgctcctgggtcccttgggccaggcgcctacgtccaggcccagcccacatgcctgtgcgggtggccctcgttatggagagggcccacgagtcagctgatcaagctcatgacttgtaaattgttggggcttggcctttccgtgttgttaccttaaaacgatacatccacgttctcccaggcatggatgaggtagcccaattggacagcagattctgcatagcactttttcctgttctagaaggtactctcaagtgcttgtaataggcatttcagtgtcagccagatcaaatgttagtattaataaaatggattgttttaagtttctattgtagcaaagtcaaactactcttattggtggctaattggtcatggccccactgagggagaaattaagtgactatcaaattgccttcttactagtctgcgttagagaggggacagtgcgtttctctcccaaacgattgcagttctctccttttcaggccgcctataatgcaaagagcaaaagctttgaagatcctcccaaccatgcccgtagccctggaaacaaagggaagggcaagggaaaagggaagggcaagcccaagtcccaagcctgtgagccgagcgagccagagatagagatcaagctgcccaagctgcggaccctggatgtgttttctggctgcggggggttgtcggagggattccaccaagcaggcatctctgacacgctgtgggccatcgagatgtgggaccctgcggcccaggcgttccggctgaacaaccccggctccacagtgttcacagaggactgcaacatcctgctgaagctggtcatggctggggagaccaccaactcccgcggccagcggctgccccagaagggagacgtggagatgctgtgcggcgggccgccctgccagggcttcagcggcatgaaccgcttcaattcgcgcacctactccaagttcaaaaactctctggtggtttccttcctcagctactgcgactactaccggccccggttcttcctcctggagaatgtcaggaactttgtctccttcaagcgctccatggtcctgaagctcaccctccgctgcctggtccgcatgggctatcagtgcaccttcggcgtgctgcaggccggtcagtacggcgtggcccagactaggaggcgggccatcatcctggccgcggcccctggagagaagctccctctgttcccggagccactgcacgtgtttgctccccgggcctgccagctgagcgtggtggtggatgacaagaagtttgtgagcaacataaccaggttgagctcgggtcctttccggaccatcacggtgcgagacacgatgtccgacctgccggaggtgcggaatggagcctcggcactggagatctcctacaacggggagcctcagtcctggttccagaggcagctccggggcgcacagtaccagcccatcctcagggaccacatctgtaaggacatgagtgcattggtggctgcccgcatgcggcacatccccttggccccagggtcagactggcgcgatctgcccaacatcgaggtgcggctctcagacggcaccatggccaggaagctgcggtatacccaccatgacaggaagaacggccgcagcagctctggggccctccgtggggtctgctcctgcgtggaagccggcaaagcctgcgaccccgcagccaggcagttcaacaccctcatcccctggtgcctgccccacaccgggaaccggcacaaccactgggctggcctctatggaaggctcgagtgggacggcttcttcagcacaaccgtcaccaaccccgagcccatgggcaagcagggccgcgtgctccacccagagcagcaccgtgtggtgagcgtgcgggagtgtgcccgctcccagggcttccctgacacctaccggctcttcggcaacatcctggacaagcaccggcaggtgggcaatgccgtgccaccgcccctggccaaagccattggcttggagatcaagctttgtatgttggccaaagcccgagagagtgcctcagctaaaataaaggaggaggaagctgctaaggactagttctgccctcccgtcacccctgtttctggcaccaggaatccccaacatgcactgatgttgtgtttttaacatgtcaatctgtccgttcacatgtgtggtacatggtgtttgtggccttggctgacatgaagctgttgtgtgaggttcgcttatcaactaatgatttagtgatcaaattgtgcagtactttgtgcattctggattttaaaagttttttattatgcattatatcaaatctaccactgtatgagtggaaattaagactttatgtagtttttatatgttgtaatatttcttcaaataaatctctcctataaacca

SEQ ID NO: 376998 - DNA, 5547 bp, Homo sapiens
ggagaggcagcctgtcctctgaacctggggaggagcttgtgtcagcccttaggagctgttggccccggtgcagggccccccgagctgaccagcctgtgtcatatatatatatagtatattttgcagagatggggtctcagcatgttgcccaggctggcctcgaactcctggcatcaagcaatcctcctgccttagcttcccaaagtgctgggtttacaggcacatgccactgcacacagcctgtaaataaagttttattggaacagagccacactttctcatttacattttgcctgtgggtgcttttgtgctaccatagcagagatgatcatcctgacacagaccacgtggtcagcaaagctgaaaatactgatcctctggctcttacaaaaacagtttgccaagccctggtctaggaggttctttagtgccctcttgttagtttcaggtggggaattaagtgagggaaagtgaagcctcgtgtctacccggtagatctgcccaggcctgcctgtcttccagctccacagtgctgggatccctaacctgtaacttcagtgtttgcattttatctcactctggctcagaaactaattttttcccttctttatctctctacctcccccttatttttctgtcaggatgagaagaagcacagaagtcaacccaaagatctgtaagtgtttaaaatgcttgtgcttttgtgtcatctggatcagtagaaagcctgttctaggccaggtgtggtggcttgcacctgtaatcccagcactttgggaggctgaggtgggtgaatcacctgaggtcaggagttcgagaccagcctagcctggccaacatggtggaaccctgtctgtactaaaaatacaaaaattagctgggtgtggtggcgggtgcctataatcccagctactcggaaggctgaggcagaactgctagaagccaggaggtggaggttgcagtgagccaagattgcgccactgcactccagcctggacaagagtgaaactctgtctcaaaaaaaaaaaaaaaaaaaagcctgttctagaaacctgtggtgatgtagatgtgtggggaccctggggcctctgaaggcctcgtctcgggatgacaagctggcagtgtgcctatagagctcccatgggtatcttgctttcccatggggaggcattagtttgtcactttccgtgcgagttggcgatgtggttagtgtttctaagctgctacttgctgtgtatctgttcaccctgcagagctgccaaacggaggcccgaagaaaaagaacctgaaaaagtaaatccacagatttctgatgaaaaagacgaggatgaaaaggaggagaagagacgcaaaacgacccccaaagaaccaacggagaaaaaaatggctcgcgccaaaacagtcatgaactccaagacccaccctcccaagtgcattcagtgcgggcagtacctggacgaccctgacctcaaatatgggcagcacccaccagacgcggtggatgagccacagatgctgacaaatgagaagctgtccatctttgatgccaacgagtctggctttgagagttatgaggcgcttccccagcacaaactgacctgcttcagtgtgtactgtaagcacggtcacctgtgtcccatcgacaccggcctcatcgagaagaatatcgaactcttcttttctggttcagcaaaaccaatctatgatgatgacccgtctcttgaaggtggtgttaatggcaaaaatcttggccccataaatgaatggtggatcactggctttgatggaggtgaaaaggccctcatcggcttcagcacctcatttgccgaatacattctgatggatcccagtcccgagtatgcgcccatatttgggctgatgcaggagaagatctacatcagcaagattgtggtggagttcctgcagagcaattccgactcgacctatgaggacctgatcaacaagatcgagaccacggttcctccttctggcctcaacttgaaccgcttcacagaggactccctcctgcgacacgcgcagtttgtggtggagcaggtggagagttatgacgaggccggggacagtgatgagcagcccatcttcctgacgccctgcatgcgggacctgatcaagctggctggggtcacgctgggacagaggcgagcccaggcgaggcggcagaccatcaggcattctaccagggagaaggacaggggacccacgaaagccaccaccaccaagctggtctaccagatcttcgatactttcttcgcagagcaaattgaaaaggatgacagagaagacaaggagaacgcctttaagcgccggcgatgtggcgtctgtgaggtgtgtcagcagcctgagtgtgggaaatgtaaagcctgcaaggacatggttaaatttggtggcagtggacggagcaagcaggcttgccaagagcggaggtgtcccaatatggccatgaaggaggcagatgacgatgaggaagtcgatgataacatcccagagatgccgtcacccaaaaaaatgcaccaggggaagaagaagaaacagaacaagaatcgcatctcttgggtcggagaagccgtcaagactgatgggaagaagagttactataagaaggtgtgcattgatgcggaaaccctggaagtgggggactgtgtctctgttattccagatgattcctcaaaaccgctgtatctagcaagggtcacggcgctgtgggaggacagcagcaacgggcagatgtttcacgcccactggttctgcgctgggacagacacagtcctcggggccacgtcggaccctctggagctgttcttggtggatgaatgtgaggacatgcagctttcatatatccacagcaaagtgaaagtcatctacaaagccccctccgaaaactgggccatggagggaggcatggatcccgagtccctgctggagggggacgacgggaagacctacttctaccagctgtggtatgatcaagactacgcgagattcgagtcccctccaaaaacccagccaacagaggacaacaagttcaaattctgtgtgagctgtgcccgtctggctgagatgaggcaaaaagaaatccccagggtcctggagcagctcgaggacctggatagccgggtcctctactactcagccaccaagaacggcatcctgtaccgagttggtgatggtgtgtacctgccccctgaggccttcacgttcaacatcaagctgtccagtcccgtgaaacgcccacggaaggagcccgtggatgaggacctgtacccagagcactaccggaaatactccgactacatcaaaggcagcaacctggatgcccctgagccctaccgaattggccggatcaaagagatcttctgtcccaagaagagcaacggcaggcccaatgagactgacatcaaaatccgggtcaacaagttctacaggcctgagaacacccacaagtccactccagcgagctaccacgcagacatcaacctgctctactggagcgacgaggaggccgtggtggacttcaaggctgtgcagggccgctgcaccgtggagtatggggaggacctgcccgagtgcgtccaggtgtactccatgggcggccccaaccgcttctacttcctcgaggcctataatgcaaagagcaaaagctttgaagatcctcccaaccatgcccgtagccctggaaacaaagggaagggcaagggaaaagggaagggcaagcccaagtcccaagcctgtgagccgagcgagccagagatagagatcaagctgcccaagctgcggaccctggatgtgttttctggctgcggggggttgtcggagggattccaccaagcaggcatctctgacacgctgtgggccatcgagatgtgggaccctgcggcccaggcgttccggctgaacaaccccggctccacagtgttcacagaggactgcaacatcctgctgaagctggtcatggctggggagaccaccaactcccgcggccagcggctgccccagaagggagacgtggagatgctgtgcggcgggccgccctgccagggcttcagcggcatgaaccgcttcaattcgcgcacctactccaagttcaaaaactctctggtggtttccttcctcagctactgcgactactaccggccccggttcttcctcctggagaatgtcaggaactttgtctccttcaagcgctccatggtcctgaagctcaccctccgctgcctggtccgcatgggctatcagtgcaccttcggcgtgctgcaggccggtcagtacggcgtggcccagactaggaggcgggccatcatcctggccgcggcccctggagagaagctccctctgttcccggagccactgcacgtgtttgctccccgggcctgccagctgagcgtggtggtggatgacaagaagtttgtgagcaacataaccaggttgagctcgggtcctttccggaccatcacggtgcgagacacgatgtccgacctgccggaggtgcggaatggagcctcggcactggagatctcctacaacggggagcctcagtcctggttccagaggcagctccggggcgcacagtaccagcccatcctcagggaccacatctgtaaggacatgagtgcattggtggctgcccgcatgcggcacatccccttggccccagggtcagactggcgcgatctgcccaacatcgaggtgcggctctcagacggcaccatggccaggaagctgcggtatacccaccatgacaggaagaacggccgcagcagctctggggccctccgtggggtctgctcctgcgtggaagccggcaaagcctgcgaccccgcagccaggcagttcaacaccctcatcccctggtgcctgccccacaccgggaaccggcacaaccactgggctggcctctatggaaggctcgagtgggacggcttcttcagcacaaccgtcaccaaccccgagcccatgggcaagcagggccgcgtgctccacccagagcagcaccgtgtggtgagcgtgcgggagtgtgcccgctcccagggcttccctgacacctaccggctcttcggcaacatcctggacaagcaccggcaggtgggcaatgccgtgccaccgcccctggccaaagccattggcttggagatcaagctttgtatgttggccaaagcccgagagagtgcctcagctaaaataaaggaggaggaagctgctaaggactagttctgccctcccgtcacccctgtttctggcaccaggaatccccaacatgcactgatgttgtgtttttaacatgtcaatctgtccgttcacatgtgtggtacatggtgtttgtggccttggctgacatgaagctgttgtgtgaggttcgcttatcaactaatgatttagtgatcaaattgtgcagtactttgtgcattctggattttaaaagttttttattatgcattatatcaaatctaccactgtatgagtggaaattaagactttatgtagtttttatatgttgtaatatttcttcaaataaatctctcctataaacca

SEQ ID NO: 376999 - DNA, 5752 bp, Homo sapiens
cgtccgcgtggggggggtgtgtgcccgccttgcgcatgcgtgttccctgggcatggccggctccgttccatccttctgcacagggtatcgcctctctccgtttggtacatcccctcctcccccacgcccggactggggtggtagacgcgcctccgctcatcgcccctccccatcggtttccgcgcgaaaagccggggcgcctgcgctgccgccgccgcgtctgctgaagcctccgagatgccggcgcgtaccgccccagcccgggtgcccacactggccgtcccggccatctcgctgcccgacgatgtccgcaggcggctcaaagatttggaaagagacagcttaacagaaaaggaatgtgtgaaggagaaattgaatctcttgcacgaatttctgcaaacagaaataaagaatcagttatgtgacttggaaaccaaattacgtaaagaagaattatccgaggagggctacctggctaaagtcaaatcccttttaaataaagatttgtccttggagaacggtgctcatgcttacaaccgggaagtgaatggacgtctagaaaacgggaaccaagcaagaagtgaagcccgtagagtgggaatggcagatgccaacagcccccccaaacccctttccaaacctcgcacgcccaggaggagcaagtccgatggagaggctaagcctgaaccttcacctagccccaggattacaaggaaaagcaccaggcaaaccaccatcacatctcattttgcaaagggccctgccaaacggaaacctcaggaagagtctgaaagagccaaatcggatgagtccatcaaggaagaagacaaagaccaggatgagaagagacgtagagttacatccagagaacgagttgctagaccgcttcctgcagaagaacctgaaagagcaaaatcaggaacgcgcactgaaaaggaagaagaaagagatgaaaaagaagaaaagagactccgaagtcaaaccaaagaaccaacacccaaacagaaactgaaggaggagccggacagagaagccagggcaggcgtgcaggctgacgaggacgaagatggagacgagaaagatgagaagaagcacagaagtcaacccaaagatctagctgccaaacggaggcccgaagaaaaagaacctgaaaaagtaaatccacagatttctgatgaaaaagacgaggatgaaaaggaggagaagagacgcaaaacgacccccaaagaaccaacggagaaaaaaatggctcgcgccaaaacagtcatgaactccaagacccaccctcccaagtgcattcagtgcgggcagtacctggacgaccctgacctcaaatatgggcagcacccaccagacgcggtggatgagccacagatgctgacaaatgagaagctgtccatctttgatgccaacgagtctggctttgagagttatgaggcgcttccccagcacaaactgacctgcttcagtgtgtactgtaagcacggtcacctgtgtcccatcgacaccggcctcatcgagaagaatatcgaactcttcttttctggttcagcaaaaccaatctatgatgatgacccgtctcttgaaggtggtgttaatggcaaaaatcttggccccataaatgaatggtggatcactggctttgatggaggtgaaaaggccctcatcggcttcagcacctcatttgccgaatacattctgatggatcccagtcccgagtatgcgcccatatttgggctgatgcaggagaagatctacatcagcaagattgtggtggagttcctgcagagcaattccgactcgacctatgaggacctgatcaacaagatcgagaccacggttcctccttctggcctcaacttgaaccgcttcacagaggactccctcctgcgacacgcgcagtttgtggtggagcaggtggagagttatgacgaggccggggacagtgatgagcagcccatcttcctgacgccctgcatgcgggacctgatcaagctggctggggtcacgctgggacagaggcgagcccaggcgaggcggcagaccatcaggcattctaccagggagaaggacaggggacccacgaaagccaccaccaccaagctggtctaccagatcttcgatactttcttcgcagagcaaattgaaaaggatgacagagaagacaaggagaacgcctttaagcgccggcgatgtggcgtctgtgaggtgtgtcagcagcctgagtgtgggaaatgtaaagcctgcaaggacatggttaaatttggtggcagtggacggagcaagcaggcttgccaagagcggaggtgtcccaatatggccatgaaggaggcagatgacgatgaggaagtcgatgataacatcccagagatgccgtcacccaaaaaaatgcaccaggggaagaagaagaaacagaacaagaatcgcatctcttgggtcggagaagccgtcaagactgatgggaagaagagttactataagaaggtgtgcattgatgcggaaaccctggaagtgggggactgtgtctctgttattccagatgattcctcaaaaccgctgtatctagcaagggtcacggcgctgtgggaggacagcagcaacgggcagatgtttcacgcccactggttctgcgctgggacagacacagtcctcggggccacgtcggaccctctggagctgttcttggtggatgaatgtgaggacatgcagctttcatatatccacagcaaagtgaaagtcatctacaaagccccctccgaaaactgggccatggagggaggcatggatcccgagtccctgctggagggggacgacgggaagacctacttctaccagctgtggtatgatcaagactacgcgagattcgagtcccctccaaaaacccagccaacagaggacaacaagttcaaattctgtgtgagctgtgcccgtctggctgagatgaggcaaaaagaaatccccagggtcctggagcagctcgaggacctggatagccgggtcctctactactcagccaccaagaacggcatcctgtaccgagttggtgatggtgtgtacctgccccctgaggccttcacgttcaacatcaagctgtccagtcccgtgaaacgcccacggaaggagcccgtggatgaggacctgtacccagagcactaccggaaatactccgactacatcaaaggcagcaacctggatgcccctgagccctaccgaattggccggatcaaagagatcttctgtcccaagaagagcaacggcaggcccaatgagactgacatcaaaatccgggtcaacaagttctacaggcctgagaacacccacaagtccactccagcgagctaccacgcagacatcaacctgctctactggagcgacgaggaggccgtggtggacttcaaggctgtgcagggccgctgcaccgtggagtatggggaggacctgcccgagtgcgtccaggtgtactccatgggcggccccaaccgcttctacttcctcgaggcctataatgcaaagagcaaaagctttgaagatcctcccaaccatgcccgtagccctggaaacaaagggaagggcaagggaaaagggaagggcaagcccaagtcccaagcctgtgagccgagcgagccagagatagagatcaagctgcccaagctgcggaccctggatgtgttttctggctgcggggggttgtcggagggattccaccaagcaggcatctctgacacgctgtgggccatcgagatgtgggaccctgcggcccaggcgttccggctgaacaaccccggctccacagtgttcacagaggactgcaacatcctgctgaagctggtcatggctggggagaccaccaactcccgcggccagcggctgccccagaagggagacgtggagatgctgtgcggcgggccgccctgccagggcttcagcggcatgaaccgcttcaattcgcgcacctactccaagttcaaaaactctctggtggtttccttcctcagctactgcgactactaccggccccggttcttcctcctggagaatgtcaggaactttgtctccttcaagcgctccatggtcctgaagctcaccctccgctgcctggtccgcatgggctatcagtgcaccttcggcgtgctgcaggccggtcagtacggcgtggcccagactaggaggcgggccatcatcctggccgcggcccctggagagaagctccctctgttcccggagccactgcacgtgtttgctccccgggcctgccagctgagcgtggtggtggatgacaagaagtttgtgagcaacataaccaggttgagctcgggtcctttccggaccatcacggtgcgagacacgatgtccgacctgccggaggtgcggaatggagcctcggcactggagatctcctacaacggggagcctcagtcctggttccagaggcagctccggggcgcacagtaccagcccatcctcagggaccacatctgtaaggacatgagtgcattggtggctgcccgcatgcggcacatccccttggccccagggtcagactggcgcgatctgcccaacatcgaggtgcggctctcagacggcaccatggccaggaagctgcggtatacccaccatgacaggaagaacggccgcagcagctctggggccctccgtggggtctgctcctgcgtggaagccggcaaagcctgcgaccccgcagccaggcagttcaacaccctcatcccctggtgcctgccccacaccgggaaccggcacaaccactgggctggcctctatggaaggctcgagtgggacggcttcttcagcacaaccgtcaccaaccccgagcccatgggcaagcagggccgcgtgctccacccagagcagcaccgtgtggtgagcgtgcgggagtgtgcccgctcccagggcttccctgacacctaccggctcttcggcaacatcctggacaagcaccggcaggtgggcaatgccgtgccaccgcccctggccaaagccattggcttggagatcaagctttgtatgttggccaaagcccgagagagtgcctcagctaaaataaaggaggaggaagctgctaaggactagttctgccctcccgtcacccctgtttctggcaccaggaatccccaacatgcactgatgttgtgtttttaacatgtcaatctgtccgttcacatgtgtggtacatggtgtttgtggccttggctgacatgaagctgttgtgtgaggttcgcttatcaactaatgatttagtgatcaaattgtgcagtactttgtgcattctggattttaaaagttttttattatgcattatatcaaatctaccactgtatgagtggaaattaagactttatgtagtttttatatgttgtaatatttcttcaaataaatctctcctataaaccaccctgggtgggtattcgtgatttgcacgggacttctggctgaggtcagacaggaacaagctcttccatgctgaaggcgacccacgtggagtttgaagctagcacgtttgaagctagacactccgtgtgtctgtctgtgtttgttcagaactgagtcacgtgagttgatccccatgacatgcaaatggaacttgctagtgtagcttccaggaaagccttttaaaggaagtcttggctggccttccccgtggctggtaggccttctttggtctgaagtgggttgtgatgcctggcagtggagcagccatcctgtgaccatgaggcagagctctgtgctgcaactg

SEQ ID NO: 377000 - DNA, 5504 bp, Homo sapiens
cgtccgcgtggggggggtgtgtgcccgccttgcgcatgcgtgttccctgggcatggccggctccgttccatccttctgcacagggtatcgcctctctccgtttggtacatcccctcctcccccacgcccggactggggtggtagacgcgcctccgctcatcgcccctccccatcggtttccgcgcgaaaagccggggcgcctgcgctgccgccgccgcgtctgctgaagcctccgagatgccggcgcgtaccgccccagcccgggtgcccacactggccgtcccggccatctcgctgcccgacgatgtccgcaggcggctcaaagatttggaaagagacagcttaacagaaaaggaatgtgtgaaggagaaattgaatctcttgcacgaatttctgcaaacagaaataaagaatcagttatgtgacttggaaaccaaattacgtaaagaagaattatccgaggagggctacctggctaaagtcaaatcccttttaaataaagatttgtccttggagaacggtgctcatgcttacaaccgggaagtgaatggacgtctagaaaacgggaaccaagcaagaagtgaagcccgtagagtgggaatggcagatgccaacagcccccccaaacccctttccaaacctcgcacgcccaggaggagcaagtccgatggagaggctaagcctgaaccttcacctagccccaggattacaaggaaaagcaccaggcaaaccaccatcacatctcattttgcaaagggccctgccaaacggaaacctcaggaagagtctgaaagagccaaatcggatgagtccatcaaggaagaagacaaagaccaggatgagaagagacgtagagttacatccagagaacgagttgctagaccgcttcctgcagaagaacctgaaagagcaaaatcaggaacgcgcactgaaaaggaagaagaaagagatgaaaaagaagaaaagagactccgaagtcaaaccaaagaaccaacacccaaacagaaactgaaggaggagccggacagagaagccagggcaggcgtgcaggctgacgaggacgaagatggagacgagaaagatgagaagaagcacagaagtcaacccaaagatctagctgccaaacggaggcccgaagaaaaagaacctgaaaaagtaaatccacagatttctgatgaaaaagacgaggatgaaaaggaggagaagagacgcaaaacgacccccaaagaaccaacggagaaaaaaatggctcgcgccaaaacagtcatgaactccaagacccaccctcccaagtgcattcagtgcgggcagtacctggacgaccctgacctcaaatatgggcagcacccaccagacgcggtggatgagccacagatgctgacaaatgagaagctgtccatctttgatgccaacgagtctggctttgagagttatgaggcgcttccccagcacaaactgacctgcttcagtgtgtactgtaagcacggtcacctgtgtcccatcgacaccggcctcatcgagaagaatatcgaactcttcttttctggttcagcaaaaccaatctatgatgatgacccgtctcttgaaggtggtgttaatggcaaaaatcttggccccataaatgaatggtggatcactggctttgatggaggtgaaaaggccctcatcggcttcagcacctcatttgccgaatacattctgatggatcccagtcccgagtatgcgcccatatttgggctgatgcaggagaagatctacatcagcaagattgtggtggagttcctgcagagcaattccgactcgacctatgaggacctgatcaacaagatcgagaccacggttcctccttctggcctcaacttgaaccgcttcacagaggactccctcctgcgacacgcgcagtttgtggtggagcaggtggagagttatgacgaggccggggacagtgatgagcagcccatcttcctgacgccctgcatgcgggacctgatcaagctggctggggtcacgctgggacagaggcgagcccaggcgaggcggcagaccatcaggcattctaccagggagaaggacaggggacccacgaaagccaccaccaccaagctggtctaccagatcttcgatactttcttcgcagagcaaattgaaaaggatgacagagaagacaaggagaacgcctttaagcgccggcgatgtggcgtctgtgaggtgtgtcagcagcctgagtgtgggaaatgtaaagcctgcaaggacatggttaaatttggtggcagtggacggagcaagcaggcttgccaagagcggaggtgtcccaatatggccatgaaggaggcagatgacgatgaggaagtcgatgataacatcccagagatgccgtcacccaaaaaaatgcaccaggggaagaagaagaaacagaacaagaatcgcatctcttgggtcggagaagccgtcaagactgatgggaagaagagttactataagaaggtgtgcattgatgcggaaaccctggaagtgggggactgtgtctctgttattccagatgattcctcaaaaccgctgtatctagcaagggtcacggcgctgtgggaggacagcagcaacgggcagatgtttcacgcccactggttctgcgctgggacagacacagtcctcggggccacgtcggaccctctggagctgttcttggtggatgaatgtgaggacatgcagctttcatatatccacagcaaagtgaaagtcatctacaaagccccctccgaaaactgggccatggagggaggcatggatcccgagtccctgctggagggggacgacgggaagacctacttctaccagctgtggtatgatcaagactacgcgagattcgagtcccctccaaaaacccagccaacagaggacaacaagttcaaattctgtgtgagctgtgcccgtctggctgagatgaggcaaaaagaaatccccagggtcctggagcagctcgaggacctggatagccgggtcctctactactcagccaccaagaacggcatcctgtaccgagttggtgatggtgtgtacctgccccctgaggccttcacgttcaacatcaagctgtccagtcccgtgaaacgcccacggaaggagcccgtggatgaggacctgtacccagagcactaccggaaatactccgactacatcaaaggcagcaacctggatgcccctgagccctaccgaattggccggatcaaagagatcttctgtcccaagaagagcaacggcaggcccaatgagactgacatcaaaatccgggtcaacaagttctacaggcctgagaacacccacaagtccactccagcgagctaccacgcagacatcaacctgctctactggagcgacgaggaggccgtggtggacttcaaggctgtgcagggccgctgcaccgtggagtatggggaggacctgcccgagtgcgtccaggtgtactccatgggcggccccaaccgcttctacttcctcgaggcctataatgcaaagagcaaaagctttgaagatcctcccaaccatgcccgtagccctggaaacaaagggaagggcaagggaaaagggaagggcaagcccaagtcccaagcctgtgagccgagcgagccagagatagagatcaagctgcccaagctgcggaccctggatgtgttttctggctgcggggggttgtcggagggattccaccaagcaggcatctctgacacgctgtgggccatcgagatgtgggaccctgcggcccaggcgttccggctgaacaaccccggctccacagtgttcacagaggactgcaacatcctgctgaagctggtcatggctggggagaccaccaactcccgcggccagcggctgccccagaagggagacgtggagatgctgtgcggcgggccgccctgccagggcttcagcggcatgaaccgcttcaattcgcgcacctactccaagttcaaaaactctctggtggtttccttcctcagctactgcgactactaccggccccggttcttcctcctggagaatgtcaggaactttgtctccttcaagcgctccatggtcctgaagctcaccctccgctgcctggtccgcatgggctatcagtgcaccttcggcgtgctgcaggccggtcagtacggcgtggcccagactaggaggcgggccatcatcctggccgcggcccctggagagaagctccctctgttcccggagccactgcacgtgtttgctccccgggcctgccagctgagcgtggtggtggatgacaagaagtttgtgagcaacataaccaggttgagctcgggtcctttccggaccatcacggtgcgagacacgatgtccgacctgccggaggtgcggaatggagcctcggcactggagatctcctacaacggggagcctcagtcctggttccagaggcagctccggggcgcacagtaccagcccatcctcagggaccacatctgtaaggacatgagtgcattggtggctgcccgcatgcggcacatccccttggccccagggtcagactggcgcgatctgcccaacatcgaggtgcggctctcagacggcaccatggccaggaagctgcggtatacccaccatgacaggaagaacggccgcagcagctctggggccctccgtggggtctgctcctgcgtggaagccggcaaagcctgcgaccccgcagccaggcagttcaacaccctcatcccctggtgcctgccccacaccgggaaccggcacaaccactgggctggcctctatggaaggctcgagtgggacggcttcttcagcacaaccgtcaccaaccccgagcccatgggcaagcagggccgcgtgctccacccagagcagcaccgtgtggtgagcgtgcgggagtgtgcccgctcccagggcttccctgacacctaccggctcttcggcaacatcctggacaagcaccggcaggtgggcaatgccgtgccaccgcccctggccaaagccattggcttggagatcaagctttgtatgttggccaaagcccgagagagtgcctcagctaaaataaaggaggaggaagctgctaaggactagttctgccctcccgtcacccctgtttctggcaccaggaatccccaacatgcactgatgttgtgtttttaacatgtcaatctgtccgttcacatgtgtggtacatggtgtttgtggccttggctgacatgaagctgttgtgtgaggttcgcttatcaactaatgatttagtgatcaaattgtgcagtactttgtgcattctggattttaaaagttttttatgcttttgaatctccctgttgggtggactaaacttatgcgttaaatgggatatttttcaataatttctgtaacaaaaaaaaaagggggggtaaaatccgggcagagtaccgtttgaagggcaagggagaaaaaaagggcgaaaggggaagctggtgggacttggggaggcccaagtcgaaagatggtggtgggaacac

SEQ ID NO: 377001 - DNA, 5036 bp, Homo sapiens
  misc_feature (4856)..(4856): n is a, c, g, or t
  misc_feature (4899)..(4899): n is a, c, g, or t
  misc_feature (4903)..(4903): n is a, c, g, or t
  misc_feature (4963)..(4964): n is a, c, g, or t
  misc_feature (5026)..(5026): n is a, c, g, or t
  misc_feature (5029)..(5029): n is a, c, g, or t
cgtccgcgtggggggggtgtgtgcccgccttgcgcatgcgtgttccctgggcatggccggctccgttccatccttctgcacagggtatcgcctctctccgtttggtacatcccctcctcccccacgcccggactggggtggtagacgcgcctccgctcatcgcccctccccatcggtttccgcgcgaaaagccggggcgcctgcgctgccgccgccgcgtctgctgaagcctccgagatgccggcgcgtaccgccccagcccgggtgcccacactggccgtcccggccatctcgctgcccgacgatgtccgcaggcggctcaaagatttggaaagagacagcttaacagaaaaggaatgtgtgaaggagaaattgaatctcttgcacgaatttctgcaaacagaaataaagaatcagttatgtgacttggaaaccaaattacgtaaagaagaattatccgaggagggctacctggctaaagtcaaatcccttttaaataaagatttgtccttggagaacggtgctcatgcttacaaccgggaagtgaatggacgtctagaaaacgggaaccaagcaagaagtgaagcccgtagagtgggaatggcagatgccaacagcccccccaaacccctttccaaacctcgcacgcccaggaggagcaagtccgatggagaggctaagcctgaaccttcacctagccccaggattacaaggaaaagcaccaggcaaaccaccatcacatctcattttgcaaagggccctgccaaacggaaacctcaggaagagtctgaaagagccaaatcggatgagtccatcaaggaagaagacaaagaccaggatgagaagagacgtagagttacatccagagaacgagttgctagaccgcttcctgcagaagaacctgaaagagcaaaatcaggaacgcgcactgaaaaggaagaagaaagagatgaaaaagaagaaaagagactccgaagtcaaaccaaagaaccaacacccaaacagaaactgaaggaggagccggacagagaagccagggcaggcgtgcaggctgacgaggacgaagatggagacgagaaagatgagaagaagcacagaagtcaacccaaagatctagctgccaaacggaggcccgaagaaaaagaacctgaaaaagtaaatccacagatttctgatgaaaaagacgaggatgaaaaggaggagaagagacgcaaaacgacccccaaagaaccaacggagaaaaaaatggctcgcgccaaaacagtcatgaactccaagacccaccctcccaagtgcattcagtgcgggcagtacctggacgaccctgacctcaaatatgggcagcacccaccagacgcggtggatgagccacagatgctgacaaatgagaagctgtccatctttgatgccaacgagtctggctttgagagttatgaggcgcttccccagcacaaactgacctgcttcagtgtgtactgtaagcacggtcacctgtgtcccatcgacaccggcctcatcgagaagaatatcgaactcttcttttctggttcagcaaaaccaatctatgatgatgacccgtctcttgaaggtggtgttaatggcaaaaatcttggccccataaatgaatggtggatcactggctttgatggaggtgaaaaggccctcatcggcttcagcacctcatttgccgaatacattctgatggatcccagtcccgagtatgcgcccatatttgggctgatgcaggagaagatctacatcagcaagattgtggtggagttcctgcagagcaattccgactcgacctatgaggacctgatcaacaagatcgagaccacggttcctccttctggcctcaacttgaaccgcttcacagaggactccctcctgcgacacgcgcagtttgtggtggagcaggtggagagttatgacgaggccggggacagtgatgagcagcccatcttcctgacgccctgcatgcgggacctgatcaagctggctggggtcacgctgggacagaggcgagcccaggcgaggcggcagaccatcaggcattctaccagggagaaggacaggggacccacgaaagccaccaccaccaagctggtctaccagatcttcgatactttcttcgcagagcaaattgaaaaggatgacagagaagacaaggagaacgcctttaagcgccggcgatgtggcgtctgtgaggtgtgtcagcagcctgagtgtgggaaatgtaaagcctgcaaggacatggttaaatttggtggcagtggacggagcaagcaggcttgccaagagcggaggtgtcccaatatggccatgaaggaggcagatgacgatgaggaagtcgatgataacatcccagagatgccgtcacccaaaaaaatgcaccaggggaagaagaagaaacagaacaagaatcgcatctcttgggtcggagaagccgtcaagactgatgggaagaagagttactataagaaggtgtgcattgatgcggaaaccctggaagtgggggactgtgtctctgttattccagatgattcctcaaaaccgctgtatctagcaagggtcacggcgctgtgggaggacagcagcaacgggcagatgtttcacgcccactggttctgcgctgggacagacacagtcctcggggccacgtcggaccctctggagctgttcttggtggatgaatgtgaggacatgcagctttcatatatccacagcaaagtgaaagtcatctacaaagccccctccgaaaactgggccatggagggaggcatggatcccgagtccctgctggagggggacgacgggaagacctacttctaccagctgtggtatgatcaagactacgcgagattcgagtcccctccaaaaacccagccaacagaggacaacaagttcaaattctgtgtgagctgtgcccgtctggctgagatgaggcaaaaagaaatccccagggtcctggagcagctcgaggacctggatagccgggtcctctactactcagccaccaagaacggcatcctgtaccgagttggtgatggtgtgtacctgccccctgaggccttcacgttcaacatcaagctgtccagtcccgtgaaacgcccacggaaggagcccgtggatgaggacctgtacccagagcactaccggaaatactccgactacatcaaaggcagcaacctggatgcccctgagccctaccgaattggccggatcaaagagatcttctgtcccaagaagagcaacggcaggcccaatgagactgacatcaaaatccgggtcaacaagttctacaggcctgagaacacccacaagtccactccagcgagctaccacgcagacatcaacctgctctactggagcgacgaggaggccgtggtggacttcaaggctgtgcagggccgctgcaccgtggagtatggggaggacctgcccgagtgcgtccaggtgtactccatgggcggccccaaccgcttctacttcctcgaggcctataatgcaaagagcaaaagctttgaagatcctcccaaccatgcccgtagccctggaaacaaagggaagggcaagggaaaagggaagggcaagcccaagtcccaagcctgtgagccgagcgagccagagatagagatcaagctgcccaagctgcggaccctggatgtgttttctggctgcggggggttgtcggagggattccaccaagcaggcatctctgacacgctgtgggccatcgagatgtgggaccctgcggcccaggcgttccggctgaacaaccccggctccacagtgttcacagaggactgcaacatcctgctgaagctggtcatggctggggagaccaccaactcccgcggccagcggctgccccagaagggagacgtggagatgctgtgcggcgggccgccctgccagggcttcagcggcatgaaccgcttcaattcgcgcacctactccaagttcaaaaactctctggtggtttccttcctcagctactgcgactactaccggccccggttcttcctcctggagaatgtcaggaactttgtctccttcaagcgctccatggtcctgaagctcaccctccgctgcctggtccgcatgggctatcagtgcaccttcggcgtgctgcaggccggtcagtacggcgtggcccagactaggaggcgggccatcatcctggccgcggcccctggagagaagctccctctgttcccggagccactgcacgtgtttgctccccgggcctgccagctgagcgtggtggtggatgacaagaagtttgtgagcaacataaccaggttgagctcgggtcctttccggaccatcacggtgcgagacacgatgtccgacctgccggaggtgcggaatggagcctcggcactggagatctcctacaacggggagcctcagtcctggttccagaggcagctccggggcgcacagtaccagcccatcctcagggaccacatctgtaaggacatgagtgcattggtggctgcccgcatgcggcacatccccttggccccagggtcagactggcgcgatctgcccaacatcgaggtgcggctctcagacggcaccatggccaggaagctgcggtatacccaccatgacaggaagaacggccgcagcagctctggggccctccgtggggtctgctcctgcgtggaagccggcaaagcctgcgaccccgcagccaggcagttcaacaccctcatcccctggtgcctgccccacaccgggaaccggcacaaccactgggctggcctctatggaaggctcgagtgggacggcttcttcagcacaaccgtcaccaaccccgagcccatgggcaagcagggccggtgctncaacccagaggcagaccgttttgtgaagcgttcgggagttttnccgnttccaggggtttcctgacaactaacgggtttttgggaaaaattcttgggcaaagaaccgnnaagttggggcaaattgccgttttcaaccggtctcttgggccaaaaggcattttggtttttgnggntttaaag

SEQ ID NO: 377002 - DNA, 1497 bp, Homo sapiens
  misc_feature (20)..(20): n is a, c, g, or t
  misc_feature (56)..(56): n is a, c, g, or t
cgggtcggacccaaacctanggctaggtacgaggcctgggtggttgcaaggttcanaaactctctggtggtttccttcctcagctactgcgactactaccggccccggttcttcctcctggagaatgtcaggaactttgtctccttcaagcgctccatggtcctgaagctcaccctccgctgcctggtccgcatgggctatcagtgcaccttcggcgtgctgcaggccggtcagtacggcgtggcccagactaggaggcgggccatcatcctggccgcggcccctggagagaagctccctctgttcccggagccactgcacgtgtttgctccccgggcctgccagctgagcgtggtggtggatgacaagaagtttgtgagcaacataaccaggttgagctcgggtcctttccggaccatcacggtgcgagacacgatgtccgacctgccggaggtgcggaatggagcctcggcactggagatctcctacaacggggagcctcagtcctggttccagaggcagctccggggcgcacagtaccagcccatcctcagggaccacatctgtaaggacatgagtgcattggtggctgcccgcatgcggcacatccccttggccccagggtcagactggcgcgatctgcccaacatcgaggtgcggctctcagacggcaccatggccaggaagctgcggtatacccaccatgacaggaagaacggccgcagcagctctggggccctccgtggggtctgctcctgcgtggaagccggcaaagcctgcgaccccgcagccaggcagttcaacaccctcatcccctggtgcctgccccacaccgggaaccggcacaaccactgggctggcctctatggaaggctcgagtgggacggcttcttcagcacaaccgtcaccaaccccgagcccatgggcaagcagggccgcgtgctccacccagagcagcaccgtgtggtgagcgtgcgggagtgtgcccgctcccagggcttccctgacacctaccggctcttcggcaacatcctggacaagcaccggcaggtgggcaatgccgtgccaccgcccctggccaaagccattggcttggagatcaagctttgtatgttggccaaagcccgagagagtgcctcagctaaaataaaggaggaggaagctgctaaggactagttctgccctcccgtcacccctgtttctggcaccaggaatccccaacatgcactgatgttgtgtttttaacatgtcaatctgtccgttcacatgtgtggtacatggtgtttgtggccttggctgacatgaagctgttgtgtgaggttcgcttatcaactaatgatttagtgatcaaattgtgcagtactttgtgcattctggattttaaaagttttttattatgcattatatcaaatctaccactgtatgagtggaaattaagactttatgtagtttttatatgttgtaatatttcttcaaataaatctctcctataaacca

SEQ ID NO: 377003 - DNA, 996 bp, Homo sapiens
  misc_feature (141)..(141): n is a, c, g, or t
taggagagattaatttgaagaaatattacaacaatataaaaactacataaagtcttaatttccactcatacagtggtagatttgatataaatgcaataataaaaaacttttaaaatccagaaatgcacaaagtactgcacnatttgatcactaaatcattagttgataagcgaacctcacacaacagcttcatgtcagccaaggccacaaacaccatgtacccccacgcgtccgcccacgcgtccggtctgctcctgcgtggaagccggcaaagcctgcgaccccgcagccaggcagttcaacaccctcatcccctggtgcctgccccacaccgggaaccggcacaaccactgggctggcctctatggaaggctcgagtgggacggcttcttcagcacaaccgtcaccaaccccgagcccatgggcaagcagggccgcgtgctccacccagagcagcaccgtgtggtgagcgtgcgggagtgtgcccgctcccagggcttccctgacacctaccggctcttcggcaacatcctggacaagcaccggcaggtgggcaatgccgtgccaccgcccctggccaaagccattggcttggagatcaagctttgtatgttggccaaagcccgagagagtgcctcagctaaaataaaggaggaggaagctgctaaggactagttctgccctcccgtcacccctgtttctggcaccaggaatccccaacatgcactgatgttgtgtttttaacatgtcaatctgtccgttcacatgtgtggtacatggtgtttgtggccttggctgacatgaagctgttgtgtgaggttcgcttatcaactaatgatttagtgatcaaattgtgcagtactttgtgcattctggattttaaaagttttttattatgcattatatcaaatctaccactgtatgagtggaaattaagactttatgtagtttttatatgttgtaatatttcttcaaataaatctctcctataaacca

SEQ ID NO: 377004 - DNA, 3163 bp, Homo sapiens
  misc_feature (3086)..(3086): n is a, c, g, or t
cgtccgcgtggggggggtgtgtgcccgccttgcgcatgcgtgttccctgggcatggccggctccgttccatccttctgcacagggtatcgcctctctccgtttggtacatcccctcctcccccacgcccggactggggtggtagacgcgcctccgctcatcgcccctccccatcggtttccgcgcgaaaagccggggcgcctgcgctgccgccgccgcgtctgctgaagcctccgagatgccggcgcgtaccgccccagcccgggtgcccacactggccgtcccggccatctcgctgcccgacgatgtccgcaggcggctcaaagatttggaaagagacagcttaacagaaaaggaatgtgtgaaggagaaattgaatctcttgcacgaatttctgcaaacagaaataaagaatcagttatgtgacttggaaaccaaattacgtaaagaagaattatccgaggagggctacctggctaaagtcaaatcccttttaaataaagatttgtccttggagaacggtgctcatgcttacaaccgggaagtgaatggacgtctagaaaacgggaaccaagcaagaagtgaagcccgtagagtgggaatggcagatgccaacagcccccccaaacccctttccaaacctcgcacgcccaggaggagcaagtccgatggagaggctaagcctgaaccttcacctagccccaggattacaaggaaaagcaccaggcaaaccaccatcacatctcattttgcaaagggccctgccaaacggaaacctcaggaagagtctgaaagagccaaatcggatgagtccatcaaggaagaagacaaagaccaggatgagaagagacgtagagttacatccagagaacgagttgctagaccgcttcctgcagaagaacctgaaagagcaaaatcaggaacgcgcactgaaaaggaagaagaaagagatgaaaaagaagaaaagagactccgaagtcaaaccaaagaaccaacacccaaacagaaactgaaggaggagccggacagagaagccagggcaggcgtgcaggctgacgaggacgaagatggagacgagaaagatgagaagaagcacagaagtcaacccaaagatctagctgccaaacggaggcccgaagaaaaagaacctgaaaaagtaaatccacagatttctgatgaaaaagacgaggatgaaaaggaggagaagagacgcaaaacgacccccaaagaaccaacggagaaaaaaatggctcgcgccaaaacagtcatgaactccaagacccaccctcccaagtgcattcagtgcgggcagtacctggacgaccctgacctcaaatatgggcagcacccaccagacgcggtggatgagccacagatgctgacaaatgagaagctgtccatctttgatgccaacgagtctggctttgagagttatgaggcgcttccccagcacaaactgacctgcttcagtgtgtactgtaagcacggtcacctgtgtcccatcgacaccggcctcatcgagaagaatatcgaactcttcttttctggttcagcaaaaccaatctatgatgatgacccgtctcttgaaggtggtgttaatggcaaaaatcttggccccataaatgaatggtggatcactggctttgatggaggtgaaaaggccctcatcggcttcagcacctcatttgccgaatacattctgatggatcccagtcccgagtatgcgcccatatttgggctgatgcaggagaagatctacatcagcaagattgtggtggagttcctgcagagcaattccgactcgacctatgaggacctgatcaacaagatcgagaccacggttcctccttctggcctcaacttgaaccgcttcacagaggactccctcctgcgacacgcgcagtttgtggtggagcaggtggagagttatgacgaggccggggacagtgatgagcagcccatcttcctgacgccctgcatgcgggacctgatcaagctggctggggtcacgctgggacagaggcgagcccaggcgaggcggcagaccatcaggcattctaccagggagaaggacaggggacccacgaaagccaccaccaccaagctggtctaccagatcttcgatactttcttcgcagagcaaattgaaaaggatgacagagaagacaaggagaacgcctttaagcgccggcgatgtggcgtctgtgaggtgtgtcagcagcctgagtgtgggaaatgtaaagcctgcaaggacatggttaaatttggtggcagtggacggagcaagcaggcttgccaagagcggaggtgtcccaatatggccacatcactcgagacgtaaattatggctgaatcatccgctaccttcacgccaatggcgcctcaatattctttatctgcctcttcctacacatcgggcgaggcctatattacggatcatttctctactcagaaacctgaaacatcggcattatcctcctgcttgcaactatagcaacagccttcataggctatgtcctcccatgaggccaaatatcattctgaggggccacagtaattacaaacttactatccgccatcccatacattgggacagacctagttcaatgaatctgaggaggctactcagtagacagtcccaccctcacacgattctttacctttcacttcatcttgcccttcattattgcagccctagcaacactccacctcctattcttgcacgaaacgggatcaaacaaccccctaggaatcacctcccattccgataaaatcaccttccacccttactacacaatcaaagacgccctcggcttacttctcttccttctctccttaatgacattaacactattctcaccagactcctagcgaccagacaattataccctagagcaacccttaaaacccctcccaatcaaggccgaatgatattctattcggctacacatttctcgatccgtcctaacaactagaaggggtcctggcctattatattcatctcatctagaaatccatctccaatatccaaaaaaggtatatttgggcctaagcatatttttggctagcggaacctatttactgagngggggcggaggcccttccatgggaggccggaattaaaattttaattcttgagaacaggggaaaaaaaaaaggggccg

SEQ ID NO: 377005 - DNA, 1475 bp, Homo sapiens
cgtccgcgtggggggggtgtgtgcccgccttgcgcatgcgtgttccctgggcatggccggctccgttccatccttctgcacagggtatcgcctctctccgtttggtacatcccctcctcccccacgcccggactggggtggtagacgcgcctccgctcatcgcccctccccatcggtttccgcgcgaaaagccggggcgcctgcgctgccgccgccgcgtctgctgaagcctccgagatgccggcgcgtaccgccccagcccgggtgcccacactggccgtcccggccatctcgctgcccgacgatgtccgcaggcggctcaaagatttggaaagagacagcttaacagaaaaggaatgtgtgaaggagaaattgaatctcttgcacgaatttctgcaaacagaaataaagaatcagttatgtgacttggaaaccaaattacgtaaagaagaattatccgaggagggctacctggctaaagtcaaatcccttttaaataaagatttgtccttggagaacggtgctcatgcttacaaccgggaagtgaatggacgtctagaaaacgggaaccaagcaagaagtgaagcccgtagagtgggaatggcagatgccaacagcccccccaaacccctttccaaacctcgcacgcccaggaggagcaagtccgatggagaggctaagcctgaaccttcacctagccccaggattacaaggaaaagcaccaggcaaaccaccatcacatctcattttgcaaagggccctgccaaacggaaacctcaggaagagtctgaaagagccaaatcggatgagtccatcaaggaagaagacaaagaccaggatgagaagagacgtagagttacatccagagaacgagttgctagaccgcttcctgcagaagaacctgaaagagcaaaatcaggaacgcgcactgaaaaggaagaagaaagagatgaaaaagaagaaaagagactccgaagtcaaaccaaagaaccaacacccaaacagaaactgaaggaggagccggacagagaagccagggcaggcgtgcaggctgacgaggacgaagatggagacgagaaagtaaaggcgggttatttgtttctgaactccccctcattcttctgctcctgtttgcttgggcgggagtgcgcagggtggggctctgggttcaagtccagccccatccacccaggctccatggggccatccagactctgggaaggtcaccttttcctccttttgggggccgggatttgtggctggatgcctgtgctggatgcctagtgaacactcagttgtcctctgtctttcacactagagagggtctgtgtgagcctgggctgagatgtgcatgaagcatcctctcctgaggcctcactgctgagaagccttgacacacagtcagctctgacgcacatgtcagccacacctttgattctttcccagcctcctacgttctgagtctagctctcccc

SEQ ID NO: 377006 - DNA, 667 bp, Homo sapiens
cccagccccagccgcggccgccctggggacgcagacgccaaggcccctccggccagggccgggagccgggccggcctagccaggctcaaagatttggaaagagacagcttaacagaaaaggaatgtgtgaaggagaaattgaatctcttgcacgaatttctgcaaacagaaataaagaatcagttatgtgacttggaaaccaaattacgtaaagaagaattatccgaggagggctacctggctaaagtcaaatcccttttaaataaagatttgtccttggagaacggtgctcatgcttacaaccgggaagtgaatggacgtctagaaaacgggaaccaagcaagaagtgaagcccgtagagtgggaatggcagatgccaacagcccccccaaacccctttccaaacctcgcacgcccaggaggagcaagtccgatggagaggctaagcctgaaccttcacctagccccaggattacaaggaaaagcaccaggcaaaccaccatcacatctcattttgcaaagggccctgccaaacggaaacctcaggaagagtctgaaagagccaaatcggatgagtccatcaaggaagaagacaaagaccaggatgagaagaacgtagagttacatccagagaacgagtgctgttccgctgggtaccggctcgatt

SEQ ID NO: 377007 - DNA, 169 bp, Homo sapiens
  misc_feature (12)..(12): n is a, c, g, or t
ggcaaagtctantccgtcctccaggctgaagtgcggtggcacaatctcggctcactgcagcctccacctcgcaggagaatcgcttgaacccggttcaagcggttgcagtgagccgagacggtgccattacattccagccttggtgatgagagggaaaatccatctcaag

SEQ ID NO: 377008 - DNA, 2377 bp, Homo sapiens
gcggacgcctgcaagtcgggtgcgcggttcgggggcggctcggaaaccccagcggaaggcagcaaggggcgcgtggggccgtggagtcacgaagctgggcggcaggaggggcggcctggagctcccgcggggcacagcgcgtgcgtgagggcggccggcggggctgcccggcgcgggtgtcccggcgatgtgtggcgctgaggcggcggcgggagcagcggcgccgagctctgcttcggcttcggcttcggcttcgcggcggtgcaggcggcggaggcggaggcgcaggctcttctttaggacctggcgagcccaggtctaagcggcggccccgcgaggcccttgcacggcgccccgggtcgaggccctccccgcctcgccctaccccaggccgcctccgccgctgctgctgccgccagcctagagccgcccgccgaagcagagccggcgccggggtcctcatccccaccggtcccgaggggcggctgctgcccgtcgccacgaggcccaggggcccgagtgccgagccctttgctccctcggccgcgcggggacagggctgctgagcagcctccgcctctcccggctgtgggggccccactgagtatgtcggaggagagcgacatggacaaagccatcaaggaaacttccattttagaagaatacagtatcaattggactcagaagctgggagctggaattagtggtccagttagagtctgtgtaaagaaatctactcaagaacggtttgcgctgaaaattcttcttgatcgtccaaaagctagaaatgaggtacgtctgcacatgatgtgtgccacacacccaaacatagttcagattattgaagtgtttgctaacagtgtccagtttccccatgagtccagccctagggcccgactcttaattgtaatggagatgatggaagggggagagctatttcacagaatcagccagcaccggcactttacagagaagcaagccagccaagtaacaaagcagatagctttggctctgcggcactgtcacttgttaaacattgcgcacagagacctcaagcctgaaaatctgctttttaaggataactctttggatgccccagtgaagttgtgtgactttggatttgccaagattgaccaaggtgacttgatgacaccccagttcaccccttattatgtagcaccccaggtactggaggcgcaaagaaggcatcagaaggagaaatctggcatcatacctacctcaccgacgccctacacttacaacaagagctgtgacttgtggtccctaggggtgattatctatgtgatgctgtgcggataccctcctttttactccaaacaccacagccggactatcccaaaggatatgcgaagaaagatcatgacaggcagttttgagttcccagaggaagagtggagtcagatctcagagatggccaaagatgttgtgaggaagctcctgaaggtcaaaccggaggagagactcaccatcgagggagtgctggaccacccctggctcaattccaccgaggccctggataatgtgctgccttctgctcagctgatgatggacaaggcagtggttgcaggaatccagcaggctcacgcggaacagttggccaacatgagaatccaggatctgaaagtcagcctcaaacccctgcactcagtgaacaaccccattctgcggaagaggaagttacttggcaccaagccaaaggacagtgtctatatccacgaccatgagaatggagccgaggattccaatgttgccttggaaaaactccgagatgtgattgctcagtgtattctcccccaggctggaggagagaatgaagatgagaaactgaatgaagtaatgcaggaggcttggaagtataaccgggaatgcaaactcctaagagatactctgcagagcttcagctggaatggtcgtggattcacagataaagtagatcgactaaaactggcagaaattgtgaagcaggtgatagaagagcaaaccacgtcccacgaatcccaataatgacagcttcagactttgtttttttaacaatttgaaaaattattctttaatgtataaagtaattttatgtaaattaataaatcataatttcatttccacattgattaaagctgctgtatagatttagggtgcaggacttaataatagtatagttattgtttgtttttaagaaaagctcagttctagagacatactattactttaggactgtgtagttgtatatttgtaagatgacagatgatgctgtcaagcaatattgttttatttgtaataaaatatacaaaaatcacttgccagcagtagaaaaaggaccgactataccgacctttctgattagtaaacagttgaatca

SEQ ID NO: 377009 - DNA, 2201 bp, Homo sapiens
gcggacgcctgcaagtcgggtgcgcggttcgggggcggctcggaaaccccagcggaaggcagcaaggggcgcgtggggccgtggagtcacgaagctgggcggcaggaggggcggcctggagctcccgcggggcacagcgcgtgcgtgagggcggccggcggggctgcccggcgcgggtgtcccggcgatgtgtggcgctgaggcggcggcgggagcagcggcgccgagctctgcttcggcttcggcttcggcttcgcggcggtgcaggcggcggaggcggaggcgcaggctcttctttaggacctggcgagcccaggtctaagcggcggccccgcgaggcccttgcacggcgccccgggtcgaggccctccccgcctcgccctaccccaggagcctgcctccccagctggggatgaggctaggaggcggccgcgtggggcccagcacaaagacctgtccccaggggccgccgcctccgccgctgctgctgccgccagcctagagccgcccgccgaagcagagccggcgccggggtcctcatccccaccggtcccgaggggcggctgctgcccgtcgccacgaggcccaggggcccgagtgccgagccctttgctccctcggccgcgcggggacagggctgctgagcagcctccgcctctcccggctgtgggggccccactgagtatgtcggaggagagcgacatggacaaagccatcaaggaaacttccattttagaagaatacagtatcaattggactcagaagctgggagctggaattagtggtccagttagagtctgtgtaaagaaatctactcaagaacggtttgcgctgaaaattcttcttgatcgtccaaaagctagaaatgaggtacgtctgcacatgatgtgtgccacacacccaaacatagttcagattattgaagtgtttgctaacagtgtccagtttccccatgagtccagccctagggcccgactcttaattgtaatggagatgatggaagggggagagctatttcacagaatcagccagcaccggcactttacagagaagcaagccagccaagtaacaaagcagatagctttggctctgcggcactgtcacttgttaaacattgcgcacagagacctcaagcctgaaaatctgctttttaaggataactctttggatgccccagtgaagttgtgtgactttggatttgccaagattgaccaaggtgacttgatgacaccccagttcaccccttattatgtagcaccccaggtactggaggcgcaaagaaggcatcagaaggagaaatctggcatcatacctacctcaccgacgccctacacttacaacaagagctgtgacttgtggtccctaggggtgattatctatgtgatgctgtgcggataccctcctttttactccaaacaccacagccggactatcccaaaggatatgcgaagaaagatcatgacaggcagttttgagttcccagaggaagagtggagtcagatctcagagatggccaaagatgttgtgaggaagctcctgaaggtcaaaccggaggagagactcaccatcgagggagtgctggaccacccctggctcaattccaccgaggccctggataatgtgctgccttctgctcagctgatgatggacaaggcagtggttgcaggaatccagcaggctcacgcggaacagttggccaacatgagaatccaggatctgaaagtcagcctcaaacccctgcactcagtgaacaaccccattctgcggaagaggaagttacttggcaccaagccaaaggacagtgtctatatccacgaccatgagaatggagccgaggattccaatgttgccttggaaaaactccgagatgtgattgctcagtgtattctcccccaggctggaggagagaatgaagatgagaaactgaatgaagtaatgcaggaggcttggaagtataaccgggaatgcaaactcctaagagatactctgcagagcttcagctggaatggtcgtggattcacagataaagtagatcgactaaaactggcagaaattgtgaagcaggtgatagaagagcaaaccacgtcccacgaatcccaataatgacagcttcagactttgtttttttaacaatttgaaaaattattctttaatgtataaagtaattttatgtaaattaataaatcataatttcatttcca

SEQ ID NO: 377010 - DNA, 2415 bp, Homo sapiens
gcggacgcctgcaagtcgggtgcgcggttcgggggcggctcggaaaccccagcggaaggcagcaaggggcgcgtggggccgtggagtcacgaagctgggcggcaggaggggcggcctggagctcccgcggggcacagcgcgtgcgtgagggcggccggcggggctgcccggcgcgggtgtcccggcgatgtgtggcgctgaggcggcggcgggagcagcggcgccgagctctgcttcggcttcggcttcggcttcgcggcggtgcaggcggcggaggcggaggcgcaggctcttctttaggacctggcgagcccaggtctaagcggcggccccgcgaggcccttgcacggcgccccgggtcgaggccctccccgcctcgccctaccccaggagcctgcctccccagctggggatgaggctaggaggcggccgcgtggggcccagcacaaagacctgtccccaggggccgccgcctccgccgctgctgctgccgccagcctagagccgcccgccgaagcagagccggcgccggggtcctcatccccaccggtcccgaggggcggctgctgcccgtcgccacgaggcccaggggcccgagtgccgagccctttgctccctcggccgcgcggggacagggctgctgagcagcctccgcctctcccggctgtgggggccccactgagtatgtcggaggagagcgacatggacaaagccatcaaggaaacttccattttagaagaatacagtatcaattggactcagaagctgggagctggaattagtggtccagttagagtctgtgtaaagaaatctactcaagaacggtttgcgctgaaaattcttcttgatcgtccaaaagctagaaatgagttcagattattgaagtgtttgctaacagtgtccagtttccccatgagtccagccctagggcccgactcttaattgtaatggagatgatggaagggggagagctatttcacagaatcagccagcaccggcactttacagagaagcaagccagccaagtaacaaagcagatagctttggctctgcggcactgtcacttgttaaacattgcgcacagagacctcaagcctgaaaatctgctttttaaggataactctttggatgccccagtgaagttgtgtgactttggatttgccaagattgaccaaggtgacttgatgacaccccagttcaccccttattatgtagcaccccaggtactggaggcgcaaagaaggcatcagaaggagaaatctggcatcatacctacctcaccgacgccctacacttacaacaagagctgtgacttgtggtccctaggggtgattatctatgtgatgctgtgcggataccctcctttttactccaaacaccacagccggactatcccaaaggatatgcgaagaaagatcatgacaggcagttttgagttcccagaggaagagtggagtcagatctcagagatggccaaagatgttgtgaggaagctcctgaaggtcaaaccggaggagagactcaccatcgagggagtgctggaccacccctggctcaattccaccgaggccctggataatgtgctgccttctgctcagctgatgatggacaaggcagtggttgcaggaatccagcaggctcacgcggaacagttggccaacatgagaatccaggatctgaaagtcagcctcaaacccctgcactcagtgaacaaccccattctgcggaagaggaagttacttggcaccaagccaaaggacagtgtctatatccacgaccatgagaatggagccgaggattccaatgttgccttggaaaaactccgagatgtgattgctcagtgtattctcccccaggctggaggagagaatgaagatgagaaactgaatgaagtaatgcaggaggcttggaagtataaccgggaatgcaaactcctaagagatactctgcagagcttcagctggaatggtcgtggattcacagataaagtagatcgactaaaactggcagaaattgtgaagcaggtgatagaagagcaaaccacgtcccacgaatcccaataatgacagcttcagactttgtttttttaacaatttgaaaaattattctttaatgtataaagtaattttatgtaaattaataaatcataatttcatttccacattgattaaagctgctgtatagatttagggtgcaggacttaataatagtatagttattgtttgtttttaagaaaagctcagttctagagacatactattactttaggactgtgtagttgtatatttgtaagatgacagatgatgctgtcaagcaatattgttttatttgtaataaaatatacaaaaatcacttgccagcagtagaaaaaggaccgactataccgacctttctgattagtaaacagttgaatca

SEQ ID NO: 377011 - DNA, 2394 bp, Homo sapiens
gcggacgcctgcaagtcgggtgcgcggttcgggggcggctcggaaaccccagcggaaggcagcaaggggcgcgtggggccgtggagtcacgaagctgggcggcaggaggggcggcctggagctcccgcggggcacagcgcgtgcgtgagggcggccggcggggctgcccggcgcgggtgtcccggcgatgtgtggcgctgaggcggcggcgggagcagcggcgccgagctctgcttcggcttcggcttcggcttcgcggcggtgcaggcggcggaggcggaggcgcaggctcttctttaggacctggcgagcccaggtctaagcggcggccccgcgaggcccttgcacggcgccccgggtcgaggccctccccgcctcgccctaccccaggagcctgcctccccagctggggatgaggctaggaggcggccgcgtggggcccagcacaaagacctgtccccaggggccgccgcctccgccgctgctgctgccgccagcctagagccgcccgccgaagcagagccggcgccggggtcctcatccccaccggtcccgaggggcggctgctgcccgtcgccacgaggcccaggggcccgagtgccgagccctttgctccctcggccgcgcggggacagggctgctgagcagcctccgcctctcccggctgtgggggccccactgagtatgtcggaggagagcgacatggacaaagccatcaaggaaacttccattttagaagaatacagtatcaattggactcagaagctgggagctggaattagtggtccagttagagtctgtgtaaagaaatctactcaagaacggtttgcgctgaaaattcttcttgatcgtccaaaagctagaaatgaggtacgtctgcacatgatgtgtgccacacacccaaacatagttcagattattgaagtgtttgctaacagtgtccagtttccccatgagtccagccctagggcccgactcttaattgtaatggagatgatggaagggggagagctatttcacagaatcagccagcaccggcactttacagagaagcaagccagccaagtaacaaagcagatagctttggctctgcggcactgtcacttgatgccccagtgaagttgtgtgactttggatttgccaagattgaccaaggtgacttgatgacaccccagttcaccccttattatgtagcaccccaggtactggaggcgcaaagaaggcatcagaaggagaaatctggcatcatacctacctcaccgacgccctacacttacaacaagagctgtgacttgtggtccctaggggtgattatctatgtgatgctgtgcggataccctcctttttactccaaacaccacagccggactatcccaaaggatatgcgaagaaagatcatgacaggcagttttgagttcccagaggaagagtggagtcagatctcagagatggccaaagatgttgtgaggaagctcctgaaggtcaaaccggaggagagactcaccatcgagggagtgctggaccacccctggctcaattccaccgaggccctggataatgtgctgccttctgctcagctgatgatggacaaggcagtggttgcaggaatccagcaggctcacgcggaacagttggccaacatgagaatccaggatctgaaagtcagcctcaaacccctgcactcagtgaacaaccccattctgcggaagaggaagttacttggcaccaagccaaaggacagtgtctatatccacgaccatgagaatggagccgaggattccaatgttgccttggaaaaactccgagatgtgattgctcagtgtattctcccccaggctggaggagagaatgaagatgagaaactgaatgaagtaatgcaggaggcttggaagtataaccgggaatgcaaactcctaagagatactctgcagagcttcagctggaatggtcgtggattcacagataaagtagatcgactaaaactggcagaaattgtgaagcaggtgatagaagagcaaaccacgtcccacgaatcccaataatgacagcttcagactttgtttttttaacaatttgaaaaattattctttaatgtataaagtaattttatgtaaattaataaatcataatttcatttccacattgattaaagctgctgtatagatttagggtgcaggacttaataatagtatagttattgtttgtttttaagaaaagctcagttctagagacatactattactttaggactgtgtagttgtatatttgtaagatgacagatgatgctgtcaagcaatattgttttatttgtaataaaatatacaaaaatcacttgccagcagtagaaaaaggaccgactataccgacctttctgattagtaaacagttgaatca

SEQ ID NO: 377012 - DNA, 2453 bp, Homo sapiens
  misc_feature (2015)..(2015): n is a, c, g, or t
  misc_feature (2033)..(2033): n is a, c, g, or t
  misc_feature (2046)..(2046): n is a, c, g, or t
  misc_feature (2056)..(2056): n is a, c, g, or t
  misc_feature (2072)..(2074): n is a, c, g, or t
  misc_feature (2081)..(2081): n is a, c, g, or t
  misc_feature (2092)..(2092): n is a, c, g, or t
  misc_feature (2112)..(2112): n is a, c, g, or t
  misc_feature (2125)..(2127): n is a, c, g, or t
  misc_feature (2135)..(2138): n is a, c, g, or t
  misc_feature (2142)..(2142): n is a, c, g, or t
gcggacgcctgcaagtcgggtgcgcggttcgggggcggctcggaaaccccagcggaaggcagcaaggggcgcgtggggccgtggagtcacgaagctgggcggcaggaggggcggcctggagctcccgcggggcacagcgcgtgcgtgagggcggccggcggggctgcccggcgcgggtgtcccggcgatgtgtggcgctgaggcggcggcgggagcagcggcgccgagctctgcttcggcttcggcttcggcttcgcggcggtgcaggcggcggaggcggaggcgcaggctcttctttaggacctggcgagcccaggtctaagcggcggccccgcgaggcccttgcacggcgccccgggtcgaggccctccccgcctcgccctaccccaggagcctgcctccccagctggggatgaggctaggaggcggccgcgtggggcccagcacaaagacctgtccccaggggccgccgcctccgccgctgctgctgccgccagcctagagccgcccgccgaagcagagccggcgccggggtcctcatccccaccggtcccgaggggcggctgctgcccgtcgccacgaggcccaggggcccgagtgccgagccctttgctccctcggccgcgcggggacagggctgctgagcagcctccgcctctcccggctgtgggggccccactgagtatgtcggaggagagcgacatggacaaagccatcaaggaaacttccattttagaagaatacagtatcaattggactcagaagctgggagctggaattagtggtccagttagagtctgtgtaaagaaatctactcaagaacggtttgcgctgaaaattcttcttgatcgtccaaaagctagaaatgaggtacgtctgcacatgatgtgtgccacacacccaaacatagttcagattattgaagtgtttgctaacagtgtccagtttccccatgagtccagccctagggcccgactcttaattgtaatggagatgatggaagggggagagctatttcacagaatcagccagcaccggcactttacagagaagcaagccagccaagtaacaaagcagatagctttggctctgcggcactgtcacttgttaaacattgcgcacagagacctcaagcctgaaaatctgctttttaaggataactctttggatgccccagtgaagttgtgtgactttggatttgccaagattgaccaaggtgacttgatgacaccccagttcaccccttattatgtagcaccccaggtactggaggcgcaaagaaggcatcagaaggagaaatctggcatcatacctacctcaccgacgccctacacttacaacaagagctgtgacttgtggtccctaggggtgattatctatgtgatgctgtgcggataccctcctttttactccaaacaccacagccggactatcccaaaggatatgcgaagaaagatcatgacaggcagttttgagttcccagaggaagagtggagtcagatctcagagatggccaaagatgttgtgaggaagctcctgaaggtcaaaccggaggagagactcaccatcgagggagtgctggaccacccctggctcaattccaccgaggccctggataatgtgctgccttctgctcagctgatgatggacaaggcagtggttgcaggaatccagcaggctcacgcggaacagttggccaacatgagaatccaggatctgaaagtcagcctcaaacccctgcactcagtgaacaaccccattctgcggaagaggaagttacttggcaccaagccaaaggacagtgtctatatccacgaccatgagaatggagccgaggattccaatgttgccttggaaaaactccgagatgtgattgctcagtgtattctcccccaggctggaggagagaatgaagatgagaaactgaatgaagtaatgcaggaggcttggaagtataaccgggaatgcaaactcctaagagatactctgcagagcttcagctggaatgcgaaaanaaaaaaaaaaaaaaaaanaaaaaaaacaaanaaaaaaaaanaaacaggtaaaaaaannncaaaccnccccccccccncccccccaatgccccccccnccccccccccccnnnacaacccnnnnaagnaggctttaatgtataaagtaattttatgtaaattaataaatcataatttcatttccacattgattaaagctgctgtatagatttagggtgcaggacttaataatagtatagttattgtttgtttttaagaaaagctcagttctagagacatactattactttaggactgtgtagttgtatatttgtaagatgacagatgatgctgtcaagcaatattgttttatttgtaataaaatatacaaaaatcacttgccagcagtagaaaaaggaccgactataccgacctttctgattagtaaacagttgaatca

SEQ ID NO: 377013 - DNA, 1420 bp, Homo sapiens
actctgagatccctgcatgatgtcctgccatatggtgacatctaggagttttatattgggtagcaacctgcttttccagaacctcatgacccttcaactaattctgcagccactatcagccaaaaagagcactctgagttccttttggaagttaaagcccattgtcctagaaacctcagtatggagattcaaggtctgaggaactataagccatatgtaggattaccttattaaaccctagaactcaaaagtatcactggattaagcccttttctaccattttaatctcactttttccagtatacaaaggactgcctcaagccatagtacccctacaagtggttggagactagaatcccatctgtgctctgcaggtggaaagcccaggcttgcagaagtcagaagtaaccagaactgtttagagccaggtccaggaacttcctatggccttttggtagcaactgtgcatggcagccctgttggcgttttctccacaggctcctgaaggtcaaaccggaggagagactcaccatcgagggagtgctggaccacccctggctcaattccaccgaggccctggataatgtgctgccttctgctcagctgatgatggacaaggcagtggttgcaggaatccagcaggctcacgcggaacagttggccaacatgagaatccaggatctgaaagtcagcctcaaacccctgcactcagtgaacaaccccattctgcggaagaggaagttacttggcaccaagccaaaggacagtgtctatatccacgaccatgagaatggagccgaggattccaatgttgccttggaaaaactccgagatgtgattgctcagtgtattctcccccaggctggaggagagaatgaagatgagaaactgaatgaagtaatgcaggaggcttggaagtataaccgggaatgcaaactcctaagagatactctgcagagcttcagctggaatggtcgtggattcacagataaagtagatcgactaaaactggcagaaattgtgaagcaggtgatagaagagcaaaccacgtcccacgaatcccaataatgacagcttcagactttgtttttttaacaatttgaaaaattattctttaatgtataaagtaattttatgtaaattaataaatcataatttcatttccacattgattaaagctgctgtatagatttagggtgcaggacttaataatagtatagttattgtttgtttttaagaaaagctcagttctagagacatactattactttaggactgtgtagttgtatatttgtaagatgacagatgatgctgtcaagcaatattgttttatttgtaataaaatatacaaaaatcacttgccagcagtagaaaaaggaccgactataccgacctttctgattagtaaacagttgaatca

SEQ ID NO: 377014 - DNA, 1967 bp, Homo sapiens
gcggacgcctgcaagtcgggtgcgcggttcgggggcggctcggaaaccccagcggaaggcagcaaggggcgcgtggggccgtggagtcacgaagctgggcggcaggaggggcggcctggagctcccgcggggcacagcgcgtgcgtgagggcggccggcggggctgcccggcgcgggtgtcccggcgatgtgtggcgctgaggcggcggcgggagcagcggcgccgagctctgcttcggcttcggcttcggcttcgcggcggtgcaggcggcggaggcggaggcgcaggctcttctttaggacctggcgagcccaggtctaagcggcggccccgcgaggcccttgcacggcgccccgggtcgaggccctccccgcctcgccctaccccaggagcctgcctccccagctggggatgaggctaggaggcggccgcgtggggcccagcacaaagacctgtccccaggggccgccgcctccgccgctgctgctgccgccagcctagagccgcccgccgaagcagagccggcgccggggtcctcatccccaccggtcccgaggggcggctgctgcccgtcgccacgaggcccaggggcccgagtgccgagccctttgctccctcggccgcgcggggacagggctgctgagcagcctccgcctctcccggctgtgggggccccactgagtatgtcggaggagagcgacatggacaaagccatcaaggaaacttccattttagaagaatacagtatcaattggactcagaagctgggagctggaattagtggtccagttagagtctgtgtaaagaaatctactcaagaacggtttgcgctgaaaattcttcttgatcgtccaaaagctagaaatgaggtacgtctgcacatgatgtgtgccacacacccaaacatagttcagattattgaagtgtttgctaacagtgtccagtttccccatgagtccagccctagggcccgactcttaattgtaatggagatgatggaagggggagagctatttcacagaatcagccagcaccggcactttacagagaagcaagccagccaagtaacaaagcagatagctttggctctgcggcactgtcacttgttaaacattgcgcacagagacctcaagcctgaaaatctgctttttaaggataactctttggatgccccagtgaagttgtgtgactttggatttgccaagattgaccaaggtgacttgatgacaccccagttcaccccttattatgtagcaccccaggtactggaggcgcaaagaaggcatcagaaggagaaatctggcatcatacctacctcaccgacgccctacacttacaacaagagctgtgacttgtggtccctaggggtgattatctatgtgatgctgtgcggataccctcctttttactccaaacaccacagccggactatcccaaaggatatgcgaagaaagatcatgacaggcagttttgagttcccagaggaagagtggagtcagatctcagagatggccaaagatgttgtgaggaagctcctgaaggtcaaaccggaggagagactcaccatcgagggagtgctggaccacccctggctcaattccaccgaggccctggataatgtgctgccttctgctcagctgatgatggacaaggttttgaatgatgtttactttgttggctgaaaagactgtgttgggaaggaatgctggggcttggctcagtgaggggttagaggcaaaacagtgcagagtacacgatccttcccagagaaacatctctggtttcctgagagtcaggatccaaaataaggaatttctttcggtaaaagaccaaatcaaggcctggtgaatataaactaagggagcactcaaaggaatagcctccatatttctgctacagggctgcgggcacagaacagtttaagataccctccctttccccaaggggtttaaataagactggctgg

SEQ ID NO: 377015 - DNA, 919 bp, Homo sapiens
gcggacgcctgcaagtcgggtgcgcggttcgggggcggctcggaaaccccagcggaaggcagcaaggggcgcgtggggccgtggagtcacgaagctgggcggcaggaggggcggcctggagctcccgcggggcacagcgcgtgcgtgagggcggccggcggggctgcccggcgcgggtgtcccggcgatgtgtggcgctgaggcggcggcgggagcagcggcgccgagctctgcttcggcttcggcttcggcttcgcggcggtgcaggcggcggaggcggaggcgcaggctcttctttaggacctggcgagcccaggtctaagcggcggccccgcgaggcccttgcacggcgccccgggtcgaggccctccccgcctcgccctaccccaggagcctgcctccccagctggggatgaggctaggaggcggccgcgtggggcccagcacaaagacctgtccccaggggccgccgcctccgccgctgctgctgccgccagcctagagccgcccgccgaagcagagccggcgccggggtcctcatccccaccggtcccgaggggcggctgctgcccgtcgccacgaggcccaggggcccgagtgccgagccctttgctccctcggccgcgcggggacagggctgctgagcagcctccgcctctcccggctgtgggggccccactgagtatgtcggaggagagcgacatggacaaagccatcaaggccgccagcatttgcttccggatggtctacagaacttggagagttggaatttatccatccctcccgatttgtttgaaatcagccttctggaaatctgcagttggaaaaaggaagcattgagtttacttaggaaaagttaacagttcctgtgacttaactgcacttaaaccaaaagaaaagcaaatgtgtgttcgaaaat

SEQ ID NO: 377016 - DNA, 546 bp, Homo sapiens
tgtgaagtacctattcaagtcttttgcccattttttttcactgagttgtgtttttcttatagatgtataggaattctttatatattctggatatgagtcttttgtcagctgtatgtattacaaagatcttgtctctctttgtggtttgcttgtgtgttgtgagctttggatttttactgccaggttagtggaactgtacaattgctacctgaaaaatgggggatctgaactgcttttgatcagtggtgggggtggttcccccactggtgagggtgaatttgatactggtaaggtggaccttattgggtctctgtcaagagtctgccacctctcaaagaatttgaggactgaccttgttctttttttgctttcaggtcgtggattcacagataaagtagatcgactaaaactggcagaaattgtgaagcaggtgatagaagagcaaaccacgtcccacgaatcccaataatgacagcttcagactttgtttttttaacaatttgaaaaattattctttaatgtataaagtaattttatgtaaattaa

SEQ ID NO: 377017 - DNA, 389 bp, Homo sapiens
ctattaagtgtcaatgaatgggacgaagagagccctactactactactacacgtttcgatcactccccaaggccgccagcatttgcttccggatggtctacagaacttggagagttggaatttatccatccctcccgatttgtttgaaatcagccttctggaaatctgcagttggaaaaaggtggttcgccgtacaaaacctgtcctttggggaataggttgtcctcacttttccgtgtattctcccctttttctttttcctcttctttctcctaggaagcattgagtttacttaggaaaagttaacagttcctgtgacttaactgcacttaaaccaaaagaaaagcaaatgtgtgttcgaaaattacacaaataaaataagttttcta

SEQ ID NO: 377018 - DNA, 2455 bp, Homo sapiens
gcggacgcctgcaagtcgggtgcgcggttcgggggcggctcggaaaccccagcggaaggcagcaaggggcgcgtggggccgtggagtcacgaagctgggcggcaggaggggcggcctggagctcccgcggggcacagcgcgtgcgtgagggcggccggcggggctgcccggcgcgggtgtcccggcgatgtgtggcgctgaggcggcggcgggagcagcggcgccgagctctgcttcggcttcggcttcggcttcgcggcggtgcaggcggcggaggcggaggcgcaggctcttctttaggacctggcgagcccaggtctaagcggcggccccgcgaggcccttgcacggcgccccgggtcgaggccctccccgcctcgccctaccccaggagcctgcctccccagctggggatgaggctaggaggcggccgcgtggggcccagcacaaagacctgtccccaggggccgccgcctccgccgctgctgctgccgccagcctagagccgcccgccgaagcagagccggcgccggggtcctcatccccaccggtcccgaggggcggctgctgcccgtcgccacgaggcccaggggcccgagtgccgagccctttgctccctcggccgcgcggggacagggctgctgagcagcctccgcctctcccggctgtgggggccccactgagtatgtcggaggagagcgacatggacaaagccatcaaggaaacttccattttagaagaatacagtatcaattggactcagaagctgggagctggaattagtggtccagttagagtctgtgtaaagaaatctactcaagaacggtttgcgctgaaaattcttcttgatcgtccaaaagctagaaatgaggtacgtctgcacatgatgtgtgccacacacccaaacatagttcagattattgaagtgtttgctaacagtgtccagtttccccatgagtccagccctagggcccgactcttaattgtaatggagatgatggaagggggagagctatttcacagaatcagccagcaccggcactttacagagaagcaagccagccaagtaacaaagcagatagctttggctctgcggcactgtcacttgttaaacattgcgcacagagacctcaagcctgaaaatctgctttttaaggataactctttggatgccccagtgaagttgtgtgactttggatttgccaagattgaccaaggtgacttgatgacaccccagttcaccccttattatgtagcaccccaggtactggaggcgcaaagaaggcatcagaaggagaaatctggcatcatacctacctcaccgacgccctacacttacaacaagagctgtgacttgtggtccctaggggtgattatctatgtgatgctgtgcggataccctcctttttactccaaacaccacagccggactatcccaaaggatatgcgaagaaagatcatgacaggcagttttgagttcccagaggaagagtggagtcagatctcagagatggccaaagatgttgtgaggaagctcctgaaggtcaaaccggaggagagactcaccatcgagggagtgctggaccacccctggctcaattccaccgaggccctggataatgtgctgccttctgctcagctgatgatggacaaggcagtggttgcaggaatccagcaggctcacgcggaacagttggccaacatgagaatccaggatctgaaagtcagcctcaaacccctgcactcagtgaacaaccccattctgcggaagaggaagttacttggcaccaagccaaaggacagtgtctatatccacgaccatgagaatggagccgaggattccaatgttgccttggaaaaactccgagatgtgattgctcagtgtattctcccccaggctggaggagagaatgaagatgagaaactgaatgaagtaatgcaggaggcttggaagtataaccgggaatgcaaactcctaagagatactctgcagagcttcagctggaatggtcgtggattcacagataaagtagatcgactaaaactggcagaaattgtgaagcaggtgatagaagagcaaaccacgtcccacgaatcccaataatgacagcttcagactttgtttttttaacaatttgaaaaattattctttaatgtataaagtaattttatgtaaattaataaatcataatttcatttccacattgattaaagctgctgtatagatttagggtgcaggacttaataatagtatagttattgtttgtttttaagaaaagctcagttctagagacatactattactttaggactgtgtagttgtatatttgtaagatgacagatgatgctgtcaagcaatattgttttatttgtaataaaatatacaaaaatcacttgccagcagtagaaaaaggaccgactataccgacctttctgattagtaaacagttgaatca

SEQ ID NO: 377019 - DNA, 2238 bp, Homo sapiens
gcggacgcctgcaagtcgggtgcgcggttcgggggcggctcggaaaccccagcggaaggcagcaaggggcgcgtggggccgtggagtcacgaagctgggcggcaggaggggcggcctggagctcccgcggggcacagcgcgtgcgtgagggcggccggcggggctgcccggcgcgggtgtcccggcgatgtgtggcgctgaggcggcggcgggagcagcggcgccgagctctgcttcggcttcggcttcgggccgcctccgccgctgctgctgccgccagcctagagccgcccgccgaagcagagccggcgccggggtcctcatccccaccggtcccgaggggcggctgctgcccgtcgccacgaggcccaggggcccgagtgccgagccctttgctccctcggccgcgcggggacagggctgctgagcagcctccgcctctcccggctgtgggggccccactgagtatgtcggaggagagcgacatggacaaagccatcaaggaaacttccattttagaagaatacagtatcaattggactcagaagctgggagctggaattagtggtccagttagagtctgtgtaaagaaatctactcaagaacggtttgcgctgaaaattcttcttgatcgtccaaaagctagaaatgaggtacgtctgcacatgatgtgtgccacacacccaaacatagttcagattattgaagtgtttgctaacagtgtccagtttccccatgagtccagccctagggcccgactcttaattgtaatggagatgatggaagggggagagctatttcacagaatcagccagcaccggcactttacagagaagcaagccagccaagtaacaaagcagatagctttggctctgcggcactgtcacttgttaaacattgcgcacagagacctcaagcctgaaaatctgctttttaaggataactctttggatgccccagtgaagttgtgtgactttggatttgccaagattgaccaaggtgacttgatgacaccccagttcaccccttattatgtagcaccccaggtactggaggcgcaaagaaggcatcagaaggagaaatctggcatcatacctacctcaccgacgccctacacttacaacaagagctgtgacttgtggtccctaggggtgattatctatgtgatgctgtgcggataccctcctttttactccaaacaccacagccggactatcccaaaggatatgcgaagaaagatcatgacaggcagttttgagttcccagaggaagagtggagtcagatctcagagatggccaaagatgttgtgaggaagctcctgaaggtcaaaccggaggagagactcaccatcgagggagtgctggaccacccctggctcaattccaccgaggccctggataatgtgctgccttctgctcagctgatgatggacaaggcagtggttgcaggaatccagcaggctcacgcggaacagttggccaacatgagaatccaggatctgaaagtcagcctcaaacccctgcactcagtgaacaaccccattctgcggaagaggaagttacttggcaccaagccaaaggacagtgtctatatccacgaccatgagaatggagccgaggattccaatgttgccttggaaaaactccgagatgtgattgctcagtgtattctcccccaggctggaggagagaatgaagatgagaaactgaatgaagtaatgcaggaggcttggaagtataaccgggaatgcaaactcctaagagatactctgcagagcttcagctggaatggtcgtggattcacagataaagtagatcgactaaaactggcagaaattgtgaagcaggtgatagaagagcaaaccacgtcccacgaatcccaataatgacagcttcagactttgtttttttaacaatttgaaaaattattctttaatgtataaagtaattttatgtaaattaataaatcataatttcatttccacattgattaaagctgctgtatagatttagggtgcaggacttaataatagtatagttattgtttgtttttaagaaaagctcagttctagagacatactattactttaggactgtgtagttgtatatttgtaagatgacagatgatgctgtcaagcaatattgttttatttgtaataaaatatacaaaaatcacttgccagcagtagaaaaaggaccgactataccgacctttctgattagtaaacagttgaatca

SEQ ID NO: 377020 - DNA, 2519 bp, Homo sapiens
gcggacgcctgcaagtcgggtgcgcggttcgggggcggctcggaaaccccagcggaaggcagcaaggggcgcgtggggccgtggagtcacgaagctgggcggcaggaggggcggcctggagctcccgcggggcacagcgcgtgcgtgagggcggccggcggggctgcccggcgcgggtgtcccggcgatgtgtggcgctgaggcggcggcgggagcagcggcgccgagctctgcttcggcttcggcttcggcttcgcggcggtgcaggcggcggaggcggaggcgcaggctcttctttaggacctggcgagcccaggtctaagcggcggccccgcgaggcccttgcacggcgccccgggtcgaggccctccccgcctcgccctaccccaggagcctgcctccccagctggggatgaggctaggaggcggccgcgtggggcccagcacaaagacctgtccccaggggccgccgcctccgccgctgctgctgccgccagcctagagccgcccgccgaagcagagccggcgccggggtcctcatccccaccggtcccgaggggcggctgctgcccgtcgccacgaggcccaggggcccgagtgccgagccctttgctccctcggccgcgcggggacagggctgctgagcagcctccgcctctcccggctgtgggggccccactgagtatgtcggaggagagcgacatggacaaagccatcaaggaaacttccattttagaagaatacagtatcaattggactcagaagctgggagctggaattagtggtccagttagagtctgtgtaaagaaatctactcaagaacggtttgcgctgaaaattcttcttgatcgtccaaaagctagaaatgaggtacgtctgcacatgatgtgtgccacacacccaaacatagttcagattattgaagtgtttgctaacagtgtccagtttccccatgagtccagccctagggcccgactcttaattgtaatggagatgatggaagggggagagctatttcacagaatcagccagcaccggcactttacagagaagcaagccagccaagtaacaaagcagatagctttggctctgcggcactgtcacttgttaaacattgcgcacagagacctcaagcctgaaaatctgctttttaaggataactctttggatgccccagtgaagttgtgtgactttggatttgccaagattgaccaaggtgacttgatgacaccccagttcaccccttattatgtagcaccccaggtactggaggcgcaaagaaggcatcagaaggagaaatctggcatcatacctacctcaccgacgccctacacttacaacaagtcctctccatgatctgtgtcaaactgctttgggcctttatgaagtggcctgtgctgtactgtagagctgtgacttgtggtccctaggggtgattatctatgtgatgctgtgcggataccctcctttttactccaaacaccacagccggactatcccaaaggatatgcgaagaaagatcatgacaggcagttttgagttcccagaggaagagtggagtcagatctcagagatggccaaagatgttgtgaggaagctcctgaaggtcaaaccggaggagagactcaccatcgagggagtgctggaccacccctggctcaattccaccgaggccctggataatgtgctgccttctgctcagctgatgatggacaaggcagtggttgcaggaatccagcaggctcacgcggaacagttggccaacatgagaatccaggatctgaaagtcagcctcaaacccctgcactcagtgaacaaccccattctgcggaagaggaagttacttggcaccaagccaaaggacagtgtctatatccacgaccatgagaatggagccgaggattccaatgttgccttggaaaaactccgagatgtgattgctcagtgtattctcccccaggctggaggagagaatgaagatgagaaactgaatgaagtaatgcaggaggcttggaagtataaccgggaatgcaaactcctaagagatactctgcagagcttcagctggaatggtcgtggattcacagataaagtagatcgactaaaactggcagaaattgtgaagcaggtgatagaagagcaaaccacgtcccacgaatcccaataatgacagcttcagactttgtttttttaacaatttgaaaaattattctttaatgtataaagtaattttatgtaaattaataaatcataatttcatttccacattgattaaagctgctgtatagatttagggtgcaggacttaataatagtatagttattgtttgtttttaagaaaagctcagttctagagacatactattactttaggactgtgtagttgtatatttgtaagatgacagatgatgctgtcaagcaatattgttttatttgtaataaaatatacaaaaatcacttgccagcagtagaaaaaggaccgactataccgacctttctgattagtaaacagttgaatca

SEQ ID NO: 377021 - DNA, 2256 bp, Homo sapiens
gcggacgcctgcaagtcgggtgcgcggttcgggggcggctcggaaaccccagcggaaggcagcaaggggcgcgtggggccgtggagtcacgaagctgggcggcaggaggggcggcctggagctcccgcggggcacagcgcgtgcgtgagggcggccggcggggctgcccggcgcgggtgtcccggcgatgtgtggcgctgaggcggcggcgggagcagcggcgccgagctctgcttcggcttcggcttcggcttcgcggcggtgcaggcggcggaggcggaggcgcaggctcttctttaggacctggcgagcccaggtctaagcggcggccccgcgaggcccttgcacggcgccccgggtcgaggccctccccgcctcgccctaccccaggagcctgcctccccagctggggatgaggctaggaggcggccgcgtggggcccagcacaaagacctgtccccaggggccgccgcctccgccgctgctgctgccgccagcctagagccgcccgccgaagcagagccggcgccggggtcctcatccccaccggtcccgaggggcggctgctgcccgtcgccacgaggcccaggggcccgagtgccgagccctttgctccctcggccgcgcggggacagggctgctgagcagcctccgcctctcccggctgtgggggccccactgagtatgtcggaggagagcgacatggacaaagccatcaaggaaacttccattttagaagaatacagtatcaattggactcagaagctgggagctggaattagtggtccagttagagtctgtgtaaagaaatctactcaagaacggtttgcgctgaaaattcttcttgatcgtccaaaagctagaaatgaggtacgtctgcacatgatgtgtgccacacacccaaacatagttcagattattgaagtgtttgctaacagtgtccagtttccccatgagtccagccctaggatgccccagtgaagttgtgtgactttggatttgccaagattgaccaaggtgacttgatgacaccccagttcaccccttattatgtagcaccccaggtactggaggcgcaaagaaggcatcagaaggagaaatctggcatcatacctacctcaccgacgccctacacttacaacaagagctgtgacttgtggtccctaggggtgattatctatgtgatgctgtgcggataccctcctttttactccaaacaccacagccggactatcccaaaggatatgcgaagaaagatcatgacaggcagttttgagttcccagaggaagagtggagtcagatctcagagatggccaaagatgttgtgaggaagctcctgaaggtcaaaccggaggagagactcaccatcgagggagtgctggaccacccctggctcaattccaccgaggccctggataatgtgctgccttctgctcagctgatgatggacaaggcagtggttgcaggaatccagcaggctcacgcggaacagttggccaacatgagaatccaggatctgaaagtcagcctcaaacccctgcactcagtgaacaaccccattctgcggaagaggaagttacttggcaccaagccaaaggacagtgtctatatccacgaccatgagaatggagccgaggattccaatgttgccttggaaaaactccgagatgtgattgctcagtgtattctcccccaggctggaggagagaatgaagatgagaaactgaatgaagtaatgcaggaggcttggaagtataaccgggaatgcaaactcctaagagatactctgcagagcttcagctggaatggtcgtggattcacagataaagtagatcgactaaaactggcagaaattgtgaagcaggtgatagaagagcaaaccacgtcccacgaatcccaataatgacagcttcagactttgtttttttaacaatttgaaaaattattctttaatgtataaagtaattttatgtaaattaataaatcataatttcatttccacattgattaaagctgctgtatagatttagggtgcaggacttaataatagtatagttattgtttgtttttaagaaaagctcagttctagagacatactattactttaggactgtgtagttgtatatttgtaagatgacagatgatgctgtcaagcaatattgttttatttgtaataaaatatacaaaaatcacttgccagcagtagaaaaaggaccgactataccgacctttctgattagtaaacagttgaatca

SEQ ID NO: 377022 - DNA, 770 bp, Homo sapiens
cctcctgcattacttcattcagtttctcatcttcattctctccagcctgggggagaatacactgagcaaccccattctgcggaagaggaagttacttggcaccaagccaaaggacagtgtctatatccacgaccatgagaatggagccgaggattccaatgttgccttggaaaaactccgagatgtgattgctcagtgtattctcccccaggctggaggagagaatgaagatgagaaactgaatgaagtaatgcaggaggcttggaagtataaccgggaatgcaaactcctaagagatactctgcagagcttcagctggaatggtcgtggattcacagataaagtagatcgactaaaactggcagaaattgtgaagcaggtgatagaagagcaaaccacgtcccacgaatcccaataatgacagcttcagactttgtttttttaacaatttgaaaaattattctttaatgtataaagtaattttatgtaaattaataaatcataatttcatttccacattgattaaagctgctgtatagatttagggtgcaggacttaataatagtatagttattgtttgtttttaagaaaagctcagttctagagacatactattactttaggactgtgtagttgtatatttgtaagatgacagatgatgctgtcaagcaatattgttttatttgtaataaaatatacaaaaatcacttgccagcagtagaaaaaggaccgactataccgacctttctgattagtaaacagttgaatca

SEQ ID NO: 377023 - DNA, 1751 bp, Homo sapiens
cagcccgactcctaggagcgaggggaggcgggaaagcagctcaagcctcacccaccgccctgcccccagccccgccactcccaggctcctcgggactcggcgggtcctcctgggagtctcggaggggaccggctgtgcagacgccatggagttggtgctggtcttcctctgcagcctgctggcccccatggtcctggccagtgcagctgaaaaggagaaggaaatggacccttttcattatgattaccagaccctgaggattgggggactggtgttcgctgtggtcctcttctcggttgggatcctccttatcctaagtcgcaggtgcaagtgcagtttcaatcagaagccccgggccccaggagatgaggaagcccaggtggagaacctcatcaccgccaatgcaacagagccccagaaagcagagaactgaagtgcagccatcaggtggaagcctctggaacctgaggcggctgcttgaacctttggatgcaaatgtcgatgcttaagaaaaccggccacttcagcaacagccctttccccaggagaagccaagaacttgtgtgtcccccaccctatcccctctaacaccattcctccacctgatgatgcaactaacacttgcctccccactgcagcctgcggtcctgcccacctcccgtgatgtgtgtgtgtgtgtgtgtgtgtgtgactgtgtgtgtttgctaactgtggtctttgtggctacttgtttgtggatggtattgtgtttgttagtgaactgtggactcgctttcccaggcaggggctgagccacatggccatctgctcctccctgcccccgtggccctccatcaccttctgctcctaggaggctgcttgttgcccgagaccagccccctcccctgatttagggatgcgtagggtaagagcacgggcagtggtcttcagtcgtcttgggacctgggaaggtttgcagcactttgtcatcattcttcatggactcctttcactcctttaacaaaaaccttgcttccttatcccacctgatcccagtctgaaggtctcttagcaactggagatacaaagcaaggagctggtgagcccagcgttgacgtcaggcaggctatgcccttccgtggttaatttcttcccaggggcttccacgaggagtccccatctgccccgccccttcacagagcgcccggggattccaggcccagggcttctactctgcccctggggaatgtgtcccctgcatatcttctcagcaataactccatgggctctgggaccctaccccttccaaccttccctgcttctgagacttcaatctacagcccagctcatccagatgcagactacagtccctgcaattgggtctctggcaggcaatagttgaaggactcctgttccgttggggccagcacaccgggatggatggagggagagcagaggcctttgcttctctgcctacgtccccttagatgggcagcagaggcaactcccgcatcctttgctctgcctgtcggtggtcagagcggtgagcgaggtgggttggagactcagcaggctccgtgcagcccttgggaacagtgagaggttgaaggtcataacgagagtgggaactcaacccagatcccgcccctcctgtcctctgtgttcccgcggaaaccaaccaaaccgtgcgctgtgacccattgctgttctctgtatcgtgatctatcctcaacaacaacagaaaaaaggaataaaatatcctttgtttccta

SEQ ID NO: 377024 - DNA, 1721 bp, Homo sapiens
ttcggtgcctctcgccccgtttgtccccccccgccggctggtccggtccggcctgctcctcgggactcggcgggtcctcctgggagtctcggaggggaccggctgtgcagacgccatggagttggtgctggtcttcctctgcagcctgctggcccccatggtcctggccagtgcagctgaaaaggagaaggaaatggacccttttcattatgattaccagaccctgaggattgggggactggtgttcgctgtggtcctcttctcggttgggatcctccttatcctaagtcgcaggtgcaagtgcagtttcaatcagaagccccgggccccaggagatgaggaagcccaggtggagaacctcatcaccgccaatgcaacagagccccagaaagcagagaactgaagtgcagccatcaggtggaagcctctggaacctgaggcggctgcttgaacctttggatgcaaatgtcgatgcttaagaaaaccggccacttcagcaacagccctttccccaggagaagccaagaacttgtgtgtcccccaccctatcccctctaacaccattcctccacctgatgatgcaactaacacttgcctccccactgcagcctgcggtcctgcccacctcccgtgatgtgtgtgtgtgtgtgtgtgtgtgtgactgtgtgtgtttgctaactgtggtctttgtggctacttgtttgtggatggtattgtgtttgttagtgaactgtggactcgctttcccaggcaggggctgagccacatggccatctgctcctccctgcccccgtggccctccatcaccttctgctcctaggaggctgcttgttgcccgagaccagccccctcccctgatttagggatgcgtagggtaagagcacgggcagtggtcttcagtcgtcttgggacctgggaaggtttgcagcactttgtcatcattcttcatggactcctttcactcctttaacaaaaaccttgcttccttatcccacctgatcccagtctgaaggtctcttagcaactggagatacaaagcaaggagctggtgagcccagcgttgacgtcaggcaggctatgcccttccgtggttaatttcttcccaggggcttccacgaggagtccccatctgccccgccccttcacagagcgcccggggattccaggcccagggcttctactctgcccctggggaatgtgtcccctgcatatcttctcagcaataactccatgggctctgggaccctaccccttccaaccttccctgcttctgagacttcaatctacagcccagctcatccagatgcagactacagtccctgcaattgggtctctggcaggcaatagttgaaggactcctgttccgttggggccagcacaccgggatggatggagggagagcagaggcctttgcttctctgcctacgtccccttagatgggcagcagaggcaactcccgcatcctttgctctgcctgtcggtggtcagagcggtgagcgaggtgggttggagactcagcaggctccgtgcagcccttgggaacagtgagaggttgaaggtcataacgagagtgggaactcaacccagatcccgcccctcctgtcctctgtgttcccgcggaaaccaaccaaaccgtgcgctgtgacccattgctgttctctgtatcgtgatctatcctcaacaacaacagaaaaaaggaataaaatatcctttgtttccta

SEQ ID NO: 377025 - DNA, 1783 bp, Homo sapiens
  misc_feature (1762)..(1762): n is a, c, g, or t
cagcccgactcctaggagcgaggggaggcgggaaagcagctcaagcctcacccaccgccctgcccccagccccgccactcccaggctcctcgggactcggcgggtcctcctgggagtctcggaggggaccggctgtgcagacgccatggagttggtgctggtcttcctctgcagcctgctggcccccatggtcctggccagtgcagctgaaaaggagaaggaaatggacccttttcattatgattaccagaccctgaggattgggggactggtgttcgctgtggtcctcttctcggttgggatcctccttatcctaagtcgcaggtgcaagtgcagtttcaatcagaagccccgggccccaggagatgaggaagcccaggtggagaacctcatcaccgccaatgcaacagagccccagaaagcagagaactgaagtgcagccatcaggtggaagcctctggaacctgaggcggctgcttgaacctttggatgcaaatgtcgatgcttaagaaaaccggccacttcagcaacagccctttccccaggagaagccaagaacttgtgtgtcccccaccctatcccctctaacaccattcctccacctgatgatgcaactaacacttgcctccccactgcagcctgcggtcctgcccacctcccgtgatgtgtgtgtgtgtgtgtgtgtgtgtgactgtgtgtgtttgctaactgtggtctttgtggctacttgtttgtggatggtattgtgtttgttagtgaactgtggactcgctttcccaggcaggggctgagccacatggccatctgctcctccctgcccccgtggccctccatcaccttctgctcctaggaggctgcttgttgcccgagaccagccccctcccctgatttagggatgcgtagggtaagagcacgggcagtggtcttcagtcgtcttgggacctgggaaggtttgcagcactttgtcatcattcttcatggactcctttcactcctttaacaaaaaccttgcttccttatcccacctgatcccagtctgaaggtctcttagcaactggagatacaaagcaaggagctggtgagcccagcgttgacgtcaggcaggctatgcccttccgtggttaatttcttcccaggggcttccacgaggagtccccatctgccccgccccttcacagagcgcccggggattccaggcccagggcttctactctgcccctggggaatgtgtcccctgcatatcttctcagcaataactccatgggctctgggaccctaccccttccaaccttccctgcttctgagacttcaatctacagcccagctcatccagatgcagactacagtccctgcaattgggtctctggcaggcaatagttgaaggactcctgttccgttggggccagcacaccgggatggatggagggagagcagaggcctttgcttctctgcctacgtccccttagatgggcagcagaggcaactcccgcatcctttgctctgcctgtcggtggtcagagcggtgagcgaggtgggttggagactcagcaggctccgtgcagcccttgggaacagtgagaggttgaaggtcataacgagagtgggaactcaacccagatcccgcccctcctgtcctctgtgttcccgcggaaaccaaccaaaccgtgcgctgtgacccattgctgttctctgtatcgtgatctatcctcaacaacaacagaaaaaaggaataaaatatcctttgtttcctaaaaaacacaanaacatcagcaccgaccaaaca

SEQ ID NO: 377026 - DNA, 1818 bp, Homo sapiens
ttcggtgcctctcgccccgtttgtccccccccgccggctggtccggtccggcctgctcctcgggactcggcgggtcctcctgggagtctcggaggggaccggctgtgcaggtttgggccttgacgtggctgtggatgcagtcgttctgacccctggtggccgagaggtgaagtgcagtggcggctgcttgctcaaggccggaggaagacgccatggagttggtgctggtcttcctctgcagcctgctggcccccatggtcctggccagtgcagctgaaaaggagaaggaaatggacccttttcattatgattaccagaccctgaggattgggggactggtgttcgctgtggtcctcttctcggttgggatcctccttatcctaagtcgcaggtgcaagtgcagtttcaatcagaagccccgggccccaggagatgaggaagcccaggtggagaacctcatcaccgccaatgcaacagagccccagaaagcagagaactgaagtgcagccatcaggtggaagcctctggaacctgaggcggctgcttgaacctttggatgcaaatgtcgatgcttaagaaaaccggccacttcagcaacagccctttccccaggagaagccaagaacttgtgtgtcccccaccctatcccctctaacaccattcctccacctgatgatgcaactaacacttgcctccccactgcagcctgcggtcctgcccacctcccgtgatgtgtgtgtgtgtgtgtgtgtgtgtgactgtgtgtgtttgctaactgtggtctttgtggctacttgtttgtggatggtattgtgtttgttagtgaactgtggactcgctttcccaggcaggggctgagccacatggccatctgctcctccctgcccccgtggccctccatcaccttctgctcctaggaggctgcttgttgcccgagaccagccccctcccctgatttagggatgcgtagggtaagagcacgggcagtggtcttcagtcgtcttgggacctgggaaggtttgcagcactttgtcatcattcttcatggactcctttcactcctttaacaaaaaccttgcttccttatcccacctgatcccagtctgaaggtctcttagcaactggagatacaaagcaaggagctggtgagcccagcgttgacgtcaggcaggctatgcccttccgtggttaatttcttcccaggggcttccacgaggagtccccatctgccccgccccttcacagagcgcccggggattccaggcccagggcttctactctgcccctggggaatgtgtcccctgcatatcttctcagcaataactccatgggctctgggaccctaccccttccaaccttccctgcttctgagacttcaatctacagcccagctcatccagatgcagactacagtccctgcaattgggtctctggcaggcaatagttgaaggactcctgttccgttggggccagcacaccgggatggatggagggagagcagaggcctttgcttctctgcctacgtccccttagatgggcagcagaggcaactcccgcatcctttgctctgcctgtcggtggtcagagcggtgagcgaggtgggttggagactcagcaggctccgtgcagcccttgggaacagtgagaggttgaaggtcataacgagagtgggaactcaacccagatcccgcccctcctgtcctctgtgttcccgcggaaaccaaccaaaccgtgcgctgtgacccattgctgttctctgtatcgtgatctatcctcaacaacaacagaaaaaaggaataaaatatcctttgtttccta

SEQ ID NO: 377027 - DNA, 1723 bp, Homo sapiens
agcacttgttttaaaaggcagctttaaaagcccttgatggttgtttgtttgctctgaggctctgaaccagagaagcccagctcctgttacagattcatcaaatgccggaaagacgccatggagttggtgctggtcttcctctgcagcctgctggcccccatggtcctggccagtgcagctgaaaaggagaaggaaatggacccttttcattatgattaccagaccctgaggattgggggactggtgttcgctgtggtcctcttctcggttgggatcctccttatcctaagtcgcaggtgcaagtgcagtttcaatcagaagccccgggccccaggagatgaggaagcccaggtggagaacctcatcaccgccaatgcaacagagccccagaaagcagagaactgaagtgcagccatcaggtggaagcctctggaacctgaggcggctgcttgaacctttggatgcaaatgtcgatgcttaagaaaaccggccacttcagcaacagccctttccccaggagaagccaagaacttgtgtgtcccccaccctatcccctctaacaccattcctccacctgatgatgcaactaacacttgcctccccactgcagcctgcggtcctgcccacctcccgtgatgtgtgtgtgtgtgtgtgtgtgtgtgactgtgtgtgtttgctaactgtggtctttgtggctacttgtttgtggatggtattgtgtttgttagtgaactgtggactcgctttcccaggcaggggctgagccacatggccatctgctcctccctgcccccgtggccctccatcaccttctgctcctaggaggctgcttgttgcccgagaccagccccctcccctgatttagggatgcgtagggtaagagcacgggcagtggtcttcagtcgtcttgggacctgggaaggtttgcagcactttgtcatcattcttcatggactcctttcactcctttaacaaaaaccttgcttccttatcccacctgatcccagtctgaaggtctcttagcaactggagatacaaagcaaggagctggtgagcccagcgttgacgtcaggcaggctatgcccttccgtggttaatttcttcccaggggcttccacgaggagtccccatctgccccgccccttcacagagcgcccggggattccaggcccagggcttctactctgcccctggggaatgtgtcccctgcatatcttctcagcaataactccatgggctctgggaccctaccccttccaaccttccctgcttctgagacttcaatctacagcccagctcatccagatgcagactacagtccctgcaattgggtctctggcaggcaatagttgaaggactcctgttccgttggggccagcacaccgggatggatggagggagagcagaggcctttgcttctctgcctacgtccccttagatgggcagcagaggcaactcccgcatcctttgctctgcctgtcggtggtcagagcggtgagcgaggtgggttggagactcagcaggctccgtgcagcccttgggaacagtgagaggttgaaggtcataacgagagtgggaactcaacccagatcccgcccctcctgtcctctgtgttcccgcggaaaccaaccaaaccgtgcgctgtgacccattgctgttctctgtatcgtgatctatcctcaacaacaacagaaaaaaggaataaaatatcctttgtttccta

SEQ ID NO: 377028 - DNA, 1894 bp, Homo sapiens
ttcggtgcctctcgccccgtttgtccccccccgccggctggtccggtccggcctgctcctcgggactcggcgggtcctcctgggagtctcggaggggaccggctgtgcagagaacttcagccaaagcatctgagacgggaagcagaaaaaggagggacagtttggagaagaaaaacgcagctgtgtgtttgggccttgacgtggctgtggatgcagtcgttctgacccctggtggccgagaggtgaagtgcagtggcggctgcttgctcaaggccggaggaagacgccatggagttggtgctggtcttcctctgcagcctgctggcccccatggtcctggccagtgcagctgaaaaggagaaggaaatggacccttttcattatgattaccagaccctgaggattgggggactggtgttcgctgtggtcctcttctcggttgggatcctccttatcctaagtcgcaggtgcaagtgcagtttcaatcagaagccccgggccccaggagatgaggaagcccaggtggagaacctcatcaccgccaatgcaacagagccccagaaagcagagaactgaagtgcagccatcaggtggaagcctctggaacctgaggcggctgcttgaacctttggatgcaaatgtcgatgcttaagaaaaccggccacttcagcaacagccctttccccaggagaagccaagaacttgtgtgtcccccaccctatcccctctaacaccattcctccacctgatgatgcaactaacacttgcctccccactgcagcctgcggtcctgcccacctcccgtgatgtgtgtgtgtgtgtgtgtgtgtgtgactgtgtgtgtttgctaactgtggtctttgtggctacttgtttgtggatggtattgtgtttgttagtgaactgtggactcgctttcccaggcaggggctgagccacatggccatctgctcctccctgcccccgtggccctccatcaccttctgctcctaggaggctgcttgttgcccgagaccagccccctcccctgatttagggatgcgtagggtaagagcacgggcagtggtcttcagtcgtcttgggacctgggaaggtttgcagcactttgtcatcattcttcatggactcctttcactcctttaacaaaaaccttgcttccttatcccacctgatcccagtctgaaggtctcttagcaactggagatacaaagcaaggagctggtgagcccagcgttgacgtcaggcaggctatgcccttccgtggttaatttcttcccaggggcttccacgaggagtccccatctgccccgccccttcacagagcgcccggggattccaggcccagggcttctactctgcccctggggaatgtgtcccctgcatatcttctcagcaataactccatgggctctgggaccctaccccttccaaccttccctgcttctgagacttcaatctacagcccagctcatccagatgcagactacagtccctgcaattgggtctctggcaggcaatagttgaaggactcctgttccgttggggccagcacaccgggatggatggagggagagcagaggcctttgcttctctgcctacgtccccttagatgggcagcagaggcaactcccgcatcctttgctctgcctgtcggtggtcagagcggtgagcgaggtgggttggagactcagcaggctccgtgcagcccttgggaacagtgagaggttgaaggtcataacgagagtgggaactcaacccagatcccgcccctcctgtcctctgtgttcccgcggaaaccaaccaaaccgtgcgctgtgacccattgctgttctctgtatcgtgatctatcctcaacaacaacagaaaaaaggaataaaatatcctttgtttccta

SEQ ID NO: 377029 - DNA, 1676 bp, Homo sapiens
gacacgttgtaaagaggcagtactatacggtctagggtagcatgctggtgggaacggctgtgcagacgccatggagttggtgctggtcttcctctgcagcctgctggcccccatggtcctggccagtgcagctgaaaaggagaaggaaatggacccttttcattatgattaccagaccctgaggattgggggactggtgttcgctgtggtcctcttctcggttgggatcctccttatcctaagtcgcaggtgcaagtgcagtttcaatcagaagccccgggccccaggagatgaggaagcccaggtggagaacctcatcaccgccaatgcaacagagccccagaaagcagagaactgaagtgcagccatcaggtggaagcctctggaacctgaggcggctgcttgaacctttggatgcaaatgtcgatgcttaagaaaaccggccacttcagcaacagccctttccccaggagaagccaagaacttgtgtgtcccccaccctatcccctctaacaccattcctccacctgatgatgcaactaacacttgcctccccactgcagcctgcggtcctgcccacctcccgtgatgtgtgtgtgtgtgtgtgtgtgtgtgactgtgtgtgtttgctaactgtggtctttgtggctacttgtttgtggatggtattgtgtttgttagtgaactgtggactcgctttcccaggcaggggctgagccacatggccatctgctcctccctgcccccgtggccctccatcaccttctgctcctaggaggctgcttgttgcccgagaccagccccctcccctgatttagggatgcgtagggtaagagcacgggcagtggtcttcagtcgtcttgggacctgggaaggtttgcagcactttgtcatcattcttcatggactcctttcactcctttaacaaaaaccttgcttccttatcccacctgatcccagtctgaaggtctcttagcaactggagatacaaagcaaggagctggtgagcccagcgttgacgtcaggcaggctatgcccttccgtggttaatttcttcccaggggcttccacgaggagtccccatctgccccgccccttcacagagcgcccggggattccaggcccagggcttctactctgcccctggggaatgtgtcccctgcatatcttctcagcaataactccatgggctctgggaccctaccccttccaaccttccctgcttctgagacttcaatctacagcccagctcatccagatgcagactacagtccctgcaattgggtctctggcaggcaatagttgaaggactcctgttccgttggggccagcacaccgggatggatggagggagagcagaggcctttgcttctctgcctacgtccccttagatgggcagcagaggcaactcccgcatcctttgctctgcctgtcggtggtcagagcggtgagcgaggtgggttggagactcagcaggctccgtgcagcccttgggaacagtgagaggttgaaggtcataacgagagtgggaactcaacccagatcccgcccctcctgtcctctgtgttcccgcggaaaccaaccaaaccgtgcgctgtgacccattgctgttctctgtatcgtgatctatcctcaacaacaacagaaaaaaggaataaaatatcctttgtttccta

SEQ ID NO: 377030 - DNA, 1602 bp, Homo sapiens
ggcatctctgtttaatgggccctgctcctctggaattcctttgtggagactgagcagctgaaaaggagaaggaaatggacccttttcattatgattaccagaccctgaggattgggggactggtgttcgctgtggtcctcttctcggttgggatcctccttatcctaagtcgcaggtgcaagtgcagtttcaatcagaagccccgggccccaggagatgaggaagcccaggtggagaacctcatcaccgccaatgcaacagagccccagaaagcagagaactgaagtgcagccatcaggtggaagcctctggaacctgaggcggctgcttgaacctttggatgcaaatgtcgatgcttaagaaaaccggccacttcagcaacagccctttccccaggagaagccaagaacttgtgtgtcccccaccctatcccctctaacaccattcctccacctgatgatgcaactaacacttgcctccccactgcagcctgcggtcctgcccacctcccgtgatgtgtgtgtgtgtgtgtgtgtgtgtgactgtgtgtgtttgctaactgtggtctttgtggctacttgtttgtggatggtattgtgtttgttagtgaactgtggactcgctttcccaggcaggggctgagccacatggccatctgctcctccctgcccccgtggccctccatcaccttctgctcctaggaggctgcttgttgcccgagaccagccccctcccctgatttagggatgcgtagggtaagagcacgggcagtggtcttcagtcgtcttgggacctgggaaggtttgcagcactttgtcatcattcttcatggactcctttcactcctttaacaaaaaccttgcttccttatcccacctgatcccagtctgaaggtctcttagcaactggagatacaaagcaaggagctggtgagcccagcgttgacgtcaggcaggctatgcccttccgtggttaatttcttcccaggggcttccacgaggagtccccatctgccccgccccttcacagagcgcccggggattccaggcccagggcttctactctgcccctggggaatgtgtcccctgcatatcttctcagcaataactccatgggctctgggaccctaccccttccaaccttccctgcttctgagacttcaatctacagcccagctcatccagatgcagactacagtccctgcaattgggtctctggcaggcaatagttgaaggactcctgttccgttggggccagcacaccgggatggatggagggagagcagaggcctttgcttctctgcctacgtccccttagatgggcagcagaggcaactcccgcatcctttgctctgcctgtcggtggtcagagcggtgagcgaggtgggttggagactcagcaggctccgtgcagcccttgggaacagtgagaggttgaaggtcataacgagagtgggaactcaacccagatcccgcccctcctgtcctctgtgttcccgcggaaaccaaccaaaccgtgcgctgtgacccattgctgttctctgtatcgtgatctatcctcaacaacaacagaaaaaaggaataaaatatcctttgtttccta

SEQ ID NO: 377031 - DNA, 1671 bp, Homo sapiens
ttcggtgcctctcgccccgtttgtccccccccgccggctggtccggtccggcctgctcctcgggactcggcgggtcctcctgggagtctcggaggggaccggctgtgcagacgccatggagttggtgctggtcttcctctgcagcctgctggcccccatggtcctggccagtgcagctgaaaaggagaaggaaatggacccttttcattatgattaccagaccctgaggattgggggactggtgttcgctgtggtcctcttctcggttgggatcctccttatcctaagtcgcaggtgcaagtgcagtttcaatcagaagccccgcaacagagccccagaaagcagagaactgaagtgcagccatcaggtggaagcctctggaacctgaggcggctgcttgaacctttggatgcaaatgtcgatgcttaagaaaaccggccacttcagcaacagccctttccccaggagaagccaagaacttgtgtgtcccccaccctatcccctctaacaccattcctccacctgatgatgcaactaacacttgcctccccactgcagcctgcggtcctgcccacctcccgtgatgtgtgtgtgtgtgtgtgtgtgtgtgactgtgtgtgtttgctaactgtggtctttgtggctacttgtttgtggatggtattgtgtttgttagtgaactgtggactcgctttcccaggcaggggctgagccacatggccatctgctcctccctgcccccgtggccctccatcaccttctgctcctaggaggctgcttgttgcccgagaccagccccctcccctgatttagggatgcgtagggtaagagcacgggcagtggtcttcagtcgtcttgggacctgggaaggtttgcagcactttgtcatcattcttcatggactcctttcactcctttaacaaaaaccttgcttccttatcccacctgatcccagtctgaaggtctcttagcaactggagatacaaagcaaggagctggtgagcccagcgttgacgtcaggcaggctatgcccttccgtggttaatttcttcccaggggcttccacgaggagtccccatctgccccgccccttcacagagcgcccggggattccaggcccagggcttctactctgcccctggggaatgtgtcccctgcatatcttctcagcaataactccatgggctctgggaccctaccccttccaaccttccctgcttctgagacttcaatctacagcccagctcatccagatgcagactacagtccctgcaattgggtctctggcaggcaatagttgaaggactcctgttccgttggggccagcacaccgggatggatggagggagagcagaggcctttgcttctctgcctacgtccccttagatgggcagcagaggcaactcccgcatcctttgctctgcctgtcggtggtcagagcggtgagcgaggtgggttggagactcagcaggctccgtgcagcccttgggaacagtgagaggttgaaggtcataacgagagtgggaactcaacccagatcccgcccctcctgtcctctgtgttcccgcggaaaccaaccaaaccgtgcgctgtgacccattgctgttctctgtatcgtgatctatcctcaacaacaacagaaaaaaggaataaaatatcctttgtttccta

SEQ ID NO: 377032 - DNA, 2002 bp, Homo sapiens
cttctgcctttttttccccccatacaagtaaggcattattgaaaggtatataagtttatctcacattgtaaggtaaaagaggtttctggatgatgaagtgcccgatgcaccagctttgactgtgcgtaacaatatcgtgtgcctgtgtagcatttaaattctttcctaagtgcttttgcatcctcatagcggcccgtgatgggcagagcagggctcattactcccgtcttctggatggggctctcgaaggcaagtgatcacctaagtgcgaatggacgaagattccgatctaggaggcaggtgcccttcctggtagcttggtgttctgtctatttcatcacagactgagaatctgggaaggctcagaggaggcagcctggaaatgaaatgtcttttcattttttttttcccaaactagttctttctcagaaaccttttatcctaaggctcaggactgtgagcaaccactggggaggtcctgggtttaacaatttcctttccatgtctgccaggctccagcccacctgggagaggcttcttctgaggttcacccctcccctgtgtctttgtctcctttctctgcgtctcagacgaggctgtcataccgggaatttcagtgggcaggtgctcaaggaagggagagaagcagataaggataccagaggcagctgaagtgtttttaatttaaattatcctcctcctcagcctctggaacctgaggcggctgcttgaacctttggatgcaaatgtcgatgcttaagaaaaccggccacttcagcaacagccctttccccaggagaagccaagaacttgtgtgtcccccaccctatcccctctaacaccattcctccacctgatgatgcaactaacacttgcctccccactgcagcctgcggtcctgcccacctcccgtgatgtgtgtgtgtgtgtgtgtgtgtgtgactgtgtgtgtttgctaactgtggtctttgtggctacttgtttgtggatggtattgtgtttgttagtgaactgtggactcgctttcccaggcaggggctgagccacatggccatctgctcctccctgcccccgtggccctccatcaccttctgctcctaggaggctgcttgttgcccgagaccagccccctcccctgatttagggatgcgtagggtaagagcacgggcagtggtcttcagtcgtcttgggacctgggaaggtttgcagcactttgtcatcattcttcatggactcctttcactcctttaacaaaaaccttgcttccttatcccacctgatcccagtctgaaggtctcttagcaactggagatacaaagcaaggagctggtgagcccagcgttgacgtcaggcaggctatgcccttccgtggttaatttcttcccaggggcttccacgaggagtccccatctgccccgccccttcacagagcgcccggggattccaggcccagggcttctactctgcccctggggaatgtgtcccctgcatatcttctcagcaataactccatgggctctgggaccctaccccttccaaccttccctgcttctgagacttcaatctacagcccagctcatccagatgcagactacagtccctgcaattgggtctctggcaggcaatagttgaaggactcctgttccgttggggccagcacaccgggatggatggagggagagcagaggcctttgcttctctgcctacgtccccttagatgggcagcagaggcaactcccgcatcctttgctctgcctgtcggtggtcagagcggtgagcgaggtgggttggagactcagcaggctccgtgcagcccttgggaacagtgagaggttgaaggtcataacgagagtgggaactcaacccagatcccgcccctcctgtcctctgtgttcccgcggaaaccaaccaaaccgtgcgctgtgacccattgctgttctctgtatcgtgatctatcctcaacaacaacagaaaaaaggaataaaatatcctttgtttccta

SEQ ID NO: 377033 - DNA, 985 bp, Homo sapiens
cagcccgactcctaggagcgaggggaggcgggaaagcagctcaagcctcacccaccgccctgcccccagccccgccactcccaggctcctcgggactcggcgggtcctcctgggagtctcggaggggaccggctgtgcagacgccatggagttggtgctggtcttcctctgcagcctgctggcccccatggtcctggccagtgcagctgaaaaggagaaggaaatggacccttttcattatgattaccagaccctgaggattgggggactggtgttcgctgtggtcctcttctcggttgggatcctccttatcctaagtcgcaggtgcaagtgcagtttcaatcagaagccccgggccccaggagatgaggaagcccaggtggagaacctcatcaccgccaatgcaacagagccccagaaagcagagaactgaagtgcagccatcaggtggaagcctctggaacctgaggcggctgcttgaacctttggatgcaaatgtcgatgcttaagaaaaccggccacttcagcaacagccctttccccaggagaagccaagaacttgtgtgtcccccaccctatcccctctaacaccattcctccacctgatgatgcaactaacacttgcctccccactgcagcctgcggtcctgcccacctcccgtgatgtgtgtgtgtgtgtgtgtgtgtgtgactgtgtgtgtttgctaactgtggtctttgtggctacttgtttgtggatggtattgtgtttgttagtgaactgtggactcgctttcccaggcaggggctgagccacatggccatctgctcctccctgcccccgtggccctccatcaccttctgctcctaggaggctgcttgttgcccgagaccagccccctcccctgatttagggatgcgtagggtaagagcacacccttctgggcacggagtttggccttgcacattttatgggtccttttccttaaaacttgtttcttcccgg

SEQ ID NO: 377034 - DNA, 1033 bp, Homo sapiens
cagcccgactcctaggagcgaggggaggcgggaaagcagctcaagcctcacccaccgccctgcccccagccccgccactcccaggctcctcgggactcggcgggtcctcctgggagtctcggaggggaccggctgtgcagacgccatggagttggtgctggtcttcctctgcagcctgctggcccccatggtcctggccagtgcagctgaaaaggagaaggaaatggacccttttcattatgattaccagaccctgaggattgggggactggtgttcgctgtggtcctcttctcggttgggatcctccttatcctaagtcgcaggtgcaagtgcagtttcaatcagaagccccgggccccaggagatgaggaagcccaggtggagaacctcatcaccgccaatgcaacagagccccagaaagcagagaactgaagtgcagccatcaggtggaagcctctggaacctgaggcggctgcttgaacctttggatgcaaatgtcgatgcttaagtgtcccctgcatatcttctcagcaataactccatgggctctgggaccctaccccttccaaccttccctgcttctgagacttcaatctacagcccagctcatccagatgcagactacagtccctgcaattgggtctctggcaggcaatagttgaaggactcctgttccgttggggccagcacaccgggatggatggagggagagcagaggcctttgcttctctgcctacgtccccttagatgggcagcagaggcaactcccgcatcctttgctctgcctgtcggtggtcagagcggtgagcgaggtgggttggagactcagcaggctccgtgcagcccttgggaacagtgagaggttgaaggtcataacgagagtgggaactcaacccagatcccgcccctcctgtcctctgtgttcccgcggaaaccaaccaaaccgtgcgctgtgacccattgctgttctctgtatcgtgatctatcctcaacaacaacagaaaaaaggaataaaatatcctttgtttccta

SEQ ID NO: 377035 - DNA, 427 bp, Homo sapiens
taggaaacaaaggatattttattccttttttctgttgttgttgaggatagatcacgatacagagaacagcaatgggtcccagcacaccgggatggatggagggagagcagaggcctttgcttctctgcctacgtccccttagatgggcagcagaggcaactcccgcatcctttgctctgcctgtcggtggtcagagcggtgagcgaggtgggttggagactcagcaggctccgtgcagcccttgggaacagtgagaggttgaaggtcataacgagagtgggaactcaacccagatcccgcccctcctgtcctctgtgttcccgcggaaaccaaccaaaccgtgcgctgtgacccattgctgttctctgtatcgtgatctatcctcaacaacaacagaaaaaaggaataaaatatcctttgtttccta

SEQ ID NO: 377036 - DNA, 685 bp, Homo sapiens
cagcccgactcctaggagcgaggggaggcgggaaagcagctcaagcctcacccaccgccctgcccccagccccgccactcccaggctcctcgggactcggcgggtcctcctgggagtctcggaggggaccggctgtgcagacgccatggagttggtgctggtcttcctctgcagcctgctggcccccatggtcctggccagtgcagctgaaaaggagaaggaaatggacccttttcattatgattaccagaccctgaggattgggggactggtgttcgctgtggtcctcttctcggttgggatcctccttatcctaagtcgcaggtgcaagtgcagtttcaatcagaagccccgggccccaggagatgaggaagcccaggtggagaacctcatcaccgccaatgcaacagagccccagaaagcagagaactgaagtgcagccatcaggtggaagcctctggaacctgaggcggctgcttgaacctttggatgcaaatgtcgatgcttaagaaaaccggccacttcagcaacagccctttccccaggagaagccaagaacttgtgtgtcctctgtgttcccgcggaaaccaaccaaaccgtgcgctgtgacccattgctgttctctgtatcgtgatctatcctcaacaacaacagaaaaaaggaataaaatatcctttgtttccta

SEQ ID NO: 377037 - DNA, 541 bp, Homo sapiens
cagcccgactcctaggagcgaggggaggcgggaaagcagctcaagcctcacccaccgccctgcccccagccccgccactcccaggctcctcgggactcggcgggtcctcctgggagtctcggaggggaccggctgtgcagacgccatggagttggtgctggtcttcctctgcagcctgctggcccccatggtcctggccagtgcagctgaaaaggagaaggaaatggacccttttcattatgattaccagaccctgaggattgggggactggtgttcgctgtggtcctcttctcggttgggatcctccttatcctaagtcgcaggtgcaagtgcagtttcaatcagaagccccgggccccaggagatgaggaagcccaggtggagaacctcatcaccgccaatgcaacagagccccagaaagcagagaactgaagtgcagccatcaggtggaagggtcaaagtgatacaatggacatcgaagcaccgtgacaattctccatgtagccattatgctataaatgttggcatcactatccaaaa

SEQ ID NO: 377038 - DNA, 443 bp, Homo sapiens
caggtgatgctgtgatcgcatgtcctgaaggacctggatggcagggactggagggggtgggcccccctgcactatccagaagaacggtttcctacctctgagctgggcttggaggcagtctggtagagcctgaggctcagaacatccccgaggtcccttctgctctaacagtgtgagcttggaaagaccccagcctctctgtcagtttccttttctgaataatcaagtccttcctagctttggggtaagctgggcctcctgctcactgtgtaaccctggaaaagccacttaagcctcagtttcatcacctataaaataaatgcatcaagatgttttctgttatctcacagggtcaaagtgatacaatggacatcgaagcaccgtgacaattctccatgtagccattatgctataaatgttggcatcactatccaaaaccttgt

SEQ ID NO: 377039 - DNA, 1887 bp, Homo sapiens
cagcccgactcctaggagcgaggggaggcgggaaagcagctcaagcctcacccaccgccctgcccccagccccgccactcccaggctcctcgggactcggcgggtcctcctgggagtctcggaggggaccggctgtgcagacgccatggagttggtgctggtcttcctctgcagcctgctggcccccatggtcctggccagtgcagctgaaaaggagaaggaaatggacccttttcattatgattaccagaccctgaggattgggggactggtgttcgctgtggtcctcttctcggttgggatcctccttatcctaagtcgcaggtgcaagtgcagtttcaatcagaagccccgggccccaggagatgaggaagcccaggtggagaacctcatcaccgccaatgcaacagagccccagaaagcagagaactgaagtgcagccatcaggtggaagcctctggaacctgaggcggctgcttgaacctttggatgcaaatgtcgatgcttaagaaaaccggccacttcagcaacagccctttccccaggagaagccaagaacttgtgtgtcccccaccctatcccctctaacaccattcctccacctgatgatgcaactaacacttgcctccccactgcagcctgcggtcctgcccacctcccgtgatgtgtgtgtgtgtgtgtgtgtgtgtgactgtgtgtgtttgctaactgtggtctttgtggctacttgtttgtggatggtattgtgtttgttagtgaactgtggactcgctttcccaggcaggggctgagccacatggccatctgctcctccctgcccccgtggccctccatcaccttctgctcctaggaggctgcttgttgcccgagaccagccccctcccctgatttagggatgcgtagggtaagagcacgggcagtggtcttcagtcgtcttgggacctgggaaggtttgcagcactttgtcatcattcttcatggactcctttcactcctttaacaaaaaccttgcttccttatcccacctgatcccagtctgaaggtctcttagcaactggagatacaaagcaaggagctggtgagcccagcgttgacgtcaggcaggctatgcccttccgtggttaatttcttcccaggggcttccacgaggagtccccatctgccccgccccttcacagagcgcccggggattccaggcccagggcttctactctgcccctggggaatgtgtcccctgcatatcttctcagcaataactccatgggctctgggaccctaccccttccaaccttccctgcttctgagacttcaatctacagcccagctcatccagatgcagactacagtccctgcaattgggtctctggcaggcaatagttgaaggactcctgttccgttggggccagcacaccgggatggatggagggagagcagaggcctttgcttctctgcctacgtccccttagatgggcagcagaggcaactcccgcatcctttgctctgcctgtcggtggtcagagcggtgagcgaggtgggttggagactcagcaggctccgtgcagcccttgggaacagtgagaggttgaaggtcataacgagagtgggaactcaacccagatcccgcccctcctgtcctctgtgttcccgcggaaaccaaccaaaccgtgcgctgtgacccattgctgttctctgtatcgtgatctatcctcaacaacaacagaaaaaaggaataaaatatcctttgtttcctaaaaaaaaaaagaaaaaaccgagggcctttttcgggtggcggaacgcggtctgactggcctggtcctagcgttccggacccattttttacaggtggaccctccgcccccaagggggcattatccaaaccggtatcaa

SEQ ID NO: 377040 - DNA, 1885 bp, Homo sapiens
cagcccgactcctaggagcgaggggaggcgggaaagcagctcaagcctcacccaccgccctgcccccagccccgccactcccaggctcctcgggactcggcgggtcctcctgggagtctcggaggggaccggctgtgcagacgccatggagttggtgctggtcttcctctgcagcctgctggcccccatggtcctggccagtgcagctgaaaaggagaaggaaatggacccttttcattatgattaccagaccctgaggattgggggactggtgttcgctgtggtcctcttctcggttgggatcctccttatcctaagtcgcaggtgcaagtgcagtttcaatcagaagccccgggccccaggagatgaggaagcccaggtggagaacctcatcaccgccaatgcaacagagccccagaaagcagagaactgaagtgcagccatcaggtggaagcctctggaacctgaggcggctgcttgaacctttggatgcaaatgtcgatgcttaagaaaaccggccacttcagcaacagccctttccccaggagaagccaagaacttgtgtgtcccccaccctatcccctctaacaccattcctccacctgatgatgcaactaacacttgcctccccactgcagcctgcggtcctgcccacctcccgtgatgtgtgtgtgtgtgtgtgtgtgtgtgactgtgtgtgtttgctaactgtggtctttgtggctacttgtttgtggatggtattgtgtttgttagtgaactgtggactcgctttcccaggcaggggctgagccacatggccatctgctcctccctgcccccgtggccctccatcaccttctgctcctaggaggctgcttgttgcccgagaccagccccctcccctgatttagggatgcgtagggtaagagcacgggcagtggtcttcagtcgtcttgggacctgggaaggtttgcagcactttgtcatcattcttcatggactcctttcactcctttaacaaaaaccttgcttccttatcccacctgatcccagtctgaaggtctcttagcaactggagatacaaagcaaggagctggtgagcccagcgttgacgtcaggcaggctatgcccttccgtggttaatttcttcccaggggcttccacgaggagtccccatctgccccgccccttcacagagcgcccggggattccaggcccagggcttctactctgcccctggggaatgtgtcccctgcatatcttctcagcaataactccatgggctctgggaccctaccccttccaaccttccctgcttctgagacttcaatctacagcccagctcatccagatgcagactacagtccctgcaattgggtctctggcaggcaatagttgaaggactcctgttccgttggggccagcacaccgggatggatggagggagagcagaggcctttgcttctctgcctacgtccccttagatgggcagcagaggcaactcccgcatcctttgctctgcctgtcggtggtcagagcggtgagcgaggtgggttggagactcagcaggctccgtgcagcccttgggaacagtgagaggttgaaggtcataacgagagtgggaactcaacccagatcccgcccctcctgtcctctgtgttcccgcggaaaccaaccaaaccgtgcgctgtgacccattgctgttctctgtatcgtgatctatcctcacaaacgaaaggattaatatcctgttctaaaaaaaaaagggggcgctaaattcctcaaggccattaccgtccccttttgtcaaggcctaaaggggataaacagcagcccgttaaaggagaaacgccgcttgggacccctggtgcatgacccaagaaccaaaattggtactcggaga

SEQ ID NO: 377041 - DNA, 1696 bp, Homo sapiens
ttcctgcccatttccacatgtgccagggaggcagcaagaaagagtggaaggtgcatggcaccagcagaattagtgacagttccagacgccatggagttggtgctggtcttcctctgcagcctgctggcccccatggtcctggccagtgcagctgaaaaggagaaggaaatggacccttttcattatgattaccagaccctgaggattgggggactggtgttcgctgtggtcctcttctcggttgggatcctccttatcctaagtcgcaggtgcaagtgcagtttcaatcagaagccccgggccccaggagatgaggaagcccaggtggagaacctcatcaccgccaatgcaacagagccccagaaagcagagaactgaagtgcagccatcaggtggaagcctctggaacctgaggcggctgcttgaacctttggatgcaaatgtcgatgcttaagaaaaccggccacttcagcaacagccctttccccaggagaagccaagaacttgtgtgtcccccaccctatcccctctaacaccattcctccacctgatgatgcaactaacacttgcctccccactgcagcctgcggtcctgcccacctcccgtgatgtgtgtgtgtgtgtgtgtgtgtgtgactgtgtgtgtttgctaactgtggtctttgtggctacttgtttgtggatggtattgtgtttgttagtgaactgtggactcgctttcccaggcaggggctgagccacatggccatctgctcctccctgcccccgtggccctccatcaccttctgctcctaggaggctgcttgttgcccgagaccagccccctcccctgatttagggatgcgtagggtaagagcacgggcagtggtcttcagtcgtcttgggacctgggaaggtttgcagcactttgtcatcattcttcatggactcctttcactcctttaacaaaaaccttgcttccttatcccacctgatcccagtctgaaggtctcttagcaactggagatacaaagcaaggagctggtgagcccagcgttgacgtcaggcaggctatgcccttccgtggttaatttcttcccaggggcttccacgaggagtccccatctgccccgccccttcacagagcgcccggggattccaggcccagggcttctactctgcccctggggaatgtgtcccctgcatatcttctcagcaataactccatgggctctgggaccctaccccttccaaccttccctgcttctgagacttcaatctacagcccagctcatccagatgcagactacagtccctgcaattgggtctctggcaggcaatagttgaaggactcctgttccgttggggccagcacaccgggatggatggagggagagcagaggcctttgcttctctgcctacgtccccttagatgggcagcagaggcaactcccgcatcctttgctctgcctgtcggtggtcagagcggtgagcgaggtgggttggagactcagcaggctccgtgcagcccttgggaacagtgagaggttgaaggtcataacgagagtgggaactcaacccagatcccgcccctcctgtcctctgtgttcccgcggaaaccaaccaaaccgtgcgctgtgacccattgctgttctctgtatcgtgatctatcctcaacaacaacagaaaaaaggaataaaatatcctttgtttccta

SEQ ID NO: 377042 - DNA, 1816 bp, Homo sapiens
ttcggtgcctctcgccccgtttgtccccccccgccggctggtccggtccggcctgctcctcgggactcggcgggtcctcctgggagtctcggaggggaccggctgtgcaggctaatcagcattgagtccagcaaggttgggaagccaaacctgagactacctgcatgaagccaagaacccttgagaggggctaaagtgatctcagacgccatggagttggtgctggtcttcctctgcagcctgctggcccccatggtcctggccagtgcagctgaaaaggagaaggaaatggacccttttcattatgattaccagaccctgaggattgggggactggtgttcgctgtggtcctcttctcggttgggatcctccttatcctaagtcgcaggtgcaagtgcagtttcaatcagaagccccgggccccaggagatgaggaagcccaggtggagaacctcatcaccgccaatgcaacagagccccagaaagcagagaactgaagtgcagccatcaggtggaagcctctggaacctgaggcggctgcttgaacctttggatgcaaatgtcgatgcttaagaaaaccggccacttcagcaacagccctttccccaggagaagccaagaacttgtgtgtcccccaccctatcccctctaacaccattcctccacctgatgatgcaactaacacttgcctccccactgcagcctgcggtcctgcccacctcccgtgatgtgtgtgtgtgtgtgtgtgtgtgtgactgtgtgtgtttgctaactgtggtctttgtggctacttgtttgtggatggtattgtgtttgttagtgaactgtggactcgctttcccaggcaggggctgagccacatggccatctgctcctccctgcccccgtggccctccatcaccttctgctcctaggaggctgcttgttgcccgagaccagccccctcccctgatttagggatgcgtagggtaagagcacgggcagtggtcttcagtcgtcttgggacctgggaaggtttgcagcactttgtcatcattcttcatggactcctttcactcctttaacaaaaaccttgcttccttatcccacctgatcccagtctgaaggtctcttagcaactggagatacaaagcaaggagctggtgagcccagcgttgacgtcaggcaggctatgcccttccgtggttaatttcttcccaggggcttccacgaggagtccccatctgccccgccccttcacagagcgcccggggattccaggcccagggcttctactctgcccctggggaatgtgtcccctgcatatcttctcagcaataactccatgggctctgggaccctaccccttccaaccttccctgcttctgagacttcaatctacagcccagctcatccagatgcagactacagtccctgcaattgggtctctggcaggcaatagttgaaggactcctgttccgttggggccagcacaccgggatggatggagggagagcagaggcctttgcttctctgcctacgtccccttagatgggcagcagaggcaactcccgcatcctttgctctgcctgtcggtggtcagagcggtgagcgaggtgggttggagactcagcaggctccgtgcagcccttgggaacagtgagaggttgaaggtcataacgagagtgggaactcaacccagatcccgcccctcctgtcctctgtgttcccgcggaaaccaaccaaaccgtgcgctgtgacccattgctgttctctgtatcgtgatctatcctcaacaacaacagaaaaaaggaataaaatatcctttgtttccta

SEQ ID NO: 377043 - DNA, 1663 bp, Homo sapiens
acaggctaggtacgaggcgggtggctaatcggccgagggaccggctgtgcagacgccatggagttggtgctggtcttcctctgcagcctgctggcccccatggtcctggccagtgcagctgaaaaggagaaggaaatggacccttttcattatgattaccagaccctgaggattgggggactggtgttcgctgtggtcctcttctcggttgggatcctccttatcctaagtcgcaggtgcaagtgcagtttcaatcagaagccccgggccccaggagatgaggaagcccaggtggagaacctcatcaccgccaatgcaacagagccccagaaagcagagaactgaagtgcagccatcaggtggaagcctctggaacctgaggcggctgcttgaacctttggatgcaaatgtcgatgcttaagaaaaccggccacttcagcaacagccctttccccaggagaagccaagaacttgtgtgtcccccaccctatcccctctaacaccattcctccacctgatgatgcaactaacacttgcctccccactgcagcctgcggtcctgcccacctcccgtgatgtgtgtgtgtgtgtgtgtgtgtgtgactgtgtgtgtttgctaactgtggtctttgtggctacttgtttgtggatggtattgtgtttgttagtgaactgtggactcgctttcccaggcaggggctgagccacatggccatctgctcctccctgcccccgtggccctccatcaccttctgctcctaggaggctgcttgttgcccgagaccagccccctcccctgatttagggatgcgtagggtaagagcacgggcagtggtcttcagtcgtcttgggacctgggaaggtttgcagcactttgtcatcattcttcatggactcctttcactcctttaacaaaaaccttgcttccttatcccacctgatcccagtctgaaggtctcttagcaactggagatacaaagcaaggagctggtgagcccagcgttgacgtcaggcaggctatgcccttccgtggttaatttcttcccaggggcttccacgaggagtccccatctgccccgccccttcacagagcgcccggggattccaggcccagggcttctactctgcccctggggaatgtgtcccctgcatatcttctcagcaataactccatgggctctgggaccctaccccttccaaccttccctgcttctgagacttcaatctacagcccagctcatccagatgcagactacagtccctgcaattgggtctctggcaggcaatagttgaaggactcctgttccgttggggccagcacaccgggatggatggagggagagcagaggcctttgcttctctgcctacgtccccttagatgggcagcagaggcaactcccgcatcctttgctctgcctgtcggtggtcagagcggtgagcgaggtgggttggagactcagcaggctccgtgcagcccttgggaacagtgagaggttgaaggtcataacgagagtgggaactcaacccagatcccgcccctcctgtcctctgtgttcccgcggaaaccaaccaaaccgtgcgctgtgacccattgctgttctctgtatcgtgatctatcctcaacaacaacagaaaaaaggaataaaatatcctttgtttccta

SEQ ID NO: 377044 - DNA, 1936 bp, Homo sapiens
agagtcatgatatgaccctgatgccgttatctattgcctgtagcgttacatccttgcgttcctgtctagccttgtttctactgttgctaccgtgctttggcctcctcgtcgcagctcttgcctgtctgagctggtctcccgtcccccgtcttctggattgagtccctcggctgcatctgatcccgctgtctgctattgaagtcagataccgcatgtatgacgtctgtaccgctacctgacggctttgctattctgatctcttgtccttctactaggactctccaatctgggaaggctcagaggaggcagcctggaaatgaaatgtcttttcattttttttttcccaaactagttctttctcagaaaccttttatcctaaggctcaggactgtgagcaaccactggggaggtcctgggtttaacaatttcctttccatgtctgccaggctccagcccacctgggagaggcttcttctgaggttcacccctcccctgtgtctttgtctcctttctctgcgtctcagacgaggctgtcataccgggaatttcagtgggcaggtgctcaaggaagggagagaagcagataaggataccagaggcagctgaagtgtttttaatttaaattatcctcctcctcagcctctggaacctgaggcggctgcttgaacctttggatgcaaatgtcgatgcttaagaaaaccggccacttcagcaacagccctttccccaggagaagccaagaacttgtgtgtcccccaccctatcccctctaacaccattcctccacctgatgatgcaactaacacttgcctccccactgcagcctgcggtcctgcccacctcccgtgatgtgtgtgtgtgtgtgtgtgtgtgtgactgtgtgtgtttgctaactgtggtctttgtggctacttgtttgtggatggtattgtgtttgttagtgaactgtggactcgctttcccaggcaggggctgagccacatggccatctgctcctccctgcccccgtggccctccatcaccttctgctcctaggaggctgcttgttgcccgagaccagccccctcccctgatttagggatgcgtagggtaagagcacgggcagtggtcttcagtcgtcttgggacctgggaaggtttgcagcactttgtcatcattcttcatggactcctttcactcctttaacaaaaaccttgcttccttatcccacctgatcccagtctgaaggtctcttagcaactggagatacaaagcaaggagctggtgagcccagcgttgacgtcaggcaggctatgcccttccgtggttaatttcttcccaggggcttccacgaggagtccccatctgccccgccccttcacagagcgcccggggattccaggcccagggcttctactctgcccctggggaatgtgtcccctgcatatcttctcagcaataactccatgggctctgggaccctaccccttccaaccttccctgcttctgagacttcaatctacagcccagctcatccagatgcagactacagtccctgcaattgggtctctggcaggcaatagttgaaggactcctgttccgttggggccagcacaccgggatggatggagggagagcagaggcctttgcttctctgcctacgtccccttagatgggcagcagaggcaactcccgcatcctttgctctgcctgtcggtggtcagagcggtgagcgaggtgggttggagactcagcaggctccgtgcagcccttgggaacagtgagaggttgaaggtcataacgagagtgggaactcaacccagatcccgcccctcctgtcctctgtgttcccgcggaaaccaaccaaaccgtgcgctgtgacccattgctgttctctgtatcgtgatctatcctcaacaacaacagaaaaaaggaataaaatatcctttgtttccta

SEQ ID NO: 377045 - DNA, 954 bp, Homo sapiens
cagcccgactcctaggagcgaggggaggcgggaaagcagctcaagcctcacccaccgccctgcccccagccccgccactcccaggctcctcgggactcggcgggtcctcctgggagtctcggaggggaccggctgtgcagacgccatggagttggtgctggtcttcctctgcagcctgctggcccccatggtcctggccagtgcagctgaaaaggagaaggaaatggacccttttcattatgattaccagaccctgaggattgggggactggtgttcgctgtggtcctcttctcggttgggatcctccttatcctaagtcgcaggtgcaagtgcagtttcaatcagaagccccgggccccaggagatgaggaagcccaggtggagaacctcatcaccgccaatgcaacagagccccagaaagcagagaactgaagtgcagccatcaggtggaagcctctggaacctgaggcggctgcttgaacctttggatgcaaatgtcgatgcttaagaaaaccggccacttcagcaacagccctttccccaggagaagccaagaacttgtgtgtcccccaccctatcccctctaacaccattcctccacctgatgatgcaactaacacttgcctccccactgcagcctgcggtcctgcccacctcccgtgatgtgtgtgtgtgtgtgtgtgtgtgtgactgtgtgtgtttgctaactgtggtggtcagagcggtgagcgaggtgggttggagactcagcaggctccgtgcagcccttgggaacagtgagaggttgaaggtcataacgagagtgggaactcaacccagatcccgcccctcctgtcctctgtgttcccgcggaaaccaaccaaaccgtgcgctgtgacccattgctgttctctgtatcgtgatctatcctcaacaacaacagaaaaaaggaataaaatatcctttgtttccta

SEQ ID NO: 377046 - DNA, 1168 bp, Homo sapiens
cagcccgactcctaggagcgaggggaggcgggaaagcagctcaagcctcacccaccgccctgcccccagccccgccactcccaggctcctcgggactcggcgggtcctcctgggagtctcggaggggaccggctgtgcagacgccatggagttggtgctggtcttcctctgcagcctgctggcccccatggtcctggccagtgcagctgaaaaggagaaggaaatggacccttttcattatgattaccagaccctgaggattgggggactggtgttcgctgtggtcctcttctcggttgggatcctccttatcctaagtcgcaggtgcaagtgcagtttcaatcagaagccccgggccccaggagatgaggaagcccaggtggagaacctcatcaccgccaatgcaacagagccccagaaagcagagaactgaagtgcagccatcaggtggaaggtgagatgctcagtgcctggattggcccctgttgccatcaccgtctgcatcagggcctggacaggggttcaggcgggaaggatggggctagcttttgcagtgggcacagcttttattatgggccctgccctgaggagccttcaggagtctgaaaggggctgtgagagagaccaggactagaaacacccgaagtgtcccacacacatgcatgccaacaccaggaaatggggcttccacacagcccactggccgagtgcatagggcgtcatcccaagtgcaacatgggagaattagagttagtgaaatgctcctaatctcaaaatagcataaagataatggctttccgtggtgactcagaaagtactttagggccacttgtttttttaaacaccttattatgaaacttcccaaccctaaccaaaagtagagcaaatagtatatgatccttccctctccacatttaagggcactgattttagtatctatttccattgttcatcgtagggggcacaggagagtagtaactggcaaatgctgtacagttttcagagtgccaccacacacacagactcactcgagtctgccagaaaaagaggatgggacaggtggggtttagcccattttataggtgaaaccaagatgagagggaatagccccgtggagagtgacagcccggactgtgaactcaggcctttgcggctgtggttcagcgcc

SEQ ID NO: 377047 - DNA, 642 bp, Homo sapiens
ttcggtgcctctcgccccgtttgtccccccccgccggctggtccggtccggcctgctcctcgggactcggcgggtcctcctgggagtctcggaggggaccggctgtgcaggtttgggccttgacgtggctgtggatgcagtcgttctgacccctggtggccgagaggtgaagtgcagtggcggctgcttgctcaaggccggaggaagacgccatggagttggtgctggtcttcctctgcagcctgctggcccccatggtcctggccagtgcagctgaaaaggagaaggaaatggacccttttcattatgattaccagaccctgaggattgggggactggtgttcgctgtggtcctcttctcggttgggatcctccttatcctaagtcgcaggtgcaagtgcagtttcaatcagaagccccgggccccaggagatgaggaagcccaggtggagaacctcatcaccgccaatggtaactgtccgtgaccacctgcccaggtggaaaagagggaacagagagacccctctgtggctcaggaagggactgttgccaggtgcatggccagccagacatgctcccgcagtgccaggagagtgggtctccagggcctctgcagcattgccccctcactccaccaaacag

SEQ ID NO: 377048 - DNA, 412 bp, Homo sapiens
acaaaattagccaggtgtggtgtcatgtgcctgtaatcccagcttctcaggaggctgaggcaggagaatcgcttgaacctgggaggcagaggttgcagtgagccgagattgccccattgcactccagcctgggcaacaagagtgaaactctgtctcaaaaaaaaaaaaaaaaaaattcgtcttccagaacaatctaaagatggagcaggatgcggttttctcctccactctggagacatatgatgtatgcactagactgcaccacagtccccttctctcaccaacgcctttgaatgaggcccaggttcctcagtcctggttctcgatggtgacatagcccaggaacacggtggaaaggatggtgctgagcagctcagtgatgcttccctggggcctgggtccgactacagct

SEQ ID NO: 377049 - DNA, 797 bp, Homo sapiens
tttgagaggcattgaggtaggagactctatgacatgccctcagaatatcagaatcttcttagaaataaactaggaaatgcagatgtttttaactactcagacttttgaggaattaatccttttaaaacatttttgttaaagttagtgtatcagtaagaaacagacctagtttaaaaggaataatcaacaattttataaaggagatggcttattcaaccatagcccctccaacatatctactggaaattctgctggttaactttatctctctctctcttaatttagactttcaacctatgaaaatgtaaatacctttgaaaaaactaaactatcagtcatttacatcttctcatgaatgaaatgcagtgtagggagaggagatggcaggacacagcaaacaggacacatttgcctgcttctctcttgcctaattcttcctgacctgtatttactgatgcttaataatacttgtaagactctaggggttcatttcccatttcagcggaaagtacttcactcaacaacaatattctcaagagtcttctactggaagctagaaagaaataggaatttaagtccatagaatgaaggtagttattcctgcctgtgttgcccacctgttcacaaaaagtacctttatgcttgaaaacattaggttctttggttactgcactgtagtttcaaatggatcctccagatggcattcatgtcttactcagaaagggcactgccattgtccccaaggcttctgtctactaattctattggtcttgtgttttgcttgattggcaaaaaaa

SEQ ID NO: 377050 - DNA, 2418 bp, Homo sapiens
cttccaaattagccattcgaattaagaaacctatcaagaccaagttccggctgcctgtcttcaactggacagcactgaaacccaaccagatcagtggcactgtcttcagcgaacttgatgatgagaagatcttggaggacctggatcttgataagtttgaagaattattcaagacaaaagcgcagggccctgcccttgacctcatctgctccaaaaacaagacagcgcaaaaagctgccagcaaggtgactctgttggaagccaatcgtgccaagaacctggccatcaccctacgcaaggctggccgctcggctgaggagatctgcagggccattcatacgtttgacttgcagacactacctgtggacttcgtggagtgcctgatgcgcttcctgcccacagaggctgaggtaaagctgctgcggcaatatgagcgggagcggcagcccctggaggagttggcagctgaggaccgcttcatgctgctcttcagcaaggtggaacggttgacccagcgaatggctggcatggccttcctggggaacttccaggataacctgcagatgctcacaccgcaactcaatgccatcattgcggcgtccgcttccgtcaagtcttcacagaagctgaagcagatgttggagatcatacttgcactggggaactacatgaacagcagcaagcggggagctgtgtatggcttcaagctccagagcctggatctgctgctggataccaagtccactgaccggaagatgacactgcttcatttcatcgccttgacagtgaaggagaaatacccagacctggctaacttctggcatgagctgcactttgttgagaaggctgcagcagtgtccctggagaacgtgctgctggacgtgaaggagctgggccggggcatggagctgattcggcgtgagtgcagcatccatgacaacagcgtcctccggaacttcctcagtaccaatgaaggcaaactagacaagctccagcgggacgccaagacggctgaggaggcctacaatgcagttgtgcgctactttggcgagagtcccaagactacacctccttctgtattcttcccagtatttgtccgattcattcgttcttacaaggaagcagaacaagagaatgaagcccgcaagaagcaggaggaggtaatgcgggagaagcagctggctcaggaagccaagaaactggatgccaagaccccatcccagcggaacaagtggcaacagcaggagttaatagcagagttgaggcggcgccaggccaaggaacaccggcctgtttatgaggggaaggatggtaccatcgaggacatcatcacagtgctgaagagtgtccctttcacggcccgtactgccaagcggggctcacgcttcttctgtgatgcagcccaccatgatgagtcaaactgttagcccccaaggttggggcccgacaggcctccactgccagcctatggttgttcgccaccaagccaggagtgctgcaccgcccagtggtccccctcgggctccaggcccccactgagaccctctcggaggcagaagcacttcacccctcagagtcctacaagtccaaccagtggacctggaattggccaagggctcaggagagggctgtgttgctctctcaaccatgtccgccccagctcttgaggctggatctttctacttgtgccactatgggcactaggtctgtaggtccctggtgcttccagtactgcactttgcccccaaggtctttgacttcatttcctgaagggtcaccaagggtcagctcagggctaggaaaaaccatttccagccttagcctaaacagggcacatagatctctcccactagagcccagagggatgagaggagagagcaactgttctttctttttttttcccttcctttttgcaggcccatggtcagctctggtctagatgtatctaggcttagggagccctgggaccctgccagtctcagttcatctcttaccaggagcaaggccctctgaagcatgggccgtgccagctgtgccctagtgataagggtaagaggagagatgtcaggctcactgcccttatttctctgcccatttcattctaggctcacactgtccttgtcaaggtgggcagaagagcagaggtcttctctgcaccaaccactctctgcagatggctggagaaagggtgtgccaactcttcaccttctttcctcagctacggtttttttttttttttttttttttggcaggggacaaggagcatggtggtcttggctatttgcttaccttcccgtttctcctctgcccctggaagggaatgtgggggcccacttttttgtacatgtaccacctccctttcctcttactgtacataaacctcagactctccccctctcaacaaaggcttgatgcacc

SEQ ID NO: 377051 - DNA, 2364 bp, Homo sapiens
cttccaaattagccattcgaattaagaaacctatcaagaccaagttccggctgcctgtcttcaactggacagcactgaaacccaaccagatcagtggcactgtcttcagcgaacttgatgatgagaagatcttggaggacctggatcttgataagtttgaagaattattcaagacaaaagcgcagggccctgcccttgacctcatctgctccaaaaacaagacagcgcaaaaagctgccagcaaggtgactctgttggaagccaatcgtgccaagaacctggccatcaccctacgcaaggctggccgctcggctgaggagatctgcagggccattcatacgtttgacttgcagacactacctgtggacttcgtggagtgcctgatgcgcttcctgcccacagaggctgaggtaaagctgctgcggcaatatgagcgggagcggcagcccctggaggagttggcagctgaggaccgcttcatgctgctcttcagcaaggtggaacggttgacccagcgaatggctggcatggccttcctggggaacttccaggataacctgcagatgctcacaccgcaactcaatgccatcattgcggcgtccgcttccgtcaagtcttcacagaagctgaagcagatgttggagatcatacttgcactggggaactacatgaacagcagcaagcggggagctgtgtatggcttcaagctccagagcctggatctgctgctggataccaagtccactgaccggaagatgacactgcttcatttcatcgccttgacagtgaaggagaaatacccagacctggctaacttctggcatgagctgcactttgttgagaaggctgcagcagtgtccctggagaacgtgctgctggacgtgaaggagctgggccggggcatggagctgattcggcgtgagtgcagcatccatgacaacagcgtcctccggaacttcctcagtaccaatgaaggcaaactagacaagctccagcgggacgccaagacggctgaggaggcctacaatgcagttgtgcgctactttggcgagagtcccaagactacacctccttctgtattcttcccagtatttgtccgattcattcgttcttacaaggaagcagaacaagagaatgaagcccgcaagaagcaggaggaggtaatgcgggagaagcagctggctcaggaagccaagaaactggatgccaagaccccatcccagcggaacaagtggcaacagcaggagttaatagcagagttgaggcggcgccaggccaaggaacaccggcctgtttatgaggggaaggatggtaccatcgaggacatcatcacagtgctgaagagtgtccctttcacggcccgtactgccaagcggggctcacgcttcttctgtgatgcagcccaccatgatgagtcaaactgttagcccccaaggttggggcccgacaggcctccactgccagcctatggttgttcgccaccaagccaggagtgctgcaccgcccagtggtccccctcgggctccaggcccccactgagaccctctcggaggcagaagcacttcacccctcagagtcctacaagtccaaccagtggacctggaattggccaagggctcaggagagggctgtgttgctctctcaaccatgtccgccccagctcttgaggctggatctttctacttgtgccactatgggcactaggtctgtaggtccctggtgcttccagtactgcactttgcccccaaggtctttgacttcatttcctgaagggtcaccaagggtcagctcagggctaggacccagagggatgagaggagagagcaactgttctttctttttttttcccttcctttttgcaggcccatggtcagctctggtctagatgtatctaggcttagggagccctgggaccctgccagtctcagttcatctcttaccaggagcaaggccctctgaagcatgggccgtgccagctgtgccctagtgataagggtaagaggagagatgtcaggctcactgcccttatttctctgcccatttcattctaggctcacactgtccttgtcaaggtgggcagaagagcagaggtcttctctgcaccaaccactctctgcagatggctggagaaagggtgtgccaactcttcaccttctttcctcagctacggtttttttttttttttttttttttggcaggggacaaggagcatggtggtcttggctatttgcttaccttcccgtttctcctctgcccctggaagggaatgtgggggcccacttttttgtacatgtaccacctccctttcctcttactgtacataaacctcagactctccccctctcaacaaaggcttgatgcacc

SEQ ID NO: 377052 - DNA, 335 bp, Homo sapiens
gaagatgacactgcttcatttcatcgccttgacagtgaaggagaaatacccagacctggctaacttctggcatgagctgcactttgttgagaaggctgcagcaggtgaggagagcctggctgggtgggcctgccctcacatccagcccaggacaatcccaggaagctatgaggagagagaacacttgggtccatttgtttctggcttttgttatcttctttctgaccacttcaaagctttccgctggagccttaagcaggggccactccagagggagccttcctccaggcgccaggcctggcccagcccagcccttcccagctaggtacagtggg

SEQ ID NO: 377053 - DNA, 503 bp, Homo sapiens
gactgaaaaatgcaatagagagtatcaacagcagaattaatcaagcagaagaaagaatctgtaaacttgaagacattatttaaaattacagttggaggagaaaaagaatgaaaaggaatgaagaaagctcatgggatttatgagacagcatcaaaagaacaaacatttgaataataggagttaaggcagaggaagagagataaagtggtagaaagctgttttaaagaaatattagcagaaaactttccaaatctggggaaagatataatatccaggtacaggaaggtcaaagtctctaattagattcaatccaaacaagactacactaagccttattataattaaactgtcaaaaaacaaagacaaagagaagaccctgacagcagcaagagaaaagaagcaaataacatataagacaatttcaataagcctagtagtacatttctcagcagaaactttataggccaggagagagtaggatgatatgttcaaaatgttgatgg

SEQ ID NO: 377054 - DNA, 476 bp, Homo sapiens
ggtaggaaggcagaaatgtgatagctaagatagagtaaaatatcagaagctgtattgaatttaaccttctgtatggggtaaaaagataatgtgttaagtgaattaataaagtaaaagatgttgtgagtaatatttaacacatgaataattgagaagggataattatactatttcccagaaattatagaacattgaaatttatagaataaatcaagaattggccgggcgcaggggctcatgcctgtaatcctaacactttgggaggccgaggcaggtgaatcacgtgaggtcaggagttcgagaccagcctggccaacatggcaaaacccatctctactaagaatacaaaaattacccaggcgtggtgctgggcacctgtaatcccagctactcaggaggctgaggcaggagaatcacttgaacccaggggacggaggttgcagtgagctgagattgtgccacttcactccaacctg

SEQ ID NO: 377055 - DNA, 501 bp, Homo sapiens
tgcagtgagtcaagattgcaccattgcactccagcctgggagacacagtgagaccctgtcccaaaaataataatagacgggtatggtggctcacgcctgtaatcccagcactttgggaggctgaggcgggtggactgcctgaggtcaggagttcgagaccagccaggccaacatatagtgaaaccccgtctctactaaaaatacaaaaattacctgggcgtggtggcgcacatctgtagtcccagctacttgggaaactgaggcaggagaattgcttgaacccgggaggcaaaggttgcagtgagctgagatcacaccattgcactccagcctgggcaacagagcgagactccatctcaaaaaataataataataataatatagattgtatcattccatataaagtccaaaaagcaggcaaagctaatctatgacattagatcagctaaaggtcacctttggggaagaagagacagaaatagagggcacaggagccccctg

SEQ ID NO: 377056 - DNA, 367 bp, Homo sapiens
ttaatggttttaacttcacagtctcacaggatattcttgtgaaaactgtcaaatagtacatacctgttttaaaaaggtttataagtctgtgaattgatagaaaaatataaagcagagtttctcttgggaggccaaggcgggcggattacgaggtcaggagatcgagaccatcctggataacacggtgaaaccccatctctactaaaaatacaaaaaaatagcagtgcatggtggcaggcgcctgtagtcccagctacttggaaggctgaggcaggagaatgctgtgaacccaggaggcagagtttgcagtgagccgagattgcaccactgcactccagcctgggcaacagagcgagactccatctca

SEQ ID NO: 377057 - DNA, 314 bp, Homo sapiens
gaatgcacaagctatagtctgctgtattcatggagcacacaagaaagaaatgtgaagaggaaagaagccctgtattacttagatttgactgcttcatgccagtctcaggagcttttccagaaatgggtctcactatgttgcccagattagtcttgaacttctggcctcaaaggatcctcccctctcagcctcccaagtagctgggactacaggcttcagccactgcaactgtcagttccgactttccctgcctcagccttgttccctcttacctcacaaagaaaagacggctgccagcaactctagaaaaaagt

SEQ ID NO: 377058 - DNA, 293 bp, Homo sapiens
ggagactctgtctcaaaaaacaacaccgacaacaaaaagatgagctaaaagagctctgcagatgcagactttaggggaactaatgggggtatctgacaataacccaatcaatccttttcattctgagggtgtggggcccttgccagggtgaccgtgggcatatctggaggccccggggcccatgcaggagaccaagctaaggcttccttagtgagcttgcccggctctgctccttggctgcaaaagtctaaatgtctttcagtgaattaacagttcatttggggatgaagaaa

SEQ ID NO: 377059 - DNA, 736 bp, Homo sapiens
tcacagcagctcatgaagaaattccacatgaacagggctgttaaaagccaacccgccagaaagggtagaacggaggaaggacaagagggttctaacacctcctggaggcagagcacccacggaagtttctcaacacttctcgttgattcaagtggaacaccttgaagagaggcccttctgtttccctacacggtggacagcagagctctgaaaattagatgcttccccaaacccagactctcttggaacattcttcccatgcgggtggtatgaactgcgtggcactgctgtcctcgctggcatatatagatttacactccacgcacgagacttccaaggcaacacctaggatttagagactatgttctcagagacgggcatggaggcaacgtcctggttctcatgtggtcaagaaggtagatggagagaaacgtgtgctaagcagcccggccctccccagagaagccacgggcagaggctcaccaacacctgcccctccctccatggtgtcgccggctttcagaataaagccttttctagcatgtctcgttttggggatgtttcctccatgatataccaagcactggaaattcaaatgtcaaaagcgagtcaagacaggaacactaaatgatgtctctctcttgacggttgtctgccagaggtgcttcccttcgaggtacctgaaatcctagaaattgaagttactttgtgactcatgcctactttctcctcactg

SEQ ID NO: 377060 - DNA, 861 bp, Homo sapiens
tgggcgtggtggtgggcgcctgtagtcccagctactggggagggtgaggcagaagaatggcctgaacccgggaggcggagctttcaatgagctgagatcgcgccactgcactccagcctgggcaacagagggagactctgtctcaaaaaacaacaccgacaacaaaaagatgagctaaaagagctctgcagatgcagactttaggggaactaatgggggtatctgacaataacccaatcaatccttttcattctgagggtgtggggcccttgccagggtgaccgtgggcatatctggaggccccggggcccatgcaggagaccaagctaaggcttccttagtgagcttgcccggctctgctccttggctgcaaaagtctaaatgtctttcagtgaattaacagttcatttggggatgaagaaaattgaacctcagcgcccccaaaattttgagggctttgtgaaaatgggaattcatgggagtctgctggtggccaggcctgaaggggaggacagcagtctgcgcaggccgcggggcgagggtgggccgctccatcctgacaccctcggttctttccacagagcacccacggaagtttctcaacacttctcgttgattcaagtggaagtgagtaaattccctgacatccctaccgcttctctgcctctagggtagtaaaaacaaaaacacagctcgtaagacagggtggagaaggcagagaggcttctttctgatttaagctaactctacggttgtgacatgtaacaaaacaaaacacagaaacacagcaccaataaatcaagaaacacagggagatgatcccatggaagtccaagtgagaccttctgtctgaaatcaggg

SEQ ID NO: 377061 - DNA, 378 bp, Homo sapiens
cctccacatgggcggaatgagcagtgactgagcacagcctggtttgggtccagccttggtaatccagcagcctgagatgtttctggaacagggaatgcattgtggataggaggtgaggaagtcccagctaatatcattttggtgagggagaagaggagacaaggccagaaatgtcaacagttgcttggcttcagctgtcctaagtgactggtcctctgggccctagacatgagggcaaatgagaaatgggtccctccaacatgcattccttacttccctttgtcacagcctggacattcaaacagaaacacacccagcatgcctggcactgcccaccatgctgttatccgtccccatctcctttctcctgacctctct

SEQ ID NO: 377062 - DNA, 454 bp, Homo sapiens
ctgccatgtgaggacacacgctcctcccctccagaggatgcagcaacaaggcatcatcttggaagcagagagcagccctcaccagacaagtgaaccggccattgccttgatcttagatttctcagcctacagatccatgaggaaatacatttctattatttgtaaactacccagtttcatgtattctgttatcacagcacaaataaacacagaaactatcatgctgttttcaaaagtttttgttttttagattattacaaagtaaaattcacctttttgtggtatatagctttatgggttttgatacatgtgcagataagtgtaactgctaccacagtgaggatacaggacaattttatcacccaaaaaacttccttgttctgttcctttatagtcacagtctctctcacctctaacccctggcaaccaccaatctgtcttcatcaaaatagtt

SEQ ID NO: 377063 - DNA, 2034 bp, Homo sapiens
tgccccgaatgcactggagtggggatggtccatcggcaactataaactgattctcatcaggaaactgcacattatctccccatcacttcaaaggtctcgtcaggcagaggtgacgccaggagatgatttaaaggtgaaaatgacaaggtttccacccctcaaaccttggctccttttctgacaatacagtctgaatgaacccgatgtctttttttttactgtggaaataggatcggaagagagtaacattttttttttaatcctgataaagaagattgttgggaagctctttgaaaaaaaattttaaattgtggcacagatggattttaaaaagtgttagatctttccaatgaacactaatagagtactctgctcttggctggatttttcagagaatggcaatggtctctgcgatgtcctgggtcctgtatttgtggataagtgcttgtgcaatgctactctgccatggatcccttcagcacactttccagcagcatcacctgcacagaccagaaggagggacgtgtgaagtgatagcagcacaccgatgttgtaacaagaatcgcattgaggagcggtcacaaacagtaaagtgttcctgtctacctggaaaagtggctggaacaacaagaaaccggccttcttgcgtcgatgcctccatagtgattgggaaatggtggtgtgagatggagccttgcctagaaggagaagaatgtaagacactccctgacaattctggatggatgtgcgcaacaggcaacaaaattaagaccacgagaattcacccaagaacctaacagaagcatttgtggtagtaaaggaaaaccaaccctctggaaaatacattttgagaatctcaaacatctcacatatatacaagccaaatggatttcttacttgcactttgactggctaccagataatcacagtgcgtttactgtgtgtaacgaaatatcctacagtgagaagacacagcgttttggcaacaccatggaaagtgggcttaaaaaagggttttctcagtgaaatttttgggcatcatgaagaacgatcaactatcttctaatttgaatctatagttactttgtaccatttgaaatatatgtatatatatatatataatattttgaaatattatctattctcttcaagaaatgaacagtaccacagtttgagacggctggtgtacccctttgagttttggatgttttgtctgttttgctttgttttgttagtcatttctttttctaacggcaaggaagatatgtgcccttttgagaattcaagatggcactgacacgggaaggccagctacaggtggactcctggaatttgaggcatcataatgatactgaatcaagaacttccttctgcttctaccagatggcccaaggaagcacatcgtcctgttttattgctttctaccctgtgcaatattagcatgcaagcttggcttacatagtcatactttatattcaattgatatataataaccgttctaacctcttccaggaaaatatttttagaactactagcttttccacttagaagaaaatgaggattcttaagggagccactccaccatgctattaagactctggcagagttatgggtaggatatggatccctacatgaataagtcctgtaaatacaatgtcttaaggctttgtatagctgtcctagactgcagaaatgtcctctgattaaatccaaagtctggcatcgttaactacatagtgctgtagcaacaagtcttatcatggcatctctttctatgtttggtttgctttttccaagagtattcaggtctcctcttgtgagataggaaggccatgaaaacaattagatttcaagatgatctatgtgaccaaatgttggacagccctattaaagtggtaaacaacttctttctaaaaaaaaaaaaaattgaaaaaaacacaaagggggggcgggcctaaaatttcccccggggggccccatttagccgtccccgtttttttgaaccagggggccccaatggggggcggattataa

SEQ ID NO: 377064 - DNA, 2007 bp, Homo sapiens
aggagtctgcagcttttcagtgcctgggataactatagtttaaagatcattgtgtaaaataggatttttagtcagcatgcattgttttaaaccgactaactgatagcctaaaactttatttttgcattttgccaatccttggagttttgttttgcagaattaagaaaaaaatgaatgtatgatcatctgaaaagggctttctctcaatcccacttcatggcatgacctctgctggatcattagttctagccagagaagtagcaaaggaacatgacgtctgagacctcccttccctcatcagtggggctgactgagctgggggcttgaagccggaggtaacctttcctgtcgaatgttctctttagagaatggcaatggtctctgcgatgtcctgggtcctgtatttgtggataagtgcttgtgcaatgctactctgccatggatcccttcagcacactttccagcagcatcacctgcacagaccagaaggagggacgtgtgaagtgatagcagcacaccgatgttgtaacaagaatcgcattgaggagcggtcacaaacagtaaagtgttcctgtctacctggaaaagtggctggaacaacaagaaaccggccttcttgcgtcgatgcctccatagtgattgggaaatggtggtgtgagatggagccttgcctagaaggagaagaatgtaagacactccctgacaattctggatggatgtgcgcaacaggcaacaaaattaagaccacgagaattcacccaagaacctaacagaagcatttgtggtagtaaaggaaaaccaaccctctggaaaatacattttgagaatctcaaacatctcacatatatacaagccaaatggatttcttacttgcactttgactggctaccagataatcacagtgcgtttactgtgtgtaacgaaatatcctacagtgagaagacacagcgttttggcaacaccatggaaagtgggcttaaaaaagggttttctcagtgaaatttttgggcatcatgaagaacgatcaactatcttctaatttgaatctatagttactttgtaccatttgaaatatatgtatatatatatatataatattttgaaatattatctattctcttcaagaaatgaacagtaccacagtttgagacggctggtgtacccctttgagttttggatgttttgtctgttttgctttgttttgttagtcatttctttttctaacggcaaggaagatatgtgcccttttgagaattcaagatggcactgacacgggaaggccagctacaggtggactcctggaatttgaggcatcataatgatactgaatcaagaacttccttctgcttctaccagatggcccaaggaagcacatcgtcctgttttattgctttctaccctgtgcaatattagcatgcaagcttggcttacatagtcatactttatattcaattgatatataataaccgttctaacctcttccaggaaaatatttttagaactactagcttttccacttagaagaaaatgaggattcttaagggagccactccaccatgctattaagactctggcagagttatgggtaggatatggatccctacatgaataagtcctgtaaatacaatgtcttaaggctttgtatagctgtcctagactgcagaaatgtcctctgattaaatccaaagtctggcatcgttaactacatagtgctgtagcaacaagtcttatcatggcatctctttctatgtttggtttgctttttccaagagtattcaggtctcctcttgtgagataggaaggccatgaaaacaattagatttcaagatgatctatgtgaccaaatgttggacagccctattaaagtggtaaacaacttctttctaaaaaaaaaaaaaattgaaaaaaacacaaagggggggcgggcctaaaatttcccccggggggccccatttagccgtccccgtttttttgaaccagggggccccaatggggggcggattataa

SEQ ID NO: 377065 - DNA, 1915 bp, Homo sapiens
tgccccgaatgcactggagtggggatggtccatcggcaactataaactgattctcatcaggaaactgcacattatctccccatcacttcaaaggtctcgtcaggcagaggtgacgccaggagatgatttaaaggtgaaaatgacaaggtttccacccctcaaaccttggctccttttctgacaatacagtctgaatgaacccgatgtctttttttttactgtggaaataggatcggaagagagtaacattttttttttaatcctgataaagaagattgttgggaagctctttgaaaaaaaattttaaattgtggcacagatggattttaaaaagtgttagatctttccaatgaacactaatagagtactctgctcttggctggatttttcagagaatggcaatggtctctgcgatgtcctgggtcctgtatttgtggataagtgcttgtgcaatgctactctgccatggatcccttcagcacactttccagcagcatcacctgcacagaccagaaggagggacgtgtgaagtgatagcagcacaccgatgttgtaacaagaatcgcattgaggagcggtcacaaacagtaaagtgttcctgtctacctggaaaagtggctggaacaacaagaaaccggccttcttgcgtcgatgcctccatagtgattgggaaatggtggtgtgagatggagccttgcctagaaggagaagaatgtaagacactccctgacaattctggatggatgtgcgcaacaggcaacaaaattaagaccacgagaattcacccaagaacctaacagaagcatttgtggtagtaaaggaaaaccaaccctctggaaaatacattttgagaatctcaaacatctcacatatatacaagccaaatggatttcttacttgcactttgactggctaccagataatcacagtgcgtttactgtgtgtaacgaaatatcctacagtgagaagacacagcgttttggcaacaccatggaaagtgggcttaaaaaagggttttctcagtgaaatttttgggcatcatgaagaacgatcaactatcttctaatttgaatctatagttactttgtaccatttgaaatatatgtatatatatatatataatattttgaaatattatctattctcttcaagaaatgaacagtaccacagtttgagacggctggtgtacccctttgagttttggatgttttgtctgttttgctttgttttgttagtcatttctttttctaacggcaaggaagatatgtgcccttttgagaattcaagatggcactgacacgggaaggccagctacaggtggactcctggaatttgaggcatcataatgatactgaatcaagaacttccttctgcttctaccagatggcccaaggaagcacatcgtcctgttttattgctttctaccctgtgcaatattagcatgcaagcttggcttacatagtcatactttatattcaattgatatataataaccgttctaacctcttccaggaaaatatttttagaactactagcttttccacttagaagaaaatgaggattcttaagggagccactccaccatgctattaagactctggcagagttatgggtaggatatggatccctacatgaataagtcctgtaaatacaatgtcttaaggctttgtatagctgtcctagactgcagaaatgtcctctgattaaatccaaagtctggcatcgttaactacatagtgctgtagcaacaagtcttatcatggcatctctttctatgtttggtttgctttttccaagagtattcaggtctcctcttgtgagataggaaggccatgaaaacaattagatttcaagatgatctatgtgaccaaatgttggacagccctattaaagtggtaaacaacttctttctaaa

SEQ ID NO: 377066 - DNA, 1202 bp, Homo sapiens
tgccccgaatgcactggagtggggatggtccatcggcaactataaactgattctcatcaggaaactgcacattatctccccatcacttcaaaggtctcgtcaggcagaggtgacgccaggagatgatttaaaggtgaaaatgacaaggtttccacccctcaaaccttggctccttttctgacaatacagtctgaatgaacccgatgtctttttttttactgtggaaataggatcggaagagagtaacattttttttttaatcctgataaagaagattgttgggaagctctttgaaaaaaaattttaaattgtggcacagatggattttaaaaagtgttagatctttccaatgaacactaatagagtactctgctcttggctggatttttcagagaatggcaatggtctctgcgatgtcctgggtcctgtatttgtggataagtgcttgtgcaatgctactctgccatggatcccttcagcacactttccagcagcatcacctgcacagaccagaaggagggacgtgtgaagtgatagcagcacaccgatgttgtaacaagaatcgcattgaggagcggtcacaaacagtaaagtgttcctgtctacctggaaaagtggctggaacaacaagaaaccggccttcttgcgtcgatgcctccatagtgattgggaaatggtggtgtgagatggagccttgcctagaaggagaagaatgtaagacactccctgacaattctggatggatgtgcgcaacaggcaacaaaattaagaccacgagaattcacccaagaacctaacagaagcatttgtggtagtaaaggaaaaccaaccctctggaaaatacattttgagaatctcaaacatctcacatatatacaagccaaatggatttcttacttgcactttgactggctaccagataatcacagtgcgtttactgtgtgtaacgaaatatcctacagtgagaagacacagcgttttggcaacaccatggaaagtgggcttaaaaaagggttttctcagtgaaatttttgggcatcatgaagaacgatcaactatcttctaatttgaatctatagttactttgtaccatttgaaatatatgtatatatatatatatagaaaaaatccctttttatttaaattaatttaacaaaaaacttgaggggggggccccggaccccaattggcccttttagtgg

SEQ ID NO: 377067 - DNA, 1856 bp, Homo sapiens
ggacatcagaaccccaggctctccagcctttggacttcaggactgacacaagcaacctgctgggttcttaggcctttggctttgtactgagacttacaccatcagcttccctggtcctgagacttttggacttggattgagccacgctactggcatcccaggatctccagcttgcagacagcctgtcgtgggacttcacagcctccataattatagaatggcaatggtctctgcgatgtcctgggtcctgtatttgtggataagtgcttgtgcaatgctactctgccatggatcccttcagcacactttccagcagcatcacctgcacagaccagaaggagggacgtgtgaagtgatagcagcacaccgatgttgtaacaagaatcgcattgaggagcggtcacaaacagtaaagtgttcctgtctacctggaaaagtggctggaacaacaagaaaccggccttcttgcgtcgatgcctccatagtgattgggaaatggtggtgtgagatggagccttgcctagaaggagaagaatgtaagacactccctgacaattctggatggatgtgcgcaacaggcaacaaaattaagaccacgagaattcacccaagaacctaacagaagcatttgtggtagtaaaggaaaaccaaccctctggaaaatacattttgagaatctcaaacatctcacatatatacaagccaaatggatttcttacttgcactttgactggctaccagataatcacagtgcgtttactgtgtgtaacgaaatatcctacagtgagaagacacagcgttttggcaacaccatggaaagtgggcttaaaaaagggttttctcagtgaaatttttgggcatcatgaagaacgatcaactatcttctaatttgaatctatagttactttgtaccatttgaaatatatgtatatatatatatataatattttgaaatattatctattctcttcaagaaatgaacagtaccacagtttgagacggctggtgtacccctttgagttttggatgttttgtctgttttgctttgttttgttagtcatttctttttctaacggcaaggaagatatgtgcccttttgagaattcaagatggcactgacacgggaaggccagctacaggtggactcctggaatttgaggcatcataatgatactgaatcaagaacttccttctgcttctaccagatggcccaaggaagcacatcgtcctgttttattgctttctaccctgtgcaatattagcatgcaagcttggcttacatagtcatactttatattcaattgatatataataaccgttctaacctcttccaggaaaatatttttagaactactagcttttccacttagaagaaaatgaggattcttaagggagccactccaccatgctattaagactctggcagagttatgggtaggatatggatccctacatgaataagtcctgtaaatacaatgtcttaaggctttgtatagctgtcctagactgcagaaatgtcctctgattaaatccaaagtctggcatcgttaactacatagtgctgtagcaacaagtcttatcatggcatctctttctatgtttggtttgctttttccaagagtattcaggtctcctcttgtgagataggaaggccatgaaaacaattagatttcaagatgatctatgtgaccaaatgttggacagccctattaaagtggtaaacaacttctttctaaaaaaaaaaaaaattgaaaaaaacacaaagggggggcgggcctaaaatttcccccggggggccccatttagccgtccccgtttttttgaaccagggggccccaatggggggcggattataa

SEQ ID NO: 377068 - DNA, 465 bp, Homo sapiens
cacttattgatgaatgtaagtcatttgggaaagttttggaagagtttacattttaatagcaagacaaacatgtattatgatggagcttgtgatgtatttctgcctcctggagttttattttgtttttctgcttatgttttagtcataatgccacaaagttgtggaatttttgtgattaattgctgttactagtactaagagaagcaccagaagagatgccaagaagtttttatatgaataatttctatcagtgagaattaagcatatggaaaatattcatttagttgtattttatacagtaataactcttagctgtcgtgtaagttcctttattcggtttcatagtctttataattttagtgcagaattatattaagcctccaagatgtctgatatttgttcactcacattaggttgtaaaacttagaaactaaattgcaaatatatgtgttattatatactcca

SEQ ID NO: 377069 - DNA, 912 bp, Homo sapiens
atggaaagtgccctgccgagtatcttcactcttgtaataattgcagaattcataattgggaatttgagcaatggatttatagtactgatcaactgcattgactgggtcagtaaaagagagctgtcctcagtcgataaactcctcattatcttggcaatctccagaattgggctgatctgggaaatattagtaagttggtttttagctctgcattatctagccatatttgtgtctggaacaggattaagaattatgatttttagctggatagtttctaatcacttcaatctctggcttgctacaatcttcagcatcttttatttgctcaaaatagcgagtttctctagccctgcttttctctatttgaagtggagagtaaacaaagtgattctgatgatactgctaggaaccttggtcttcttatttttaaatctgatacaaataaacatgcatataaaagactggctggaccgatatgaaagaaacacaacttggaatttcagtatgagtgactttgaaacattttcagtgtcggtcaaattcactatgactatgttcagtctaacaccatttactgtggccttcatctcttttctcctgttaattttctccctgcagaaacatctccagaaaatgcaactcaattacaaaggacacagagaccccaggaccaaggtccatacaaatgccttgaaaattgtgatctcattccttttattctatgctagtttctttctatgtgttctcatatcatggatttctgagctgtatcagaacacagtgatctacatgctttgtgagacgattggagtcttctctccttcaagccactcctttcttctgattctaggaaacgctaagttaagacaggcctttcttttggtggcagctaaggtatgggctaaacgatga

SEQ ID NO: 377070 - DNA, 453 bp, Homo sapiens
agtagccatcccaataggtgtgagatggtatctcactctaattttgattttcatttccctactgattagtgatgttgaccatcttttcatgtgccttttggccatgcgtatatcttccttggagaaatgtctatctaagtcctttgcatacttttaaattaggtcttctggtttttagctgttgaattttaggagttctctattcattttggatattaatcccttatcaaatatatgatttgtaaatcttttctcctgttttgtgtgtggccatttttttctctgctgttactgtcttttgacacacagttttttaaaaattgataaaattattttttgttgcctgtgccttttgtgttaatcaaaaaaatagttgccaaattaagtgtttcgaagcttttgttttatcgttaagggtttataattttagatcttacatttacatctttgatc

SEQ ID NO: 377071 - DNA, 256 bp, Homo sapiens
attaggttcagattcaacgtttttggttgagaaaactacccgaatgatattacggcctgtaatcccagcactctgaaaggcccaggtgggtggatcacttgagctcaggagtttgagaccagcttggcgaacatggtgaaacactgtctctactaaaaatacaaaaattagccgggcgtggtggcacgtgtatgtcattccagttaggaggttgaggcacgagaatcatttgaacccgggaggtggaggttgcagt

SEQ ID NO: 377072 - DNA, 426 bp, Homo sapiens
  misc_feature (373)..(373): n is a, c, g, or t
  misc_feature (381)..(381): n is a, c, g, or t
  misc_feature (402)..(402): n is a, c, g, or t
  misc_feature (420)..(420): n is a, c, g, or t
tcccagtgaattcgagttataatctgattccaaccccctacttccatccccaaccctggtgttttgtttcagtgttttttgttttgttttgtttttttgagacagagtctcactctgtcacccacactgaagtacagtggcacaaactcagctcactgcaacctccgcctcctgggttcaagcgattcttgcgcctcagccttctcagtagcaggaattacaggtgcacaccaccatgcctggggcaacataactctactaaaaatacaaaaattagttgggatgtggtgggtgcatgcctatagttccagctattcggggagggctggatatgggcaggtttcacctggaaccggggtagggtcaaggctcncagtgagnccatgattgcaccacttgcanttcagctggggtgacagngttaag

SEQ ID NO: 377073 - DNA, 377 bp, Homo sapiens
tgaaaccacaagctgagtacaatcagtcaaggttgattaattccacttaaaccattaacacccttgtcagcagatcagaaccctgaggaaatagggaccctacagtttaatttgtgtttacatggcaagggggaaggagggtgactatcctaacccgtagggcacaatgaggacacctcaaccgccaagaatctggcgaaagggccacggccgtagtgagagagaagttggggagaatcctaccaatggaatacaggcaggcccagacaggagtttaaaagaacagaaaagaggatgtagtgtcacagacaaatttcacttgcatcagtcagagtttacctgaggccagtcttgtatagccaaatggagattagtaa

SEQ ID NO: 377074 - DNA, 863 bp, Homo sapiens
gcgtcatttccgggaggggacgaaggggtagttctttcacctcggctgggcgcctagaaaagcctagaaacagctccttttttcttccgcctccgagtcttcgcgtcagcgtcctgcgcagggcccttggggcgaatcgcggtgcgcgtcggggcgaccgccctccctccctgggaggggcgagggggctagcggcgacggctggggcgagcgcgcctgcgcgctgggtgattttttcacgtgtcgccagggccggactgcgagtctctttgcggcgctacactagagcagagtacgagtctgaggcggagggagtaatggcaggacaagcgtttagaaagtttcttccactctttgaccgagtattggttgaaaggagtgctgctgaaactgtaaccaaaggaggcattatgcttccagaaaaatctcaaggaaaagtattgcaagcaacagtagtcgctgttggatcgggttctaaaggaaagggtggagagattcaaccagttagcgtgaaagttggagataaagttcttctcccagaatatggaggcaccaaagtagttctagatgacaaggattatttcctatttagagatggtgacattcttggaaagtacgtagactgaaataagtcactattgaaatggcatcaacatgatgctgcccattccactgaagttctgaaatctttcgtcatgtaaataatttccatatttctcttttataataaactaatgataactaatgacaaaaagattaaatctggtcctttggggcccgcttgggccaattcttttttagactgagcaagcttatccttgcggccgcatttggggcttctttgccaatttcccctatagggg

SEQ ID NO: 377075 - DNA, 842 bp, Homo sapiens
gcgtcatttccgggaggggacgaaggggtagttctttcacctcggctgggcgcctagaaaagcctagaaacagctccttttttcttccgcctccgagtcttcgcgtcagcgtcctgcgcagggcccttggggcgaatcgcggtgcgcgtcggggcgaccgccctccctccctgggaggggcgagggggctagcggcgacggctggggcgagcgcgcctgcgcgctgggtgattttttcacgtgtcgccagggccggactgcgagtctctttgcggcgctacactagagcagagtacgagtctgaggcggagggagtaatggcaggacaagcgtttagaaagtttcttccactctttgaccgagtattggttgaaaggagtgctgctgaaactgtaaccaaaggaggcattatgcttccagaaaaatctcaaggaaaagtattgcaagcaacagtagtcgctgttggatcgggttctaaaggaaagggtggagagattcaaccagttagcgtgaaagttggagataaagttcttctcccagaatatggaggcaccaaagtagttctagatgacaaggattatttcctatttagagatggtgacattcttggaaagtacgtagactgaaataagtcactattgaaatggcatcaacatgatgctgcccattccactgaagttctgaaatctttcgtcatgtaaataatttccatatttctcttttataataaactaatgataactaatgacatccagtgtctccaaaattgtttccttgtactgatataaacacttccaaataaaaatatgtaattaaaaaacataccacctcaaacaccttgt

SEQ ID NO: 377076 - DNA, 848 bp, Homo sapiens
aaaatggcaggagagccggggtaatcggcgagggttgaggcggagggagtatgggcttgtggatgtgtaatatcttgggtaaaaatcatggtgccaggcagggagcttgacccagcgtttcctgaaaatttctggaaaaacctgaagaaggaaaacatttgaccttggaataaactaaggttgaccttaaagctggtctggttgctcaccggaggagcgacaacgacccctaacagacgtaaggaatcgggaattaaacttggaatattgcaggacaagcgtttagaaagtttcttccactctttgaccgagtattggttgaaaggagtgctgctgaaactgtaaccaaaggaggcattatgcttccagaaaaatctcaaggaaaagtattgcaagcaacagtagtcgctgttggatcgggttctaaaggaaagggtggagagattcaaccagttagcgtgaaagttggagataaagttcttctcccagaatatggaggcaccaaagtagttctagatgacaaggattatttcctatttagagatggtgacattcttggaaagtacgtagactgaaataagtcactattgaaatggcatcaacatgatgctgcccattccactgaagttctgaaatctttcgtcatgtaaataatttccatatttctcttttataataaactaatgataactaatgacaaaaaaaaaaaaaagcggggccattatgccgggcgcggcacagaggtctggaagggccttggcctaggggttcctgacccagttctggtcaaggggcacttgcgacccctataggggcggataatccgaaaccggtactagcacaccccg

SEQ ID NO: 377077 - DNA, 512 bp, Homo sapiens
tagctgctctgtgtagtttctcaccatatgagatatagaacgcccgtgggtggcataccgagtcgttctgaacgagaatccatatggcatgtctctgaggtctattcactgggatctgatctatagcaggacgtccagatgacgtacgctcgtatggtctacagagtttacgtccccggcacaagggtggagagattcaaccagttagcgtgaaagttggagataaagttcttctcccagaatatggaggcaccaaagtagttctagatgacaaggattatttcctatttagagatggtgacattcttggaaagtacgtagactgaaataagtcactattgaaatggcatcaacatgatgctgcccattccactgaagttctgaaatctttcgtcatgtaaataatttccatatttctcttttataataaactaatgataactaatgacatccagtgtctccaaaattgtttccttgtactgatataaacacttccaaataaaaatatgtaa

SEQ ID NO: 377078 - DNA, 995 bp, Homo sapiens
  misc_feature (838)..(838): n is a, c, g, or t
gcgtcatttccgggaggggacgaaggggtagttctttcacctcggctgggcgcctagaaaagcctagaaacagctccttttttcttccgcctccgagtcttcgcgtcagcgtcctgcgcagggcccttggggcgaatcgcggtgcgcgtcggggcgaccgccctccctccctgggaggggcgagggggctagcggcgacggctggggcgagcgcgcctgcgcgctgggtgattttttcacgtgtcgccagggccggactgcgagtctctttgcggcgctacactagagcagagtacgagtctgaggcggagggagtaatggcaggacaagcgtttagaaagtttcttccactctttgaccgagtattggttgaaaggagtgctgctgaaactgtaaccaaaggaggcattatgcttccagaaaaatctcaaggaaaagtattgcaagcaacagtagtcgctgttggatcgggttctaaaggaaagggtggagagattcaaccagttagcgtgaaagttggagataaagttcttctcccagaatatggaggcaccaaagtagttctagatgacaaggattatttcctatttagagatggtgacattcttggaaagtacgtagactgaaataagtcactattgaaatggcatcaacatgatgctgcccattccactgaagttctgaaatctttcgtcatgtaaataatttccatatttctcttttataataaactaatgataactaatgacaacaaaaaaaaaacaaaaataacaaaaaaacaaaaaaaaaaaaacaaaaaaaaaaaaaaaaaaaaaaaaaaaaaaaaacaaaaaaaaanaacaaaagaaaaaaaaaaaaattaaaaaaaaaaaatttaattttactttattattaacttcattatattttaatcacattttacaatttcctctattttaatatactctcctactccccttattttacccttatacttttttctttcctcctcttcc

SEQ ID NO: 377079 - DNA, 1079 bp, Homo sapiens
aaaatggcaggagagccggggtaatcggcgagggttgaggcggagggagtatgggcttgtggatgtgtaatatcttgggtaaaaatcatggtgccaggcagggagcttgacccagcgtttcctgaaaatttctggaaaaacctgaagaaggaaaacatttgaccttggaataaactaaggttgaccttaaagctggtctggttgctcaccggaggagcgacaacgacccctaacagacgcaggacaagcgtttagaaagtttcttccactctttgaccgagtattggttgaaaggagtgctgctgaaactgtaaccaaaggaggcattatgcttccagaaaaatctcaaggaaaagtattgcaagcaacagtagtcgctgttggatcgggttctaaaggaaagggtggagagattcaaccagttagcgtgaaagttggagataaagttcttctcccagaatatggaggcaccaaagtagttctagatgacaaggattatttcctatttagagatggtgacattcttggaaagtacgtagactgaaataagtcactattgaaatggcatcaacatgatgctgcccattccactgaagttctgaaatctttcgtcatgtaaataatttccatatttctcttttataataaactaatgataactaatgacatccagtgtctccaaaattgtttccttgtactgatataaacacttccaaataaaaatatgtaaatgaaaaaaaaaaaaaaaaaaaaaaaaaaaaaaaaaaaaaaaaaaaccggggcggggggggggtgcacccggggggggggggggcccaagcgccaaaaagggggggagagacagacaccagcgagactcacgcagatgaggacagcggatgaaaaaaggtgagaatcgaacaaaaaggagggaaaagaaacgggtttaccccgcgggaccaacggtaaaagagaggtactcatcccacgggcaccacgaggggccccagttgaggaggaggattccgacaatattggaaagacagaagttaatcaaacacggagagaagaaaggcgtgtgtacaacgggaacggggagt

SEQ ID NO: 377080 - DNA, 2613 bp, Homo sapiens
gcgtcatttccgggaggggacgaaggggtagttctttcacctcggctgggcgcctagaaaagcctagaaacagctccttttttcttccgcctccgagtcttcgcgtcagcgtcctgcgcagggcccttggggcgaatcgcggtgcgcgtcggggcgaccgccctccctccctgggaggggcgagggggctagcggcgacggctggggcgagcgcgcctgcgcgctgggtgattttttcacgtgtcgccagggccggactgcgagtctctttgcggcgctacactagagcagagtacgagtctgaggcggagggagtaatggcaggacaagcgtttagaaagtttcttccactctttgaccgagtattggttgaaaggagtgctgctgaaactgtaaccaaaggaggcattatgcttccagaaaaatctcaaggaaaagtattgcaagcaacagtagtcgctgttggatcgggttctaaaggaaaggtaaatgggagctgcagtggaactattttttatagtgtgcagtggagggaaaagaagtaattctggagtattaaaagtcgcttattaagtagagtttatgtcgttttcaagatcattaactgctttggttctaatctgtttcttaaagggaaatgactaatataaagttgcttattttatatgaccaatgctatgatgcttattttatgtgatagtttcagagtattaaaaattgtcctcaataggccgggtgcggtggctctcgcctgtaatctcagcactttgggaggccgaggtgtgcggatcacaaggtcaggagttcaagaccagcctgaccaacatggtgaaaccccgtctctactaaagatacaaaaattagccgggtgtggtggcatgcgcctgtaatcccagctactggggaggctgaggcaggagaatcatttgaaccctggaggcggaggttgcaaggagccgaggttgcaaggcgcccctgcattccagtatgggggacagggcgagattctgtctcaaaaaaaaaaaaaaaaaaatcccctcaatagcaatttggtagcctagtgtgatcagtgtttgccttacattctaaatttttaataagacaaaagaggctgtgcgtggtggctcacacctgtaatccttgcattttgggaggccaaagcaggaggatcgtttgagctcaggattcaaaatcaggagttcaaaatcagtctgggcaacataatgagacctcctgtctacaaaataaataaatacaaaagatgtgcttcaaggtaaaatgagggggcatttaagaattgagaggaaacttggactgttcgtttaacccctaacacattgaaattgccctaatcttaaccagttggtatacctggttgtatacctaccagaggaacaggttggtcagtcttgtccaatctgcagcctgggacagctctgaatgccgcctaacgcaaatccctaaactttcttaaaacctgatatttcttttgcaattttttttaagcttaccagctactgctaatgttagtgtattttatgtgtggcccaacacagttcttccagtgtggcccagggaagccaaaagattgcacacctctgttttagatgttcctcagttaattgtttaggcctcgggcttctaaagatctcagccaaaatacacagtaaacgccgttggggccaaataatgttaactgcattgttctagttgcttctgaggaggaaagctctactgaggagctgtcatggagttaggaataggaagactttggggagtggacacttagctgcagtccctttccccaaatctgttctttggagggaacaaaacaatcacaagagtatgttctaaatccaaaaaaactttaaatttttgtatgttgaaagaaggaaaatatgaccatttgtatatggcattttctgggtgctggctactgttgcaggtttatttcatatagttgataagttatgttaatatttaacagttataaagttagctttagttaactaaagttagcttttccagaatattttcttgaacttttacgttggagtcaggttttagtttaagccactgtgtattatttcaaagtgtaactacagtggtatttttgagtgaagatctgtaattctagtatgagtcgtatcacttagccacgaaatatatttttaatataattggatttgagtgaccatgtttcattagttgtagtgatttaaaagttaactgtttatgttgggtgaactagatatctttgctaataaacatccttccttttttaagggtggagagattcaaccagttagcgtgaaagttggagataaagttcttctcccagaatatggaggcaccaaagtagttctagatgacaaggattatttcctatttagagatggtgacattcttggaaagtacgtagactgaaataagtcactattgaaatggcatcaacatgatgctgcccattccactgaagttctgaaatctttcgtcatgtaaataatttccatatttctcttttataataaactaatgataactaatgacatccagtgtctccaaaattgtttccttgtactgatataaacacttccaaataaaaatatgtaa

SEQ ID NO: 377081 - DNA, 2851 bp, Homo sapiens
gcgtcatttccgggaggggacgaaggggtagttctttcacctcggctgggcgcctagaaaagcctagaaacagctccttttttcttccgcctccgagtcttcgcgtcagcgtcctgcgcagggcccttggggcgaatcgcggtgcgcgtcggggcgaccgccctccctccctgggaggggcgagggggctagcggcgacggctggggcgagcgcgcctgcgcgctgggtgattttttcacgtgtcgccagggccggactgcgagtctctttgcggcgctacactagagcagagtacgagtctgaggcggagggagtaatggcaggacaagcgtttagaaagtttcttccactctttgaccgagtattggttgaaaggagtgctgctgaaactgtaaccaaaggaggcattatgcttccagaaaaatctcaaggaaaagtattgcaagcaacagtagtcgctgttggatcgggttctaaaggaaaggtaaatgggagctgcagtggaactattttttatagtgtgcagtggagggaaaagaagtaattctggagtattaaaagtcgcttattaagtagagtttatgtcgttttcaagatcattaactgctttggttctaatctgtttcttaaagggaaatgactaatataaagttgcttattttatatgaccaatgctatgatgcttattttatgtgatagtttcagagtattaaaaattgtcctcaataggccgggtgcggtggctctcgcctgtaatctcagcactttgggaggccgaggtgtgcggatcacaaggtcaggagttcaagaccagcctgaccaacatggtgaaaccccgtctctactaaagatacaaaaattagccgggtgtggtggcatgcgcctgtaatcccagctactggggaggctgaggcaggagaatcatttgaaccctggaggcggaggttgcaaggagccgaggttgcaaggcgcccctgcattccagtatgggggacagggcgagattctgtctcaaaaaaaaaaaaaaaaaaatcccctcaatagcaatttggtagcctagtgtgatcagtgtttgccttacattctaaatttttaataagacaaaagaggctgtgcgtggtggctcacacctgtaatccttgcattttgggaggccaaagcaggaggatcgtttgagctcaggattcaaaatcaggagttcaaaatcagtctgggcaacataatgagacctcctgtctacaaaataaataaatacaaaagatgtgcttcaaggtaaaatgagggggcatttaagaattgagaggaaacttggactgttcgtttaacccctaacacattgaaattgccctaatcttaaccagttggtatacctggttgtatacctaccagaggaacaggttggtcagtcttgtccaatctgcagcctgggacagctctgaatgccgcctaacgcaaatccctaaactttcttaaaacctgatatttcttttgcaattttttttaagcttaccagctactgctaatgttagtgtattttatgtgtggcccaacacagttcttccagtgtggcccagggaagccaaaagattgcacacctctgttttagatgttcctcagttaattgtttaggcctcgggcttctaaagatctcagccaaaatacacagtaaacgccgttggggccaaataatgttaactgcattgttctagttgcttctgaggaggaaagctctactgaggagctgtcatggagttaggaataggaagactttggggagtggacacttagctgcagtccctttccccaaatctgttctttggagggaacaaaacaatcacaagagtatgttctaaatccaaaaaaactttaaatttttgtatgttgaaagaaggaaaatatgaccatttgtatatggcattttctgggtgctggctactgttgcaggtttatttcatatagttgataagttatgttaatatttaacagttataaagttagctttagttaactaaagttagcttttccagaatattttcttgaacttttacgttggagtcaggttttagtttaagccactgtgtattatttcaaagtgtaactacagtggtatttttgagtgaagatctgtaattctagtatgagtcgtatcacttagccacgaaatatatttttaatataattggatttgagtgaccatgtttcattagttgtagtgatttaaaagttaactgtttatgttgggtgaactagatatctttgctaataaacatccttccttttttaagggtggagagattcaaccagttagcgtgaaagttggagataaagttcttctcccagaatatggaggcaccaaagtagttctagatgacaaggtgtgtaaacttaataattctaaaaagaagtcagatatttgcaattagttgtcttaactaatggtttttttcacttgcaggattatttcctatttagagatggtgacattcttggaaagtacgtagactgaaataagtcactattgaaatggcatcaacatgatgctgcccattccactgaagttctgaaatctttcgtcatgtaaataatttccatatttctcttttataataaactaatgataactaatgacaaaaaaaaacaaaaaagaaaaaaatataaagaaaaaaaaacaaaaacaaaaaaaagaaaccaaaaaaacaaaaagaaaaagaaaagaagaggaaagaagaagcgaaaacaaaacgagaagaagagcggcaggaggaacacagcgaggaagggagagcgcagcgcggaacacgcacgaggcctggggcgaatgagggggagcgcaggggaggcagagcggaa

SEQ ID NO: 377082 - DNA, 2718 bp, Homo sapiens
aaaatggcaggagagccggggtaatcggcgagggttgaggcggagggagtatgggcttgtggatgtgtaatatcttgggtaaaaatcatggtgccaggcagggagcttgacccagcgtttcctgaaaatttctggaaaaacctgaagaaggaaaacatttgaccttggaataaactaaggttgaccttaaagctggtctggttgctcaccggaggagcgacaacgacccctaacagacgtaaggaatcgggaattaaacttggaatattggttagtacattcaaatgcgcttccttaacgaataagctgaggtttggtgttaactttcaaagccaaaacgtgttgagatgtatagcacggtggcgttgcctgttgataatgtgattacatttagtttttgtttcaaaacatttctcttcctacaggcaggacaagcgtttagaaagtttcttccactctttgaccgagtattggttgaaaggagtgctgctgaaactgtaaccaaaggaggcattatgcttccagaaaaatctcaaggaaaagtattgcaagcaacagtagtcgctgttggatcgggttctaaaggaaaggtaaatgggagctgcagtggaactattttttatagtgtgcagtggagggaaaagaagtaattctggagtattaaaagtcgcttattaagtagagtttatgtcgttttcaagatcattaactgctttggttctaatctgtttcttaaagggaaatgactaatataaagttgcttattttatatgaccaatgctatgatgcttattttatgtgatagtttcagagtattaaaaattgtcctcaataggccgggtgcggtggctctcgcctgtaatctcagcactttgggaggccgaggtgtgcggatcacaaggtcaggagttcaagaccagcctgaccaacatggtgaaaccccgtctctactaaagatacaaaaattagccgggtgtggtggcatgcgcctgtaatcccagctactggggaggctgaggcaggagaatcatttgaaccctggaggcggaggttgcaaggagccgaggttgcaaggcgcccctgcattccagtatgggggacagggcgagattctgtctcaaaaaaaaaaaaaaaaaaatcccctcaatagcaatttggtagcctagtgtgatcagtgtttgccttacattctaaatttttaataagacaaaagaggctgtgcgtggtggctcacacctgtaatccttgcattttgggaggccaaagcaggaggatcgtttgagctcaggattcaaaatcaggagttcaaaatcagtctgggcaacataatgagacctcctgtctacaaaataaataaatacaaaagatgtgcttcaaggtaaaatgagggggcatttaagaattgagaggaaacttggactgttcgtttaacccctaacacattgaaattgccctaatcttaaccagttggtatacctggttgtatacctaccagaggaacaggttggtcagtcttgtccaatctgcagcctgggacagctctgaatgccgcctaacgcaaatccctaaactttcttaaaacctgatatttcttttgcaattttttttaagcttaccagctactgctaatgttagtgtattttatgtgtggcccaacacagttcttccagtgtggcccagggaagccaaaagattgcacacctctgttttagatgttcctcagttaattgtttaggcctcgggcttctaaagatctcagccaaaatacacagtaaacgccgttggggccaaataatgttaactgcattgttctagttgcttctgaggaggaaagctctactgaggagctgtcatggagttaggaataggaagactttggggagtggacacttagctgcagtccctttccccaaatctgttctttggagggaacaaaacaatcacaagagtatgttctaaatccaaaaaaactttaaatttttgtatgttgaaagaaggaaaatatgaccatttgtatatggcattttctgggtgctggctactgttgcaggtttatttcatatagttgataagttatgttaatatttaacagttataaagttagctttagttaactaaagttagcttttccagaatattttcttgaacttttacgttggagtcaggttttagtttaagccactgtgtattatttcaaagtgtaactacagtggtatttttgagtgaagatctgtaattctagtatgagtcgtatcacttagccacgaaatatatttttaatataattggatttgagtgaccatgtttcattagttgtagtgatttaaaagttaactgtttatgttgggtgaactagatatctttgctaataaacatccttccttttttaagggtggagagattcaaccagttagcgtgaaagttggagataaagttcttctcccagaatatggaggcaccaaagtagttctagatgacaaggattatttcctatttagagatggtgacattcttggaaagtacgtagactgaaataagtcactattgaaatggcatcaacatgatgctgcccattccactgaagttctgaaatctttcgtcatgtaaataatttccatatttctcttttataataaactaatgataactaatgacatccagtgtctccaaaattgtttccttgtactgatataaacacttccaaataaaaatatgtaa

SEQ ID NO: 377083 - DNA, 650 bp, Homo sapiens
gcgtcatttccgggaggggacgaaggggtagttctttcacctcggctgggcgcctagaaaagcctagaaacagctccttttttcttccgcctccgagtcttcgcgtcagcgtcctgcgcagggcccttggggcgaatcgcggtgcgcgtcggggcgaccgccctccctccctgggaggggcgagggggctagcggcgacggctggggcgagcgcgcctgcgcgctgggtgattttttcacgtgtcgccagggccggactgcgagtctctttgcggcgctacactagagcagagtacgagtctgaggcggagggagtaatgaagggtggagagattcaaccagttagcgtgaaagttggagataaagttcttctcccagaatatggaggcaccaaagtagttctagatgacaaggattatttcctatttagagatggtgacattcttggaaagtacgtagactgaaataagtcactattgaaatggcatcaacatgatgctgcccattccactgaagttctgaaatctttcgtcatgtaaataatttccatatttctcttttataataaactaatgataactaatgacatccagtgtctccaaaattgtttccttgtactgatataaacacttccaaataaaaatatgtaa

SEQ ID NO: 377084 - DNA, 759 bp, Homo sapiens
gcgtcatttccgggaggggacgaaggggtagttctttcacctcggctgggcgcctagaaaagcctagaaacagctccttttttcttccgcctccgagtcttcgcgtcagcgtcctgcgcagggcccttggggcgaatcgcggtgcgcgtcggggcgaccgccctccctccctgggaggggcgagggggctagcggcgacggctggggcgagcgcgcctgcgcgctgggtgattttttcacgtgtcgccagggccggactgcgagtctctttgcggcgctacactagagcagagtacgagtctgaggcggagggagtaatggcaggacaagcgtttagaaagtttcttccactctttgaccgagtattggttgaaaggagtgctgctgaaactgtaaccaaaggaggcattatgcttccagaaaaatctcaagggtggagagattcaaccagttagcgtgaaagttggagataaagttcttctcccagaatatggaggcaccaaagtagttctagatgacaaggattatttcctatttagagatggtgacattcttggaaagtacgtagactgaaataagtcactattgaaatggcatcaacatgatgctgcccattccactgaagttctgaaatctttcgtcatgtaaataatttccatatttctcttttataataaactaatgataactaatgacatccagtgtctccaaaattgtttccttgtactgatataaacacttccaaataaaaatatgtaa

SEQ ID NO: 377085 - DNA, 1396 bp, Homo sapiens
tagacaccagatagtcatccatgataatattacatagtcataaagatgtacacacagactactgatttcttgacaaggtgatagaaaacaccaagaggatgaggggagggaggcacatgtgcatgaggaaggcacagtaagaaagctgaatcctcaaccagggcgggaagtcagttctccaaatcccaagctaagaagtcaagacagatagacaaagttatttaaaaacacagcggcaaatacccaaagaaacttttaaatatgtaaatgtggtcgactgtagagacagtgaatcaagtgttgggcgataacatcacgtgatgttatcgcccaacacagttcttccagtgtggcccagggaagccaaaagattgcacacctctgttttagatgttcctcagttaattgtttaggcctcgggcttctaaagatctcagccaaaatacacagtaaacgccgttggggccaaataatgttaactgcattgttctagttgcttctgaggaggaaagctctactgaggagctgtcatggagttaggaataggaagactttggggagtggacacttagctgcagtccctttccccaaatctgttctttggagggaacaaaacaatcacaagagtatgttctaaatccaaaaaaactttaaatttttgtatgttgaaagaaggaaaatatgaccatttgtatatggcattttctgggtgctggctactgttgcaggtttatttcatatagttgataagttatgttaatatttaacagttataaagttagctttagttaactaaagttagcttttccagaatattttcttgaacttttacgttggagtcaggttttagtttaagccactgtgtattatttcaaagtgtaactacagtggtatttttgagtgaagatctgtaattctagtatgagtcgtatcacttagccacgaaatatatttttaatataattggatttgagtgaccatgtttcattagttgtagtgatttaaaagttaactgtttatgttgggtgaactagatatctttgctaataaacatccttccttttttaagggtggagagattcaaccagttagcgtgaaagttggagataaagttcttctcccagaatatggaggcaccaaagtagttctagatgacaaggattatttcctatttagagatggtgacattcttggaaagtacgtagactgaaataagtcactattgaaatggcatcaacatgatgctgcccattccactgaagttctgaaatctttcgtcatgtaaataatttccatatttctcttttataataaactaatgataactaatgacatccagtgtctccaaaattgtttccttgtactgatataaacacttccaaataaaaatatgtaa

SEQ ID NO: 377086 - DNA, 784 bp, Homo sapiens
tccggttcagctcctgcctgatggccatcacagcctgttgcctaagccccttcatgttgcgcatgtgtctgtagaagctcccagcgcacagcttgaatgtcgctagcagcattgtttccttggcaaatgtgccagtggtggggtcgctgccgctgctgctgccgccgctgctgctgcctcttctctcaagggtggtctttcgtccttcctgagcccctcaagcttcgcctctgagctcgtgcgaatttcggcacgagctagagcagagtacgagtctgaggcggagggagtaatggcaggacaagcgtttagaaagtttcttccactctttgaccgagtattggttgaaaggagtgctgctgaaactgtaaccaaaggaggcattatgcttccagaaaaatctcaaggaaaagtattgcaagcaacagtagtcgctgttggatcgggttctaaaggaaagggtggagagattcaaccagttagcgtgaaagttggagataaagttcttctcccagaatatggaggcaccaaagtagttctagatgacaaggattatttcctatttagagatggtgacattcttggaaagtacgtagactgaaataagtcactattgaaatggcatcaacatgatgctgcccattataataaactaatgataactaatgacaaaaagattaaatctggtcctttggggcccgcttgggccaattcttttttagactgagcaagcttatccttgcggccgcatttggggcttctttgccaatttcccctatagggg

SEQ ID NO: 377087 - DNA, 693 bp, Homo sapiens
gcgtcatttccgggaggggacgaaggggtagttctttcacctcggctgggcgcctagaaaagcctagaaacagctccttttttcttccgcctccgagtcttcgcgtcagcgtcctgcgcagggcccttggggcgaatcgcggtgcgcgtcggggcgaccgccctccctccctgggaggggcgagggggctagcggcgacggctggggcgagcgcgcctgcgcgctgggtgattttttcacgtgtcgccagggccggactgcgagtctctttgcggcgctacactagagcagagtacgagtctgaggcggagggagtaatggcaggacaagcgtttagaaagtttcttccactctttgaccgagtattggttgaaaggagtgctgctgaaactgtaaccaaaggaggcattatgcttccagaaaaatctcaaggaaaagtattgcaagcaacagtagtcgctgttggatcgggttctaaaggaaagggtggagagattcaaccagttagcgtgaaagttggagataaagttcttctcccagaatatggaggcaccaaagtagttctagatgacaggaaaaattccaaacaggacagtgccgaaacagaagtaatcatgaggaaagctggaggccggtcactgactaggagatttctctcttcgaatgaaaatagaacatgagcgatagcgaatg

SEQ ID NO: 377088 - DNA, 1161 bp, Homo sapiens
gcgtcatttccgggaggggacgaaggggtagttctttcacctcggctgggcgcctagaaaagcctagaaacagctccttttttcttccgcctccgagtcttcgcgtcagcgtcctgcgcagggcccttggggcgaatcgcggtgcgcgtcggggcgaccgccctccctccctgggaggggcgagggggctagcggcgacggctggggcgagcgcgcctgcgcgctgggtgattttttcacgtgtcgccagggccggactgcgagtctctttgcggcgctacactagagcagagtacgagtctgaggcggagggagtaatggcaggacaagcgtttagaaagtttcttccactctttgaccgagtattggttgaaaggagtgctgctgaaactgtaaccaaaggaggcattatgcttccagaaaaatctcaaggaaaagtattgcaagcaacagtagtcgctgttggatcgggttctaaaggaaagggtggagagattcaaccagttagcgtgaaagttggagataaagttcttctcccagaatatggaggcaccaaagtagttctagatgacaaggattatttcctatttagagatggtgacattcttggaaagtacgtagactgaaataagtcactattgaaatggcatcaacatgatgctgcccattccactgaagttctgaaatctttcgtcatgtaaataatttccatatttctcttttataataaactaatgataactaatgacatccagtgtctccaaaattgtttccttgtactgatataaacacttccaaataaaaatatgtaaatgaaaaaaaaaaaaaaaaaaaaaaaaaaaaaaaaaaaaaaaaaaaccggggcggggggggggtgcacccggggggggggggggcccaagcgccaaaaagggggggagagacagacaccagcgagactcacgcagatgaggacagcggatgaaaaaaggtgagaatcgaacaaaaaggagggaaaagaaacgggtttaccccgcgggaccaacggtaaaagagaggtactcatcccacgggcaccacgaggggccccagttgaggaggaggattccgacaatattggaaagacagaagttaatcaaacacggagagaagaaaggcgtgtgtacaacgggaacggggagt

SEQ ID NO: 377089 - DNA, 812 bp, Homo sapiens
gcgtcatttccgggaggggacgaaggggtagttctttcacctcggctgggcgcctagaaaagcctagaaacagctccttttttcttccgcctccgagtcttcgcgtcagcgtcctgcgcagggcccttggggcgaatcgcggtgcgcgtcggggcgaccgccctccctccctgggaggggcgagggggctagcggcgacggctggggcgagcgcgcctgcgcgctgggtgattttttcacgtgtcgccagggccggactgcgagtctctttgcggcgctacactagagcagagtacgagtctgaggcggagggagtaatggcaggacaagcgtttagaaagtttcttccactctttgaccgagtattggttgaaaggagtgctgctgaaactgtaaccaaaggaggcattatgcttccagaaaaatctcaaggaaaagtattgcaagcaacagtagtcgctgttggatcgggttctaaaggaaagggtggagagattcaaccagttagcgtgaaagttggagataaagttcttctcccagaatatggaggcaccaaagtagttctagatgacaaggattatttcctatttagagatggtgacattcttggaaagtacgtagactgaaataagtcactattgaaatggcatcaacatgatgctgcccattccactgaagttctgaaatctttcgtcatgtaaataatttccatatttctcttttataataaactaatgataactaatgacatccagtgtctccaaaattgtttccttgtactgatataaacacttccaaataaaaatatgtaa

SEQ ID NO: 377090 - DNA, 965 bp, Homo sapiens
  misc_feature (808)..(808): n is a, c, g, or t
gcgtcatttccgggaggggacgaaggggtagttctttcacctcggctgggcgcctagaaaagcctagaaacagctccttttttcttccgcctccgagtcttcgcgtcagcgtcctgcgcagggcccttggggcgaatcgcggtgcgcgtcggggcgaccgccctccctccctgggaggggcgagggggctagcggcgacggctggggcgagcgcgcctgcgcgctgggtgattttttcacgtgtcgccagggccggactgcgagtctctttgcggcgctacactagagcagagtacgagtctgaggcggagggagtaatggcaggacaagcgtttagaaagtttcttccactctttgaccgagtattggttgaaaggagtgctgctgaaactgtaaccaaaggaggcattatgcttccagaaaaatctcaaggaaaagtattgcaagcaacagtagtcgctgttggatcgggttctaaaggaaagggtggagagattcaaccagttagcgtgaaagttggagataaagttcttctcccagaatatggaggcaccaaagtagttctagatgacaaggattatttcctatttagagatggtgacattcttggaaagtacgtagactgaaataagtcactattgaaatggcatcaacatgatgctgcccattccactgaagttctgaaatctttcgtcatgtaaataatttccatatttctcttttataataaactaatgataactaatgacaaaaaaaaaaaaaacaaaaaaaaaaaaaaaaaaaaaaaaaaaaaaaaacaaaaaaaaanaacaaaagaaaaaaaaaaaaattaaaaaaaaaaaatttaattttactttattattaacttcattatattttaatcacattttacaatttcctctattttaatatactctcctactccccttattttacccttatacttttttctttcctcctcttcc

SEQ ID NO: 377091 - DNA, 970 bp, Homo sapiens
gcgtcatttccgggaggggacgaaggggtagttctttcacctcggctgggcgcctagaaaagcctagaaacagctccttttttcttccgcctccgagtcttcgcgtcagcgtcctgcgcagggcccttggggcgaatcgcggtgcgcgtcggggcgaccgccctccctccctgggaggggcgagggggctagcggcgacggctggggcgagcgcgcctgcgcgctgggtgattttttcacgtgtcgccagggccggactgcgagtctctttgcggcgctacactagagcagagtacgagtctgaggcggagggagtaatggcaggacaagcgtttagaaagtttcttccactctttgaccgagtattggttgaaaggagtgctgctgaaactgtaaccaaaggaggcattatgcttccagaaaaatctcaaggaaaagtattgcaagcaacagtagtcgctgttggatcgggttctaaaggaaagggtggagagattcaaccagttagcgtgaaagttggagataaagttcttctcccagaatatggaggcaccaaagtagttctagatgacaaggattatttcctatttagagatggtgacattcttggaaagtacgtagactgaaataagtcactattgaaatggcatcaacatgatgctgcccattccactgaagttctgaaatctttcgtcatgtaaataatttccatatttctcttttataataaactaatgataactaatgacaaaaaaaaacaaaaaagaaaaaaatataaagaaaaaaaaacaaaaacaaaaaaaagaaaccaaaaaaacaaaaagaaaaagaaaagaagaggaaagaagaagcgaaaacaaaacgagaagaagagcggcaggaggaacacagcgaggaagggagagcgcagcgcggaacacgcacgaggcctggggcgaatgagggggagcgcaggggaggcagagcggaa

SEQ ID NO: 377092 - DNA, 809 bp, Homo sapiens
gcgtcatttccgggaggggacgaaggggtagttctttcacctcggctgggcgcctagaaaagcctagaaacagctccttttttcttccgcctccgagtcttcgcgtcagcgtcctgcgcagggcccttggggcgaatcgcggtgcgcgtcggggcgaccgccctccctccctgggaggggcgagggggctagcggcgacggctggggcgagcgcgcctgcgcgctgggtgattttttcacgtgtcgccagggccggactgcgagtctctttgcggcgctacactagagcagagtacgagtctgaggcggagggagtaatggcaggacaagcgtttagaaagtttcttccactctttgaccgagtattggttgaaaggagtgctgctgaaactgtaaccaaaggaggcattatgcttccagaaaaatctcaaggaaaagtattgcaagcaacagtagtcgctgttggatcgggttctaaaggaaagggtggagagattcaaccagttagcgtgaaagttggagataaagttcttctcccagaatatggaggcaccaaagtagttctagatgacaaggattatttcctatttagagatggtgacattcttggaaagtacgtagactgaaataagtcactattgaaatggcatcaacatgatgctgcccattataataaactaatgataactaatgacaaaaagattaaatctggtcctttggggcccgcttgggccaattcttttttagactgagcaagcttatccttgcggccgcatttggggcttctttgccaatttcccctatagggg

SEQ ID NO: 377093 - DNA, 884 bp, Homo sapiens
gcgtcatttccgggaggggacgaaggggtagttctttcacctcggctgggcgcctagaaaagcctagaaacagctccttttttcttccgcctccgagtcttcgcgtcagcgtcctgcgcagggcccttggggcgaatcgcggtgcgcgtcggggcgaccgccctccctccctgggaggggcgagggggctagcggcgacggctggggcgagcgcgcctgcgcgctgggtgattttttcacgtgtcgccagggccggactgcgagtctctttgcggcgctacactagagcagagtacgagtctgaggcggagggagtaatggcaggacaagcgtttagaaagtttcttccactctttgaccgagtattggttgaaaggagtgctgctgaaactgtaaccaaaggaggcattatgcttccagaaaaatctcaaggaaaagtattgcaagcaacagtagtcgctgttggatcgggttctaaaggaaataggccgggtgcggtggctctcgcctgtaatctcagcactttgggaggccgaggtgtgcggatcacaaggaagggtggagagattcaaccagttagcgtgaaagttggagataaagttcttctcccagaatatggaggcaccaaagtagttctagatgacaaggattatttcctatttagagatggtgacattcttggaaagtacgtagactgaaataagtcactattgaaatggcatcaacatgatgctgcccattccactgaagttctgaaatctttcgtcatgtaaataatttccatatttctcttttataataaactaatgataactaatgacatccagtgtctccaaaattgtttccttgtactgatataaacacttccaaataaaaatatgtaa

SEQ ID NO: 377094 - DNA, 892 bp, Homo sapiens
gcgtcatttccgggaggggacgaaggggtagttctttcacctcggctgggcgcctagaaaagcctagaaacagctccttttttcttccgcctccgagtcttcgcgtcagcgtcctgcgcagggcccttggggcgaatcgcggtgcgcgtcggggcgaccgccctccctccctgggaggggcgagggggctagcggcgacggctggggcgagcgcgcctgcgcgctgggtgattttttcacgtgtcgccagggccggactgcgagtctctttgcggcgctacactagagcagagtacgagtctgaggcggagggagtaatggcaggacaagcgtttagaaagtttcttccactctttgaccgagtattggttgaaaggagtgctgctgaaactgtaaccaaaggaggcattatgcttccagaaaaatctcaaggaaaagtattgcaagcaacagtagtcgctgttggatcgggttctaaaggaaagggtggagagattcaaccagttagcgtgaaagttggagataaagttcttctcccagaatatggaggcaccaaagtagttctagatgacaaggtgtgtaaacttaataattctaaaaagaagtcagatatttgcaattagttgtcttaactaatggtttttttcacttgcaggattatttcctatttagagatggtgacattcttggaaagtacgtagactgaaataagtcactattgaaatggcatcaacatgatgctgcccattccactgaagttctgaaatctttcgtcatgtaaataatttccatatttctcttttataataaactaatgataactaatgacatccagtgtctccaaaattgtttccttgtactgatataaacacttccaaataaaaatatgtaa

SEQ ID NO: 377095 - DNA, 833 bp, Homo sapiens
  misc_feature (676)..(676): n is a, c, g, or t
gcgtcatttccgggaggggacgaaggggtagttctttcacctcggctgggcgcctagaaaagcctagaaacagctccttttttcttccgcctccgagtcttcgcgtcagcgtcctgcgcagggcccttggggcgaatcgcggtgcgcgtcggggcgaccgccctccctccctgggaggggcgagggggctagcggcgacggctggggcgagcgcgcctgcgcgctgggtgattttttcacgtgtcgccagggccggactgcgagtctctttgcggcgctacactagagcagagtacgagtctgaggcggagggagtaatgaagggtggagagattcaaccagttagcgtgaaagttggagataaagttcttctcccagaatatggaggcaccaaagtagttctagatgacaaggattatttcctatttagagatggtgacattcttggaaagtacgtagactgaaataagtcactattgaaatggcatcaacatgatgctgcccattccactgaagttctgaaatctttcgtcatgtaaataatttccatatttctcttttataataaactaatgataactaatgacaacaaaaaaaaaacaaaaataacaaaaaaacaaaaaaaaaaaaacaaaaaaaaaaaaaaaaaaaaaaaaaaaaaaaaacaaaaaaaaanaacaaaagaaaaaaaaaaaaattaaaaaaaaaaaatttaattttactttattattaacttcattatattttaatcacattttacaatttcctctattttaatatactctcctactccccttattttacccttatacttttttctttcctcctcttcc

SEQ ID NO: 377096 - DNA, 788 bp, Homo sapiens
gcgagtctctttgcggcgctacactagagcagagtacgagtctgaggcggagggagtaatggtgagtcccgcgtggccccgaggcctgcaggcccgggcctgtctgaggcgtacggggatccctgacgcccctcttttgttgggctgggcgggagggattggtggccactcagtgaccagcgcccgatggcaccttggagcggcaaggcccgcccgacccttttctcccccagggctctttgcacgcgcgtgtgctgccggtgtgtaaggcaggggggcgagaacccgggcgcacgcgcagcgtctcacctgcttctgcagggcctttgtggatgtgtaatatcttgggtaaaaatcatggtgccaggcagggagcttgacccagcgtttcctgaaaatttctggaaaaacctgaagaaggaaaacatttgaccttggaataaactaaggttgaccttaaagctggtctggttgctcaccggaggagcgacaacgacccctaacagacgtaaggaatcgggaattaaacttggaatattggttagtacattcaaatgcgcttccttaacgaataagctgaggtttggtgttaactttcaaagccaaaacgtgttgagatgtatagcacggtggcgttgcctgttgataatgtgattacatttagtttttgtttcaaaacatttctcttcctacaggcaggacaagcgtttagaaagtttcttccactctttgaccgagtattggttgaaaggagtgctgctgaaactgtaaccaaaggaggcattatg

SEQ ID NO: 377097 - DNA, 468 bp, Homo sapiens
ctgggtgctgagataagagtaatctggtggcagtctctcttgttagttttcaggggagaagaagaaattctggagctgctgctgggagggatgtgggagaatttgtctttcatgatacgctgtatgtccacgcagtcacctcattcttgttccctttctcaacttctcttatatgcagataagcacaaacgggacacatgtccagctcatactgctaatgaagtttcagaaatttctgttacaactgtttcccctccagaaaagaaaaacgttatgttcttagttttaaatagtttctctggagtcattgttgtgattgaactctatttacacgagctgtaactcatgacagttctcaaactttcgtgacagaaaacccaactcttttactccaaagcccatatagcacccacaactattaactgtgaccaagaaagagaaggcaagccccaattaacctttgtacgt

SEQ ID NO: 377098 - DNA, 427 bp, Homo sapiens
cactgacctctgtcctcatctcagtatagcttcccttctcacttgctgcattattcagtttcttatcatcgaccatggatcttgtaatgccatcggtactatttttttttgaaggctatatctttaagtagatggcaatattccatcattcactttttataaaattgaagctgcaggtggccgggtgcagtggctcatgcctgtaatcccagcactttgggagcccgaggtgggcagatcacgaggtcaggagatcgagaccatcctggctaacatggtgaaaccccgtctctactaaaaatacaaaaattagccgggcgtggtggtgggcgcctctagtcccagctacctgggaggctgaggcaggagaatggcgtgaatccgggaggtggagcttgcagtgagccgagatcgcgccactgcactc

SEQ ID NO: 377099 - DNA, 369 bp, Homo sapiens
gaatgataggtgaggagttatttttctctcagaattttgaaggctttgtctccttgcctttgttctttcagtatggattttaagaagttcaattttattttgattgttgatcttttatatgaaaccagaaacacataggatcttctctttgcatccagggttctacaataatactgtgagggactttggtatgagtccgtttaaactcatgcccttttgttctcggaagtccttttgaattatttcatcctctctctctgtctctctctctctctctctctctccatctgtgtgtgtgtgtgtttgtgtgtttgtgtgtgtgtgtgttgtgtgtgggcaggggagctcccctatactgtggtactcata

SEQ ID NO: 377100 - DNA, 1399 bp, Homo sapiens
  misc_feature (939)..(939): n is a, c, g, or t
  misc_feature (1399)..(1399): n is a, c, g, or t
ctgttttgatgtcttaggacaagtcattggccctttcctctgatgctttgaagtaggagtgctgtttttgatttccttcttacttctcgatttaagaaagtgtaggcatctatttggtgaggggtttcctaggctattcagaaaggactaatctccctcatgacctctttctcttctctagctcctcaaaactctaccctttcccaagataccccagaggaagaccccagaggaaaacatgctttccagacaggatggctaaatgacttggtgaccaaagtgagtgtgactgtcttttctgattttaaaatgccttcttagtgtgtgaggacattttctgacctggccctataactactgtgcccccagaagctctatcaaggacttaagccccagtttctctcctatgttatcttggtctgttaaggtaggtgaatgtactataaagaaaaggtgcttccattgccttcccttgatatgtctttccttactttgactttgtcagcaatatcacatagagaatacgagattgacctccacagccagatggatttaggttttgtttcccggctctaccattggaactgcaatttgggacaagatacttaacctctcttagcctgagttattctactctcataaatagaatttacctcttaggttgtgagtattaaatattatgagacttgtagttagcctggattacagttaagcaattaatagatgattgttactattatttttcctcattaacaagtagttaaaggccatgcattctgtcatattactgttggtcatgaatttatatatattttttgagacagagtcgcactctgttgcccaggctggagtgcagtggtgcgatcttggtccacggcagcctccacctcctgggttcaagtgattctcatgccacagcctctggagtagctggggttncaggtgcatgccaccatgcctggctaatttttgtatttttagtagagacagggtttcgccatgttgctcatgctggtcttgaactcctgacctcaggtgatccacccgtgttggcctcccaaagtgctgggattacatgtgtgagccaccgcgcccggccatgagtctatattattttaaagaatagtaactcaagataccttaagagaaagatttactgtaaaaatataactggtttttctgaaattggaaagcttttggtaaccaagttaaaatgattattcattgatagtgtgaacatttacctggaaagcctaacaaaatcaagggaaaaagtgttagaaacactaatagaaaaattggataaaatgactacagaaaatgacatgcaaaaatcaatcacttacatatatatacttatatatatatctacatatatacatataaaaatgagataaan

SEQ ID NO: 377101 - DNA, 2822 bp, Homo sapiens
aggataaaattctttatattcctcctgaacaggacttacagtgtacagaccaactgtgattcccatattggaagaaccatggatggtgataaaagaaattttagaaggccctagtccagaatgggaaactaaagcccaagcatgtactccagtggaggatatgtctaaactcacaaaggaagaaacccataccatcaaattagaagactcatatgactacgatgatagactagagaggcgaggaaaaggtggcttctggaaaattcacactgatgaaagaggtttcagtttgaagtcagtcctttcacaagaatatgatcctacagaagaatgtcttagtaaatatgatatatatagaaataattttgaaaagcattcaaacctaattgtacagtttgatacccaattagataataaaacttctgtgtataatgaaggcagggcaaccttcaatcatgtctcatatggtattgtacataggaaaatacttcctggagagaagccttacaagtgtaatgtgtgtgggaaaaaatttaggaaatacccatccctcctgaaacaccaaagtacccatgccaaagagaaatcgtatgaatgtgaagaatgtgggaaagagtttaggcatatctcatcccttattgcacatcagagaatgcacactggagaaaaaccatatgaatgccaccagtgtggtaaagccttcagccagcgtgcacaccttactatacatcagagaattcatactggagagaaaccctataagtgtgatgactgtgggaaagacttcagtcagcgtgcacaccttaccatccatcaaaggacacatactggagagaaaccatataaatgcttggaatgtggtaaaaccttcagtcatagttcatcactgattaatcatcagagagttcatactggagaaaaaccttatatatgcaatgaatgtgggaagactttcagtcagagtacacaccttcttcagcatcaaaaaatacatactgggaagaaaccatataaatgcaatgaatgttggaaagtgtttagtcagagtacttaccttattcgacatcagagaattcattctggagagaagtgttataaatgtaatgaatgtggaaaagcctttgctcattcctcaacccttattcaacatcaaaccactcacactggagagaaatcctatatatgtaatatatgtgggaaagccttcagccagagtgcaaatcttactcaacatcatagaacacatactggagagaaaccatataaatgcagtgtgtgtgggaaagcattcagccagagtgtgcaccttactcaacatcagaggattcataatggagaaaaaccctttaaatgcaatatatgtgggaaagcatatagacaaggcgcaaatcttactcagcatcaaaggattcatactggagaaaaaccctataaatgtaatgaatgtgggaaagctttcatttattcctcatcacttaatcaacatcagagaactcatactggagagagaccctataaatgtaatgaatgtgataaggattttagccagagaacatgccttattcaacaccagagaattcacacaggagagaaaccctatgcatgtcgtatatgtggtaaaaccttcacccagagtacaaaccttattcagcatcaacgtgttcatacaggtgccaaacatcgtaattaatggataagggaaacttcaattcggttttacaactttgtttcaattttgttttgtgcattctatgtgtcagaacattcagaagaagtctgaagaagtgcaatatgttagatactcagcagaagtatcagaagtagtggtatggatataacctatttagatttaatgtgaaatttaagaaggaaacttgacttcttaaccttaatttgatatgattttaattcattacagaaagaaaccctgtgaagggtattcaaaaacataactcatcaactctctatttcaagtacacttatcctttggtatactcgggggattggttccaggaccacccatgtatacgaaaatctacccatactcaagttgcacggtcagcctggtggaacctgtgtatatgaaaagccctacatctatgcaggtttcccatccctgaataatgtgctttcaaactctgttcagttgaaaaaaaaaattccagtataaatggatctgtacagttcaaatgtgttgttcaagggtcaactgtacatcctaatgaggccttatgagtgtaacttaggaaggtgtccatcaaatagagatttcacactagagagtgatcttaaaattacagaaaagagtaagctgctttcaggccttttattcccagctttgaagccttaaaatatgtaaaggactcccttccctgttttacttccccttctcctgttatgccataactgccatatggagccagtaggtttgaaaaaaaaacagttggaagtatcttaaagatttctatgtgaccactggttacaccttccctcagatatggaaatattaaagagaagcttaatgaaagatatgttatgatagaaactaatgtgtatataacattagatgtgtagagatttagttaaacaggcaaaaattaaatgcctcaagcttaaatgaattttcaatacacattagccttgatttcactaggttttgacattcaaggtcatcctgaaggaaaaaagtaggtataaagtatacagttcccatttttttcacctgactcctaaatttatactttaggtttctctgtgactgttttactatggaaagttcatttcttccactgaaacacgtttcttgagtgtctactatgctc

SEQ ID NO: 377102 - DNA, 4077 bp, Homo sapiens
atgcgcagtgacgccgaggcgaggtcgcggctaagcagaggcgccggggtttctgggccgggcttctcaggaccgggctggaacgtgcagctcctggccgggacactctgtgctttgcggggaagggaagtggcggagcccgaggatccgctgccgctcgggactgagcccgccacgcaggcgcctgtgccagcgtcgccattgttgcctgtggccttagggccgctccggctgcccgtcggccgggtcccagcgacaggtattgatgtccgggcgcagcgcgcgagtgtccgcgcgatcagtgacagcccgagcccgtccacgcgcgggctcccgtgctcgtggcttgcgggagggcaaagacggggtggaggctgctgtgggcccagtcccagcgttgcgcgtcgcacggtccccgactcccccgctgccctcgacctcgaccctgcggctgaagaggaggtctcttatccatccctgcaagttctgggctcagaatttgtcactaaggctgctaactctaccttgattctgttctgccctcggctgcagcagcctttgatatagtgtccttgtgactctagcatgagacttcaagcagttggctcactactggagaaataaaggatattgccagattgactctcctgtctgtagcaatgttagcctcaagcaagaggatgaacagttcttcacgttctcaaatccttctaaggtggaagtcagacaaggctcagagtggaccctacaatgttgagaaggaaatccttacttcaagattcttgcgtgacactgagacctgtcgacagaattttaggaattttccatacccagacctggctggtcctcgaaaggcattgagtcaactccgagagctctgccttaagtggctgagacctgagattcactcaaaggaacaaattttggagctgctggtgctggagcaattcctgaccatcctgcctggtgaggttaggacttgggtaaagtcccagtatccagagagcagcgaggaagcagtgactctggtggaggatttgactcagattctagaagaggaagctcctcaaaactctaccctttcccaagataccccagaggaagaccccagaggaaaacatgctttccagacaggatggctaaatgacttggtgaccaaagaatcgatgacattcaaagatgtggctgtagacatcacccaggaggactgggagttaatgcgtcctgtgcagaaggaattatacaagactgtgacgttacagaactattggaacatggtttctctgggacttacagtgtacagaccaactgtgattcccatattggaagaaccatggatggtgataaaagaaattttagaaggccctagtccagaatgggaaactaaagcccaagcatgtactccagtggaggatatgtctaaactcacaaaggaagaaacccataccatcaaattagaagactcatatgactacgatgatagactagagaggcgaggaaaaggtggcttctggaaaattcacactgatgaaagaggtttcagtttgaagtcagtcctttcacaagaatatgatcctacagaagaatgtcttagtaaatatgatatatatagaaataattttgaaaagcattcaaacctaattgtacagtttgatacccaattagataataaaacttctgtgtataatgaaggcagggcaaccttcaatcatgtctcatatggtattgtacataggaaaatacttcctggagagaagccttacaagtgtaatgtgtgtgggaaaaaatttaggaaatacccatccctcctgaaacaccaaagtacccatgccaaagagaaatcgtatgaatgtgaagaatgtgggaaagagtttaggcatatctcatcccttattgcacatcagagaatgcacactggagaaaaaccatatgaatgccaccagtgtggtaaagccttcagccagcgtgcacaccttactatacatcagagaattcatactggagagaaaccctataagtgtgatgactgtgggaaagacttcagtcagcgtgcacaccttaccatccatcaaaggacacatactggagagaaaccatataaatgcttggaatgtggtaaaaccttcagtcatagttcatcactgattaatcatcagagagttcatactggagaaaaaccttatatatgcaatgaatgtgggaagactttcagtcagagtacacaccttcttcagcatcaaaaaatacatactgggaagaaaccatataaatgcaatgaatgttggaaagtgtttagtcagagtacttaccttattcgacatcagagaattcattctggagagaagtgttataaatgtaatgaatgtggaaaagcctttgctcattcctcaacccttattcaacatcaaaccactcacactggagagaaatcctatatatgtaatatatgtgggaaagccttcagccagagtgcaaatcttactcaacatcatagaacacatactggagagaaaccatataaatgcagtgtgtgtgggaaagcattcagccagagtgtgcaccttactcaacatcagaggattcataatggagaaaaaccctttaaatgcaatatatgtgggaaagcatatagacaaggcgcaaatcttactcagcatcaaaggattcatactggagaaaaaccctataaatgtaatgaatgtgggaaagctttcatttattcctcatcacttaatcaacatcagagaactcatactggagagagaccctataaatgtaatgaatgtgataaggattttagccagagaacatgccttattcaacaccagagaattcacacaggagagaaaccctatgcatgtcgtatatgtggtaaaaccttcacccagagtacaaaccttattcagcatcaacgtgttcatacaggtgccaaacatcgtaattaatggataagggaaacttcaattcggttttacaactttgtttcaattttgttttgtgcattctatgtgtcagaacattcagaagaagtctgaagaagtgcaatatgttagatactcagcagaagtatcagaagtagtggtatggatataacctatttagatttaatgtgaaatttaagaaggaaacttgacttcttaaccttaatttgatatgattttaattcattacagaaagaaaccctgtgaagggtattcaaaaacataactcatcaactctctatttcaagtacacttatcctttggtatactcgggggattggttccaggaccacccatgtatacgaaaatctacccatactcaagttgcacggtcagcctggtggaacctgtgtatatgaaaagccctacatctatgcaggtttcccatccctgaataatgtgctttcaaactctgttcagttgaaaaaaaaaattccagtataaatggatctgtacagttcaaatgtgttgttcaagggtcaactgtacatcctaatgaggccttatgagtgtaacttaggaaggtgtccatcaaatagagatttcacactagagagtgatcttaaaattacagaaaagagtaagctgctttcaggccttttattcccagctttgaagccttaaaatatgtaaaggactcccttccctgttttacttccccttctcctgttatgccataactgccatatggagccagtaggtttgaaaaaaaaacagttggaagtatcttaaagatttctatgtgaccactggttacaccttccctcagatatggaaatattaaagagaagcttaatgaaagatatgttatgatagaaactaatgtgtatataacattagatgtgtagagatttagttaaacaggcaaaaattaaatgcctcaagcttaaatgaattttcaatacacattagccttgatttcactaggttttgacattcaaggtcatcctgaaggaaaaaagtaggtataaagtatacagttcccatttttttcacctgactcctaaatttatactttaggtttctctgtgactgttttactatggaaagttcatttcttccactgaaacacgtttcttgagtgtctactatgctc

SEQ ID NO: 377103 - DNA, 3875 bp, Homo sapiens
atgcgcagtgacgccgaggcgaggtcgcggctaagcagaggcgccggggtttctgggccgggcttctcaggaccgggctggaacgtgcagctcctggccgggacactctgtgctttgcggggaagggaagtggcggagcccgaggatccgctgccgctcgggactgagcccgccacgcaggcgcctgtgccagcgtcgccattgttgcctgtggccttagggccgctccggctgcccgtcggccgggtcccagcgacagggtctcttatccatccctgcaagttctgggctcagaatttgtcactaaggctgctaactctaccttgattctgttctgccctcggctgcagcagcctttgatatagtgtccttgtgactctagcatgagacttcaagcagttggctcactactggagaaataaaggatattgccagattgactctcctgtctgtagcaatgttagcctcaagcaagaggatgaacagttcttcacgttctcaaatccttctaaggtggaagtcagacaaggctcagagtggaccctacaatgttgagaaggaaatccttacttcaagattcttgcgtgacactgagacctgtcgacagaattttaggaattttccatacccagacctggctggtcctcgaaaggcattgagtcaactccgagagctctgccttaagtggctgagacctgagattcactcaaaggaacaaattttggagctgctggtgctggagcaattcctgaccatcctgcctggtgaggttaggacttgggtaaagtcccagtatccagagagcagcgaggaagcagtgactctggtggaggatttgactcagattctagaagaggaagctcctcaaaactctaccctttcccaagataccccagaggaagaccccagaggaaaacatgctttccagacaggatggctaaatgacttggtgaccaaagaatcgatgacattcaaagatgtggctgtagacatcacccaggaggactgggagttaatgcgtcctgtgcagaaggaattatacaagactgtgacgttacagaactattggaacatggtttctctgggacttacagtgtacagaccaactgtgattcccatattggaagaaccatggatggtgataaaagaaattttagaaggccctagtccagaatgggaaactaaagcccaagcatgtactccagtggaggatatgtctaaactcacaaaggaagaaacccataccatcaaattagaagactcatatgactacgatgatagactagagaggcgaggaaaaggtggcttctggaaaattcacactgatgaaagaggtttcagtttgaagtcagtcctttcacaagaatatgatcctacagaagaatgtcttagtaaatatgatatatatagaaataattttgaaaagcattcaaacctaattgtacagtttgatacccaattagataataaaacttctgtgtataatgaaggcagggcaaccttcaatcatgtctcatatggtattgtacataggaaaatacttcctggagagaagccttacaagtgtaatgtgtgtgggaaaaaatttaggaaatacccatccctcctgaaacaccaaagtacccatgccaaagagaaatcgtatgaatgtgaagaatgtgggaaagagtttaggcatatctcatcccttattgcacatcagagaatgcacactggagaaaaaccatatgaatgccaccagtgtggtaaagccttcagccagcgtgcacaccttactatacatcagagaattcatactggagagaaaccctataagtgtgatgactgtgggaaagacttcagtcagcgtgcacaccttaccatccatcaaaggacacatactggagagaaaccatataaatgcttggaatgtggtaaaaccttcagtcatagttcatcactgattaatcatcagagagttcatactggagaaaaaccttatatatgcaatgaatgtgggaagactttcagtcagagtacacaccttcttcagcatcaaaaaatacatactgggaagaaaccatataaatgcaatgaatgttggaaagtgtttagtcagagtacttaccttattcgacatcagagaattcattctggagagaagtgttataaatgtaatgaatgtggaaaagcctttgctcattcctcaacccttattcaacatcaaaccactcacactggagagaaatcctatatatgtaatatatgtgggaaagccttcagccagagtgcaaatcttactcaacatcatagaacacatactggagagaaaccatataaatgcagtgtgtgtgggaaagcattcagccagagtgtgcaccttactcaacatcagaggattcataatggagaaaaaccctttaaatgcaatatatgtgggaaagcatatagacaaggcgcaaatcttactcagcatcaaaggattcatactggagaaaaaccctataaatgtaatgaatgtgggaaagctttcatttattcctcatcacttaatcaacatcagagaactcatactggagagagaccctataaatgtaatgaatgtgataaggattttagccagagaacatgccttattcaacaccagagaattcacacaggagagaaaccctatgcatgtcgtatatgtggtaaaaccttcacccagagtacaaaccttattcagcatcaacgtgttcatacaggtgccaaacatcgtaattaatggataagggaaacttcaattcggttttacaactttgtttcaattttgttttgtgcattctatgtgtcagaacattcagaagaagtctgaagaagtgcaatatgttagatactcagcagaagtatcagaagtagtggtatggatataacctatttagatttaatgtgaaatttaagaaggaaacttgacttcttaaccttaatttgatatgattttaattcattacagaaagaaaccctgtgaagggtattcaaaaacataactcatcaactctctatttcaagtacacttatcctttggtatactcgggggattggttccaggaccacccatgtatacgaaaatctacccatactcaagttgcacggtcagcctggtggaacctgtgtatatgaaaagccctacatctatgcaggtttcccatccctgaataatgtgctttcaaactctgttcagttgaaaaaaaaaattccagtataaatggatctgtacagttcaaatgtgttgttcaagggtcaactgtacatcctaatgaggccttatgagtgtaacttaggaaggtgtccatcaaatagagatttcacactagagagtgatcttaaaattacagaaaagagtaagctgctttcaggccttttattcccagctttgaagccttaaaatatgtaaaggactcccttccctgttttacttccccttctcctgttatgccataactgccatatggagccagtaggtttgaaaaaaaaacagttggaagtatcttaaagatttctatgtgaccactggttacaccttccctcagatatggaaatattaaagagaagcttaatgaaagatatgttatgatagaaactaatgtgtatataacattagatgtgtagagatttagttaaacaggcaaaaattaaatgcctcaagcttaaatgaattttcaatacacattagccttgatttcactaggttttgacattcaaggtcatcctgaaggaaaaaagtaggtataaagtatacagttcccatttttttcacctgactcctaaatttatactttaggtttctctgtgactgttttactatggaaagttcatttcttccactgaaacacgtttcttgagtgtctactatgctc

SEQ ID NO: 377104 - DNA, 614 bp, Homo sapiens
gattacaggcacacatcaccatgcccggctaatttttgtatttttagtagagacggggtttcaccatcttggcaaggctggtcttgaactcctgaccttgtgatccaactgtcttgcctcccaaagagctcggattacaggcgggagccaccgcgcccggccctttactggtcttttatagtcactttctctctaatcctttttaatctctttcctctttctttccatttgctcactttttccttttttacatgattttcgtggtgtctctgctctcgtattacctgtaacttcatttcttcatttctgaaatggttttgtctttttcttcagtttccttcctgaattctgtcatttcctaccacagactccgctgccatttggccacctcttccctgcgttcttattctgtgcttattctcctctgttcttattctgtgctgtagtctcccttcggagctgaagttcttgttggaatattagatcatgattttcatctggtttgtggcagtatttgtctgatgagatttcttcatttgtaggagaatagcactgcttttattttttatttttattttttaagactgcagcttgctctgtgacccaggctggag

SEQ ID NO: 377105 - DNA, 3531 bp, Homo sapiens
cgcaatactcagtggataaaaggcttgcagtcccagctgggaaaaagagtcccattatctcccagctgcatagacattccatacggcttggttctgcctggacgcacagcatgcctggctgagagcttgaaacagagttctgcagaaaaactgtaaagatcccgagacatttccctggtaagatctactcttgagatactgactggaagatagactgttttgttccacctgattgtatgggagaaatttttgaccttagaaagtggaaatgaggttgctatggaaactggtaattctgctgccactcataaactcttctgcaggtgatggtcttttaagccgtcctatttttactcaggagccacatgatgtcatttttcctttggatttatcaaaatctgaggtcatcctgaattgtgctgctaatggttacccttcgcctcattataggtggaagcaaaatggcacagacattgattttactatgagttatcactacaggttggatggaggcagtcttgcaatcaatagcccccacacagatcaagatattggcatgtaccagtgcctggccaccaatcttctggggacaattctgagtcggaaggcaaagctccaatttgcatatattgaagactttgaaactaaaacaagaagcacagtatctgtccgagaaggtcaaggtgtggtgcttctctgtggcccaccgccacattttggagatttatcttatgcatggaccttcaatgataaccccttatacgtccaagaggacaataggcgatttgtatctcaagagacgggaaacttgtacattgccaaagtggaaccatcagatgtgggcaactacacttgctttataactaacaaagaggcccagagaagtgttcaaggtccacccactccattagtgcagcgcactgatggtgtgatgggggaatatgaaccaaagattgaagtgcgttttcctgaaactatacaagctgcaaaggattcatctgtaaaactggaatgttttgcccttggaaatccagtccccgatattagttggagaaggttggacgggagcccgttgccagggaaagtcaagtacagcaaatcccaagctatccttgaaatcccgaacttccaacaagaagatgaaggcttttatgagtgcattgcaagcaaccttcgaggaagaaaccttgcaaagggtcaactcattttttatgctcctccagaatgggaacagaaaatccaaaatacacacctctctatctatgacaacttgctctgggaatgtaaagctagtggaaagccaaacccttggtatacatggttaaaaaatggtgaacgactcaacccagaggagagaattcaaatagaaaatgggacactcatcataacgatgctgaatgtgtcagattctggtgtgtaccaatgtgctgcagaaaacaaatatcagataatttatgcaaatgctgaattgagagttttagcctcagctccagatttctccaaaagtccagttaaaaaaaagtcttttgttcaagttggtggggatattgttatcggatgcaaaccaaatgcttttcccagggcagctatctcttggaaaagaggaacggagacccttagacaaagcaaaagaatatttctcttggaggatggcagcctcaagatatataatattaccaggtcagatgctggatcatatacatgcatagccacaaatcagtttggcactgcaaagaacactggcagcctcattgtaaaagagagaactgtcattaccgtcccaccttccaaaatggatgttacagttggcgagagtatagtgctaccatgccaggtgtcccatgacccctccattgaagtggtatttgtatggtttttcaatggagatgtcatagacttaaaaaaaggagtggctcattttgaaaggattggaggagaatctgttggggatttgatgataaggaatattcagttacatcattcaggaaaatatctctgcacagtacaaacaaccctagaaagtttatctgcagtagccgatatcattgttagaggtccaccaggtcctcctgaggatgtgcaagtggaagacatttccagtactacttctcaactaagttggagagcaggcccagataataacagtcccattcaaatatttactattcagactcggacaccattttctgtgggttggcaggctgttgctacagttccagaaattctcaatggtaagacatacaatgcaacagtggttggtttgagtccttgggtggaatatgaatttcgtgttgttgccggcaacagcattgggattggagaaccaagtgaaccatcagaattgttaagaactaaagcatcagtccctgttgtggcaccagtaaacatccatggaggtggaggaagtcggtctgaactcgtcattacgtgggagtcaattccagaagaactgcagaatggggagggatttggatatatcatcatgttccggccagtgggctcgacaacctggtccaaggagaaagtatcatctgtggaatcatcaaggtttgtctacagaaatgaaagcatcatcccactgtctccctttgaagtcaaagtgggtgtgtataataatgaaggagaaggatccctgagtactgtgaccattgtctactctggggaagatgaacctcaactggccccaaggggaacttctctccagagtttttctgcttctgaaatggaggtttcatggaatgctattgcctggaatagaaacactggaagagtgctgggctatgaggtcttatactggacagatgactccaaagaatccatgataggtaaaattagagtcagtggaaatgtcacaaccaaaaacatcacggggctgaaagctaataccatctactttgcttccgtaagagcttacaacactgctgggacagggccctcaagccccccagtcaatgttaccaccaaaaagtctcctccaagccaaccaccagcaaacattgcctggaagctgacaaactctaaattatgcttgaactgggagcatgtaaaaaccatggaaaatgagtctgaagttttggggtacaagattctgtaccggcaaaacagacagagtaaaactcatattttggaaacaaacaatacatcagctgagcttctggttccatttgaagaagactacttaattgaaataagaacagtcagtgatggtggagatggaagcagcagtgaggaaattaggattccaaaaatgtcaagtttgagttccagaggaattcaattcttagaacctagcacccattttctttccattgtcattgtgatttttcactgttttgctattcagccacttatctgatgaataaaaccataaatctttgagagttttttgaaagcaaatcattctgtatatatgctctccagcctctgacacaagatgcgttcttaatacagacttgtttgcaaagaaaaaaaaaagtatattattaaaatcctgtaaatatctatggtatattaataaaacaattttaaaca

SEQ ID NO: 377106 - DNA, 707 bp, Homo sapiens
aattaatatatttcaaatgacactgaagacattttagctccttctatgcaaatcatcgaagacttattttttcttttcatgttgatgcatcatactttgaccatgagctaattaacattcatttggatctttgattatctctttaaagctccaagccaaccaccagcaaacattgcctggaagctgacaaactctaaattatgcttgaactgggagcatgtaaaaaccatggaaaatgagtctgaagttttggggtacaagattctgtaccggcaaaacagacagagtaaaactcatattttggaaacaaacaatacatcagctgagcttctggttccatttgaagaagactacttaattgaaataagaacagtcagtgatggtggagatggaagcagcagtgaggaaattaggattccaaaaatgtcaagtttgagttccagaggaattcaattcttagaacctagcacccattttctttccattgtcattgtgatttttcactgttttgctattcagccacttatctgatgaataaaaccataaatctttgagagttttttgaaagcaaatcattctgtatatatgctctccagcctctgacacaagatgcgttcttaatacagacttgtttgcaaagaaaaaaaaaagtatattattaaaatcctgtaaatatctatggtatattaataaaacaattttaaaca

SEQ ID NO: 377107 - DNA, 571 bp, Homo sapiens
catcactaatcaagtgtggctttcataaggagctgagtcacaactttcaagtcctcctcaaaacaattttctaagccaaccaacaccagtcagtcagagttagcaggcaataataatgtatcatttttgcattagaaaaatcacttactcatctgcctgaagctgtgattgagtgcaagtcattagcatccaatgttggccaatcctttaggcagactttgccaatttagggattttccttttgcatttttatacttaaatcagatgtccttggacaaagacacggtaaggcactttctaaaattaaatataatgtgaatgagacaagtataataaaatatgttactagaagagaaatgatagtatgaaattggggttttgaaaaattaatctaacaggcaatactttatctcaaaatatttttgtcttatttttatattttgcaggtttgagttccagaggaattcaattcttagaacctagcacccattttctttccattgtcattgtgatttttcactgttttgctattcagccacttatctgatgaataaaaccataaatctttgag

SEQ ID NO: 377108 - DNA, 504 bp, Homo sapiens
gataactacctgggtaaatatataagattattttcttcttatttaaagtaagagtgagattcttatcaacaatagcataaaggctgaaggggagaaatggaagtctattagtgtaatcttatacatgatgtggtatgatgtcacttgaatgtagaattataaagataaacagcataaactcttaaagcaaccaccaaaataacaaagagttataactaataattcagcaaaggagataaaatgaaattaggccaggtgaggtggctcacgcctgtaatcccagcactttgggaagctaaggcaggtggatcacttgaggtcaggagttcgggaccagcctggccaacgtggtgaaaccccatctctactaaaaatacaaaattagccaggtgtggtggcacacacctgtaatcccagttactcgggaggctgagacaggagaattgctggaacctaggaggtggaggttgcattgagccaagattgtgccactgcactccagca

SEQ ID NO: 377109 - DNA, 1864 bp, Homo sapiens
taacatcaaatggcacagcagtatgtctaaattgcccttaaagaaatacaaaatgggccgggcatgtggctcacacctgtaatcccagcactttgggatgccaagccaggcgaatcgcaaggtcaggaattcgagaccagcctggccaatatggtgaaacctcgtctctaccaaaaatacaaaaattagccaggcatggtggtgggcgcctgtagtctcagctactcgggaggctgaggcaggagaatctcttgaacctgggaggcagaggttgcagtgagccgagatcgcaccactgcactccagcctgggcgacagagtgagactccgtctcagaaatacaaaatgagtagtaaatttatctttgaaatctgcaaaacaaatgtaccctaaatgttataaataaaggtcagtaaatttaagttaaacagtgtgggggcaaaggatttttatcatctttatatccatttctctttttttatcctccccttttacacatagatgcgaatcagtagttgttgtttttggaatttgtgacactgtgagccattggctgtgcttccatatctggtttgttggccaaactttggagctatgtcgtttttcacctctcagatactaaggatgagcttccccatacttggcattagcctctgggatagtcagccaacgttatcttcttctagggacttggtactcaaccgagcactcaataagtgcttcattcaggtcatagctggactctgcattgttgattgtctctctgtctttcttttttttaaatttgagatattcacataccagaaaatttaccgtttaaacaatttagtgtttattaacatatttacagggaatatacaaccatcatcattatcttaatttgagaacacttttattactctaaaaagaaattgcctacccatcagcagtcacttcccattccttccttcccctacccactgggaactgctaatctacttttatctgtatggatttgactattctggacacttcatatacatggaatcatgcaatatgtggccttttgtgtctggtttctttcacttaacatgttttcaagccttgtctatgctatagtatattattacctcatttctttttatgcttacataaaattccattgtgtggtgtgccacagtttatccattcacctgttagtggacatttgggttgcttccaccttttggcagttgtgaataatactgcgaggaacatttgtatacaagtttttgtgtagacgtacgttttcctctttcttgtgtaaatacttaggagtgtaatggctaagtcatatggtagctaaatattaacattttaggaattgccaagctgttttccaaggcaactgcaccattttacattcccagtaacaacctgtgagcattcaaatttttccgtatcgtcaaccaacatttattattatctttctcattgtggtaaaatgtctattcagattctgacattttagcttttgatataatcactttagggtcttcctcatgtaatatttatatttttccctttttctgtatatccttttttttctctctgaaaaacgtaacactgtcagccagaggaagtaatatattctagggaatgggaaactcatgcttcctgtgagtctttaaactgtccattgtccatcttggcaacatgaagaaaccccgtctctacaaaaagtacaaaaatcagccaggtgtggtggcacacggctatagccccagcttctcgggtggctgaggtgggaggatcacctgagcccagggggtcaaggttgcagtgagctgtgatcgtgtccctgtactctaccctgggtaacagagtgagacctatctcaaaaaaa

SEQ ID NO: 377110 - DNA, 652 bp, Homo sapiens
tgctaaaattaatgtgggggagacacaaaggatcccaaatagccaaacaatcttgaccaaaaagagcaaagctggagacatcacactactgtattgcaaaatttattacaaagctatagcaatcaaaaaagcatgatgctggcataaaaacagacaagtctaccaatgaaataggacagagagcccagaaataaacccatgcatctacagtcaattgctttttgacaggaacacacattgaggaaaggacaatctgttcaaaaggtggtattgggaaaactggatatccacatatagaagaatgaaagtggatctttatttcacccctcatatgagaatcaactcaaaatggaataaagacttgaaactatgaaactgaaactataaaactgctagaggtctggacagagatttctttgatatgaacccaaaagcataagcaataaaagcaaaaatagacaaatggaattgcattaaagtgaaaagctactgcatagaaaaggaaacaatgaaggaaagagacaacacacagattgggagaaaatatttgcaaatgatacactggagaagggactaatatccgaaatatactaggaactcaaactactcagcaacaagaaaacagccctgttaaaaataagcaaaggacttg

SEQ ID NO: 377111 - DNA, 476 bp, Homo sapiens
aacaagctgcccgatgctgatattgcaggtcagtggaccacacttttgagtaaggtctagggtcttagcctttatgcgagagtctcagtttcatttcttaaggcccttctgcccctgcatatgtattaaaacccaagttggttttaatacatgggtaacacagcatgttacccatattaatcagtgcactctcagctctgtcctccagattcttcatttctggtacgtgaggcatttcctacctaccttttcagcttagcttgatgtgtgtgtttgttggggaggggagtgggtatacgtgtgcacttatcacatattttatccattatatatagtaataagacttttaagttgtcttcacatacttctctgaatagtttggtcccaccaataaacctatcactgttcaactggaagtttcctgtaaatctatttatagaccttttgggaaaatgccattaaataaataccacatt

SEQ ID NO: 377112 - DNA, 468 bp, Homo sapiens
acacacacacacacacacacacacacacacatatacatacacacatgcacacatgtacacacatgcatcatacatatgcacatatacataacaaacacatacacacacatacagtcatgcctacttaactacaaggatatgttccaagaaatgcatcattatgtaatttcattgctatgcaagcatcacagagtatacttacacaaagtcacatggtgtagcctactatacacctaggctgtatggtgtagtctattggtcctatgcaacaaaccagtacagcatgtgaccactgcataccataggcagttgtaacacaatggtaagtattggtgtatctaaacatacctacatagaaaatgcacagtacaaatgtggtattataatcttatgggacaaccatcatatagatgatttctgattgaccaaaacagtattatgcagcatatgacagtacatacacacaca

SEQ ID NO: 377113 - DNA, 1444 bp, Homo sapiens
atcaaggtgatcccaaaacgaaccaacagaccaggcatcagcacaacagaccggggttttccacgagcccgctaccgcgcccggaccaccaactacaacgtccggctttctgagttgggtggcgggaaaggcgatgagtaaaggccgggcagaagctgcggcgggagccgccgggatcctcctgaggtacctgcaggagcagaaccggccctacagctcccaggatgtgttcgggaacctacagcgggaacacggactgggcaaggcggtggtggtgaagacgctggagcagctggcgcaacaaggcaagatcaaagagaagatgtacggcaagcagaagatctattttgcggatcaggaccagtttgacatggtgagtgatgctgaccttcaagtcctagatggcaaaatcgtggccctcactgctaaggtgcagagcttgcagcagagctgccgctacatggaggctgagctcaaggaattatctagtgccctgaccacaccagagatgcagaaagaaatccaggagttaaagaaggaatgcgctggctacagagagagattgaagaacattaaagcagctaccaatcatgtgactccagaagagaaagagcaggtgtacagagagaggcagaagtactgtaaggagtggaggaagaggaagaggatggctacagagctgtctgatgcaatacttgaaggataccccaagagcaagaagcagttctttgaggaagttgggatagagacggatgaagattacaacgtcacactcccagacccctgaggggcccacggtcaggactggtggggactgcaggatgtcagaagagtgagatgtcttgcactggctaccttgtttttggttggcttttgttgttgttcctgctactttcacctttaagcagagcagtcaggagacaagcataaaccagagcactgggtagagaggatgagggctggtggctgggggtagaccccacgcatttcattgtctaaattgcagtagcttgaggttaacatttagacttggaacaatgctaaaggaaagcatttggcaatatttattataatttaattttatataaaaatatttaatttcctctggatagtcaaacctgccagatatcaaacctgaggaaggcagaagtgaatttggagaactagggtagagagaggttgctataaaacgagcatttggagggcccacggcttcactcaggacctgctgggcttgtgtaccccaggagcccttttaagtatcttttgtacgcttttcaccccacccccaagtcctgggagaaatgcaggcaacactgagacatgggagaggccaagatatgcttgacagaaagggtgattttgaggctcagttaatatttcaaaattgtaaccgtagcaaaactgcattggtatttagaaaaataaaaaatttccaatatgt

SEQ ID NO: 377114 - DNA, 1426 bp, Homo sapiens
  misc_feature (1)..(1): n is a, c, g, or t
  misc_feature (4)..(4): n is a, c, g, or t
  misc_feature (6)..(6): n is a, c, g, or t
nacnanggagtccgggaggggtcgctttgctcctccggaaggcttccccttcagccaatcaccgttcgaggcccgcccccgtcgccggaaggagccgtcgccccgagcaactacaacgtccggctttctgagttgggtggcgggaaaggcgatgagtaaaggccgggcagaagctgcggcgggagccgccgggatcctcctgaggtacctgcaggagcagaaccggccctacagctcccaggatgtgttcgggaacctacagcgggaacacggactgggcaaggcggtggtggtgaagacgctggagcagctggcgcaacaaggcaagatcaaagagaagatgtacggcaagcagaagatctattttgcggatcaggaccagtttgacatggtgagtgatgctgaccttcaagtcctagatggcaaaatcgtggccctcactgctaaggtgcagagcttgcagcagagctgccgctacatggaggctgagatgcagaaagaaatccaggagttaaagaaggaatgcgctggctacagagagagattgaagaacattaaagcagctaccaatcatgtgactccagaagagaaagagcaggtgtacagagagaggcagaagtactgtaaggagtggaggaagaggaagaggatggctacagagctgtctgatgcaatacttgaaggataccccaagagcaagaagcagttctttgaggaagttgggatagagacggatgaagattacaacgtcacactcccagacccctgaggggcccacggtcaggactggtggggactgcaggatgtcagaagagtgagatgtcttgcactggctaccttgtttttggttggcttttgttgttgttcctgctactttcacctttaagcagagcagtcaggagacaagcataaaccagagcactgggtagagaggatgagggctggtggctgggggtagaccccacgcatttcattgtctaaattgcagtagcttgaggttaacatttagacttggaacaatgctaaaggaaagcatttggcaatatttattataatttaattttatataaaaatatttaatttcctctggatagtcaaacctgccagatatcaaacctgaggaaggcagaagtgaatttggagaactagggtagagagaggttgctataaaacgagcatttggagggcccacggcttcactcaggacctgctgggcttgtgtaccccaggagcccttttaagtatcttttgtacgcttttcaccccacccccaagtcctgggagaaatgcaggcaacactgagacatgggagaggccaagatatgcttgacagaaagggtgattttgaggctcagttaatatttcaaaattgtaaccgtagcaaaactgcattggtatttagaaaaataaaaaatttccaatatgt

SEQ ID NO: 377115 - DNA, 988 bp, Homo sapiens
ggtagtagcttagatgagttctgtctgtgcttgatggaaatggcatcgtacgcatctgcttttacctatatagtgttttgcacacgtgttcacaaatctgtgtggcctgtactctgacggaaaataccaaaccaatgataattaagtcatgaggcagttggtgtacagagagaggcagaagtactgtaaggagtggaggaagaggaagaggatggctacagagctgtctgatgcaatacttgaaggataccccaagagcaagaagcagttctttgaggaagttgggatagagacggatgaagattacaacgtcacactcccagacccctgaggggcccacggtcaggactggtggggactgcaggatgtcagaagagtgagatgtcttgcactggctaccttgtttttggttggcttttgttgttgttcctgctactttcacctttaagcagagcagtcaggagacaagcataaaccagagcactgggtagagaggatgagggctggtggctgggggtagaccccacgcatttcattgtctaaattgcagtagcttgaggttaacatttagacttggaacaatgctaaaggaaagcatttggcaatatttattataatttaattttatataaaaatatttaatttcctctggatagtcaaacctgccagatatcaaacctgaggaaggcagaagtgaatttggagaactagggtagagagaggttgctataaaacgagcatttggagggcccacggcttcactcaggacctgctgggcttgtgtaccccaggagcccttttaagtatcttttgtacgcttttcaccccacccccaagtcctgggagaaatgcaggcaacactgagacatgggagaggccaagatatgcttgacagaaagggtgattttgaggctcagttaatatttcaaaattgtaaccgtagcaaaactgcattggtatttagaaaaataaaaaatttccaatatgt

SEQ ID NO: 377116 - DNA, 1473 bp, Homo sapiens
cggtacccggtgtttatcgatgccacccaactacaacgtccggctttctgagttgggtggcgggaaaggcgatgagtaaaggccgggcagaagctgcggcgggaggtaacggcgccgtgggcgcggggaagacccgggagggcagtgggtgaggaggtcggttgagtggccccctcccctgcctttctctccgtagccgccgggatcctcctgaggtacctgcaggagcagaaccggccctacagctcccaggatgtgttcgggaacctacagcgggaacacggactgggcaaggcggtggtggtgaagacgctggagcagctggcgcaacaaggcaagatcaaagagaagatgtacggcaagcagaagatctattttgcggatcaggaccagtttgacatggtgagtgatgctgaccttcaagtcctagatggcaaaatcgtggccctcactgctaaggtgcagagcttgcagcagagctgccgctacatggaggctgagctcaaggaattatctagtgccctgaccacaccagagatgcagaaagaaatccaggagttaaagaaggaatgcgctggctacagagagagattgaagaacattaaagcagctaccaatcatgtgactccagaagagaaagagcaggtgtacagagagaggcagaagtactgtaaggagtggaggaagaggaagaggatggctacagagctgtctgatgcaatacttgaaggataccccaagagcaagaagcagttctttgaggaagttgggatagagacggatgaagattacaacgtcacactcccagacccctgaggggcccacggtcaggactggtggggactgcaggatgtcagaagagtgagatgtcttgcactggctaccttgtttttggttggcttttgttgttgttcctgctactttcacctttaagcagagcagtcaggagacaagcataaaccagagcactgggtagagaggatgagggctggtggctgggggtagaccccacgcatttcattgtctaaattgcagtagcttgaggttaacatttagacttggaacaatgctaaaggaaagcatttggcaatatttattataatttaattttatataaaaatatttaatttcctctggatagtcaaacctgccagatatcaaacctgaggaaggcagaagtgaatttggagaactagggtagagagaggttgctataaaacgagcatttggagggcccacggcttcactcaggacctgctgggcttgtgtaccccaggagcccttttaagtatcttttgtacgcttttcaccccacccccaagtcctgggagaaatgcaggcaacactgagacatgggagaggccaagatatgcttgacagaaagggtgattttgaggctcagttaatatttcaaaattgtaaccgtagcaaaactgcattggtatttagaaaaataaaaaatttccaatatgt

SEQ ID NO: 377117 - DNA, 1361 bp, Homo sapiens
cggtacccggtgtttatcgatgccacccaactacaacgtccggctttctgagttgggtggcgggaaaggcgatgagtaaaggccgggcagaagctgcggcgggaggtaacggcgccgtgggcgcggggaagacccgggagggcagtgggtgaggaggtcggttgagtggccccctcccctgcctttctctccgtagccgccgggatcctcctgaggtacctgcaggagcagaaccggccctacagctcccaggatgtgttcgggaacctacagcgggaacacggactgggcaaggcggtggtggtgaagacgctggagcagctggcgcaacaaggcaagatcaaagagaagatgtacggcaagcagaagatctattttgcggatcagagctcaaggaattatctagtgccctgaccacaccagagatgcagaaagaaatccaggagttaaagaaggaatgcgctggctacagagagagattgaagaacattaaagcagctaccaatcatgtgactccagaagagaaagagcaggtgtacagagagaggcagaagtactgtaaggagtggaggaagaggaagaggatggctacagagctgtctgatgcaatacttgaaggataccccaagagcaagaagcagttctttgaggaagttgggatagagacggatgaagattacaacgtcacactcccagacccctgaggggcccacggtcaggactggtggggactgcaggatgtcagaagagtgagatgtcttgcactggctaccttgtttttggttggcttttgttgttgttcctgctactttcacctttaagcagagcagtcaggagacaagcataaaccagagcactgggtagagaggatgagggctggtggctgggggtagaccccacgcatttcattgtctaaattgcagtagcttgaggttaacatttagacttggaacaatgctaaaggaaagcatttggcaatatttattataatttaattttatataaaaatatttaatttcctctggatagtcaaacctgccagatatcaaacctgaggaaggcagaagtgaatttggagaactagggtagagagaggttgctataaaacgagcatttggagggcccacggcttcactcaggacctgctgggcttgtgtaccccaggagcccttttaagtatcttttgtacgcttttcaccccacccccaagtcctgggagaaatgcaggcaacactgagacatgggagaggccaagatatgcttgacagaaagggtgattttgaggctcagttaatatttcaaaattgtaaccgtagcaaaactgcattggtatttagaaaaataaaaaatttccaatatgt

SEQ ID NO: 377118 - DNA, 2057 bp, Homo sapiens
actgcactggctggcatactttttcaacctgctccccatcaccaactgatgtgacctcccccacccccacactgatccccagtgcagttcttttctagcaatggcccctcatgagagaagctcctcagacttactggaatcccttatctacatggatcccaagacccagcatagtggctcatgcatgtaatcccagcactttgggaggctgaggcggatggatcacttgagcccaggagtttgagaccagcctgggcaacgtggtgaaaccccttctctactaaaaatacaaaaattagctgcgcttggtggtgcgcgcctgtaatcccagctacttaggaggctgaggcatgagaatcgcttgaagccaggaggcggaggttgcagtcagccaagattgcaccactgcactctggcctgggtgacagagaaagaaagagaggaaaagagggaagggagggagaaagagggagggagggaggaaaaaggaaggaaggaaggagggagagaggaaggtggaaagaaggatgggaagaaaggacaggaaggaagaagaaaagaagtccatccatcccatccatcatgcttcttcacctgtccagtttctatctattatggaaacccatgatctaggtttccccaccgtgggaacaatgttacttaactgcttcagcccaggtagtggttttatcactaaatgggaagatttctgtcctaatcagtatcctgtcaacctagtagcttaaggacaagcattagatttcagcttttctttcctacctttttagtggggccgctccttaactgaaaacaatttctcaaaagtactctcccactatttctgcagaccctctggagactttggggtgtggctggttcctgagcatatccaaatggtgccttcccaggtgtgtgttcccatctttgtgcctcacaacagttcacttgtattttccctctttgtctggcaggaccagtttgacatggtgagtgatgctgaccttcaagtcctagatggcaaaatcgtggccctcactgctaaggtgcagagcttgcagcagagctgccgctacatggaggctgagctcaaggaattatctagtgccctgaccacaccagagatgcagaaagaaatccaggagttaaagaaggaatgcgctggctacagagagagattgaagaacattaaagcagctaccaatcatgtgactccagaagagaaagagcaggtgtacagagagaggcagaagtactgtaaggagtggaggaagaggaagaggatggctacagagctgtctgatgcaatacttgaaggataccccaagagcaagaagcagttctttgaggaagttgggatagagacggatgaagattacaacgtcacactcccagacccctgaggggcccacggtcaggactggtggggactgcaggatgtcagaagagtgagatgtcttgcactggctaccttgtttttggttggcttttgttgttgttcctgctactttcacctttaagcagagcagtcaggagacaagcataaaccagagcactgggtagagaggatgagggctggtggctgggggtagaccccacgcatttcattgtctaaattgcagtagcttgaggttaacatttagacttggaacaatgctaaaggaaagcatttggcaatatttattataatttaattttatataaaaatatttaatttcctctggatagtcaaacctgccagatatcaaacctgaggaaggcagaagtgaatttggagaactagggtagagagaggttgctataaaacgagcatttggagggcccacggcttcactcaggacctgctgggcttgtgtaccccaggagcccttttaagtatcttttgtacgcttttcaccccacccccaagtcctgggagaaatgcaggcaacactgagacatgggagaggccaagatatgcttgacagaaagggtgattttgaggctcagttaatatttcaaaattgtaaccgtagcaaaactgcattggtatttagaaaaataaaaaatttccaatatgt

SEQ ID NO: 377119 - DNA, 1283 bp, Homo sapiens
actgcactggctggcatactttttcaacctgctccccatcaccaactgatgtgacctcccccacccccacactgatccccagtgcagttcttttctagcaatggcccctcatgagagaagctcctcagacttactggaatcccttatctacatggatcccaagacccagcatagtggctcatgcatgtaatcccagcactttgggaggctgaggcggatggatcacttgagcccaggagtttgagaccagcctgggcaacgtggtgaaaccccttctctactaaaaatacaaaaattagctgcgcttggtggtgcgcgcctgtaatcccagctacttaggaggctgaggcatgagaatcgcttgaagccaggaggcggaggttgcagtcagccaagattgcaccactgcactctggcctgggtgacagagaaagaaagagaggaaaagagggaagggagggagaaagagggagggagggaggaaaaaggaaggaaggaaggagggagagaggaaggtggaaagaaggatgggaagaaaggacaggaaggaagaagaaaagaagtccatccatcccatccatcatgcttcttcacctgtccagtttctatctattatggaaacccatgatctaggtttccccaccgtgggaacaatgttacttaactgcttcagcccaggtagtggttttatcactaaatgggaagatttctgtcctaatcagtatcctgtcaacctagtagcttaaggacaagcattagatttcagcttttctttcctacctttttagtggggccgctccttaactgaaaacaatttctcaaaagtactctcccactatttctgcagaccctctggagactttggggtgtggctggttcctgagcatatccaaatggtgccttcccaggtgtgtgttcccatctttgtgcctcacaacagttcacttgtattttccctctttgtctggcaggaccagtttgacatggtgagtgatgctgaccttcaagtcctagatggcaaaatcgtggccctcactgctaaggtgcagagcttgcagcagagctgccgctacatggaggctggtaggactgggtagcccctccaaagtgcccataggcttaggttcattctagaggtcaggaattactaaatgaatggttcaatgactgcagcatcttgttgcagctaagacccctttgctgggctcccttaggcataaaaagaaatgtaggataactaacggcttttgtgtaccaacaaatggacaagatacgcatttgtt

SEQ ID NO: 377120 - DNA, 887 bp, Homo sapiens
cggtacccggtgtttatcgatgccacccaactacaacgtccggctttctgagttgggtggcgggaaaggcgatgagtaaaggccgggcagaagctgcggcgggaggtaacggcgccgtgggcgcggggaagacccgggagggcagtgggtgaggaggtcggttgagtggccccctcccctgcctttctctccgtagccgccgggatcctcctgaggtacctgcaggagcagaaccggccctacagctcccaggatgtgttcgggaacctacagcgggaacacggactgggcaaggcggtggtggtgaagacgctggagcagctggcgcaacaaggcaagatcaaagagaagatgtacggcaagcagaagatctattttgcggatcaggtgaggagaacttgcgccgattgtcacccatgagagcccgacaacgggtgaatctactcctggtgtgaactctttggggacaaggccccccatggaaaactcacctgtcttaggccaccatccttaaatcaaggtgtgtactcctcttgttaggatcccaacttcacgaggtttccagatttacaatatgatggatgacagaagattctgtattgttgctaccaagatccatttccgctccaaagctcttattccttatcatctacattagcaacaccctctgccaaatgatgttcctcctgcctccatccgattctctaaacacacatatcaaatttatattctccagcccagacctccagctggaatctgtcaggcattaatatcagagtcaaaattgccacagtagaatgcctcatcttccccccaccccggactggtttctttctaacattctcctcccctaatggaattactcttcacccaaaccagaaattggg

SEQ ID NO: 377121 - DNA, 482 bp, Homo sapiens
cggtacccggtgtttatcgatgccacccaactacaacgtccggctttctgagttgggtggcgggaaaggcgatgagtaaaggccgggcagaagctgcggcgggagccgccgggatcctcctgaggtacctgcaggagcagaaccggccctacagctcccaggatgtgttcgggaacctacagcgggaacacggactgggcaaggcggtggtggtgaagacgctggagcagctggcgcaacaaggcaagatcaaagagaagatgtacggcaagcagaagatctattttgcggatcaggtgaggagaacttgcgccgattgtcacccatgagagcccgacaacgggtgaatctactcctggtgtgaactctttggggacaaggccccccatggaaaactcacctgtcttaggccaccatccttaaatcaagacctggagatctccaggtccacagctgactagggccagcgcaaatactggaac

SEQ ID NO: 377122 - DNA, 1382 bp, Homo sapiens
cggtacccggtgtttatcgatgccacccaactacaacgtccggctttctgagttgggtggcgggaaaggcgatgagtaaaggccgggcagaagctgcggcgggagccgccgggatcctcctgaggtacctgcaggagcagaaccggccctacagctcccaggatgtgttcgggaacctacagcgggaacacggactgggcaaggcggtggtggtgaagacgctggagcagctggcgcaacaaggcaagatcaaagagaagatgtacggcaagcagaagatctattttgcggatcaggaccagtttgacatggtgagtgatgctgaccttcaagtcctagatggcaaaatcgtggccctcactgctaaggtgcagagcttgcagcagagctgccgctacatggaggctgagctcaaggaattatctagtgccctgaccacaccagagatgcagaaagaaatccaggagttaaagaaggaatgcgctggctacagagagagattgaagaacattaaagcagctaccaatcatgtgactccagaagagaaagagcaggtgtacagagagaggcagaagtactgtaaggagtggaggaagaggaagaggatggctacagagctgtctgatgcaatacttgaaggataccccaagagcaagaagcagttctttgaggaagttgggatagagacggatgaagattacaacgtcacactcccagacccctgaggggcccacggtcaggactggtggggactgcaggatgtcagaagagtgagatgtcttgcactggctaccttgtttttggttggcttttgttgttgttcctgctactttcacctttaagcagagcagtcaggagacaagcataaaccagagcactgggtagagaggatgagggctggtggctgggggtagaccccacgcatttcattgtctaaattgcagtagcttgaggttaacatttagacttggaacaatgctaaaggaaagcatttggcaatatttattataatttaattttatataaaaatatttaatttcctctggatagtcaaacctgccagatatcaaacctgaggaaggcagaagtgaatttggagaactagggtagagagaggttgctataaaacgagcatttggagggcccacggcttcactcaggacctgctgggcttgtgtaccccaggagcccttttaagtatcttttgtacgcttttcaccccacccccaagtcctgggagaaatgcaggcaacactgagacatgggagaggccaagatatgcttgacagaaagggtgattttgaggctcagttaatatttcaaaattgtaaccgtagcaaaactgcattggtatttagaaaaataaaaaatttccaatatgt

SEQ ID NO: 377123 - DNA, 1400 bp, Homo sapiens
cggtacccggtgtttatcgatgccacccaactacaacgtccggctttctgagttgggtggcgggaaaggcgatgagtaaaggccgggcagaagctgcggcgggagccgccgggatcctcctgaggtacctgcaggagcagaaccggccctacagctcccaggatgtgttcgggaacctacagcgggaacacggactgggcaaggcggtggtggtgaagacgctggagcagctggcgcaacaaggcaagatcaaagagaagatgtacggcaagcagaagatctattttgcggatcagtccctctttgtctggcaggaccagtttgacatggtgagtgatgctgaccttcaagtcctagatggcaaaatcgtggccctcactgctaaggtgcagagcttgcagcagagctgccgctacatggaggctgagctcaaggaattatctagtgccctgaccacaccagagatgcagaaagaaatccaggagttaaagaaggaatgcgctggctacagagagagattgaagaacattaaagcagctaccaatcatgtgactccagaagagaaagagcaggtgtacagagagaggcagaagtactgtaaggagtggaggaagaggaagaggatggctacagagctgtctgatgcaatacttgaaggataccccaagagcaagaagcagttctttgaggaagttgggatagagacggatgaagattacaacgtcacactcccagacccctgaggggcccacggtcaggactggtggggactgcaggatgtcagaagagtgagatgtcttgcactggctaccttgtttttggttggcttttgttgttgttcctgctactttcacctttaagcagagcagtcaggagacaagcataaaccagagcactgggtagagaggatgagggctggtggctgggggtagaccccacgcatttcattgtctaaattgcagtagcttgaggttaacatttagacttggaacaatgctaaaggaaagcatttggcaatatttattataatttaattttatataaaaatatttaatttcctctggatagtcaaacctgccagatatcaaacctgaggaaggcagaagtgaatttggagaactagggtagagagaggttgctataaaacgagcatttggagggcccacggcttcactcaggacctgctgggcttgtgtaccccaggagcccttttaagtatcttttgtacgcttttcaccccacccccaagtcctgggagaaatgcaggcaacactgagacatgggagaggccaagatatgcttgacagaaagggtgattttgaggctcagttaatatttcaaaattgtaaccgtagcaaaactgcattggtatttagaaaaataaaaaatttccaatatgt

SEQ ID NO: 377124 - DNA, 1677 bp, Homo sapiens
  misc_feature (5)..(5): n is a, c, g, or t
gaganatactgtctttccctctctttctttctctggcctgggtgacagagaaagaaagagaggaaaagagggaagggagggagaaagagggagggagggaggaaaaaggaaggaaggaaggagggagagaggaaggtggaaagaaggatgggaagaaaggacaggaaggaagaagaaaagaagtccatccatcccatccatcatgcttcttcacctgtccagtttctatctattatggaaacccatgatctaggtttccccaccgtgggaacaatgttacttaactgcttcagcccaggtagtggttttatcactaaatgggaagatttctgtcctaatcagtatcctgtcaacctagtagcttaaggacaagcattagatttcagcttttctttcctacctttttagtggggccgctccttaactgaaaacaatttctcaaaagtactctcccactatttctgcagaccctctggagactttggggtgtggctggttcctgagcatatccaaatggtgccttcccaggtgtgtgttcccatctttgtgcctcacaacagttcacttgtattttccctctttgtctggcaggaccagtttgacatggtgagtgatgctgaccttcaagtcctagatggcaaaatcgtggccctcactgctaaggtgcagagcttgcagcagagctgccgctacatggaggctgagctcaaggaattatctagtgccctgaccacaccagagatgcagaaagaaatccaggagttaaagaaggaatgcgctggctacagagagagattgaagaacattaaagcagctaccaatcatgtgactccagaagagaaagagcaggtgtacagagagaggcagaagtactgtaaggagtggaggaagaggaagaggatggctacagagctgtctgatgcaatacttgaaggataccccaagagcaagaagcagttctttgaggaagttgggatagagacggatgaagattacaacgtcacactcccagacccctgaggggcccacggtcaggactggtggggactgcaggatgtcagaagagtgagatgtcttgcactggctaccttgtttttggttggcttttgttgttgttcctgctactttcacctttaagcagagcagtcaggagacaagcataaaccagagcactgggtagagaggatgagggctggtggctgggggtagaccccacgcatttcattgtctaaattgcagtagcttgaggttaacatttagacttggaacaatgctaaaggaaagcatttggcaatatttattataatttaattttatataaaaatatttaatttcctctggatagtcaaacctgccagatatcaaacctgaggaaggcagaagtgaatttggagaactagggtagagagaggttgctataaaacgagcatttggagggcccacggcttcactcaggacctgctgggcttgtgtaccccaggagcccttttaagtatcttttgtacgcttttcaccccacccccaagtcctgggagaaatgcaggcaacactgagacatgggagaggccaagatatgcttgacagaaagggtgattttgaggctcagttaatatttcaaaattgtaaccgtagcaaaactgcattggtatttagaaaaataaaaaatttccaatatgt

SEQ ID NO: 377125 - DNA, 434 bp, Homo sapiens
gaaacatttttatacatgattcctggtgcacatataaacacatatttctgtaggatatatatctaggagtggaaatgtggagtcttaatggtgttccaactttactaaataatgtattccaaggtggttatacacattctcaccaggagtaaatgagagttattaccccaatcttttccagtatttagtattttcatacttttgaattttagctagcttggtacatgttacggactaaatgtttgtgtccccccaccagattcatatgttgaaatcttttttttttttttttttgagacggagtctcgctctgtcgcccaggctggagttcagtggcgggatctcggctcactgcaagctccgcctcccgggttcacgccattctcctgcctcagcctcccaagtagctgggactacaggcgcccgccactacg

SEQ ID NO: 377126 - DNA, 318 bp, Homo sapiens
aaaaaaaaaaaaaaaaaaaaaaaaagctgagatttactgagcacatgacatgtgcaaaacacttctaaatgccccacatgttatttaacccccaagagccattgaattactatagttcttgttactgtcttcattttactggtgagggaactgaagcacagaacgatcaagtaacctctccaaggtcacacagctagaaagtggtggaccccagagctcatgccgcagccgcctcccacccaagagttggaactatcctaggaaacaatcaaaacttgtctcaactggcagagcacaccatcctttttcctttaattt

SEQ ID NO: 377127 - DNA, 4193 bp, Homo sapiens
tgtttttggcagcttggttttggggggaccctaaaaaaggccttcggggtttcttttatcggggggagggggcggtggtcccgacttggccagccgcctgttgaagcgggggagcggggagcaggggcatgcgaacccggctccccccaccatgatgaagacggagccacgggggcccgggggtcccctccggagcgcctccccgcaccgcagcgcctacgaggcgggcatccaggcgctgaagccgcccgacgcgcccgggcccgacgaggcacccaagggggcccaccacaagaaatatggctccaacgtccaccgcatcaaaagtatgttcctgcagatgggcacgacggcggggccctcgggcgaggcgggcggcggcgcgggcctggccgaggccccacgggcgtccgagcgcggcgtgcgcctgtcgctgccgcgggccagcagcctgaacgagaacgtggaccacagcgccctgctgaagctgggcaccagcgtgtcggagcgcgtgagccgcttcgactccaagcccgcgccctccgcgcagcctgcgccgccgccgcacccgccgtcccggctgcaggagacgcggaagctgttcgaacggagcgccccagcggcaggcggcgacaaggaggcggcgcggcggctgctgaggcaggagcgcgccggcctgcaggaccggaagctggacgtcgtggtgcgcttcaacggcagcaccgaggcgctggacaagctggacgctgacgccgtgtcccccacggtcagccagctcagcgccgtcttcgagaaggccgactcgaggaccggcctccaccgcgggcccgggctccccagggccgcaggggttccccaggtcaactcgaagctggtcagcaagcggtcccgggtgttccagcccccgccgccgccgccgcccgccccgtcgggggatgccccggccgagaaagagcgatgccccgcagggcagcagcccccgcagcaccgagtggcccctgcccggccgccccccaagccccgggaggtgcgcaagattaagccggtggaggtggaggagagcggggagtcggaggccgagtcggcgcccggggaggtgatccaggccgaggttacggtccacgcggccctggagaatggcagcaccgtggcaactgcagccagccccgcgcccgaggagccaaaggcccaagcggccccggagaaggaggcggcggcggtagcgccgccagagaggggggtgggcaatggccgggccccggacgtggcccctgaggaggtagatgaatccaagaaggaggacttctcggaggcggacttggtggacgtgagcgcctacagtgggctcggggaggactctgcgggcagtgccctggaggaggacgacgaagacgacgaggaggatggggagcccccctacgagcccgagtcggggtgcgtggagatcccggggctgtcggaggaggaggacccagccccgagccggaagatccatttcagcacggcgcccatccaagtgttcagcacttactccaacgaggattacgatcgtcgcaacgaggatgtggatcccatggcagcctctgctgagtacgagctggagaagcgtgtggagaggttggagctgttccctgtggagctggagaaggactccgagggcctgggcatcagcatcatcggcatgggcgccggggcagacatgggcctggagaagctgggtatcttcgtcaagaccgtgacggagggtggtgcggcccatcgggatggcaggatccaggtgaatgatctcctggtggaggtggatggaacaagtctggtgggagtgacccagagcttcgcggcgtctgtgctccggaacaccaagggccgagtgcggtttatgattggccgggagcggccgggagagcagagcgaagtggcccagctaattcagcagactttggaacaggagcgatggcagcgggagatgatggagcagagatacgcccagtatggggaggatgacgaggagacgggagagtatgccactgacgaggatgaggagctgagccccacgttcccgggtggtgagatggccatcgaggtgtttgagctagcggagaacgaggatgcactgtcccctgtggacatggagcccgagaagctggtgcacaagttcaaggagctccagatcaagcatgcggtcactgaggcagagatccagcagctgaaaagaaagctgcagagcctggagcaggagaaggggcgctggcgggtggagaaggcgcagttggagcagagtgtggaggagaacaaggagcgcatggagaaactggaaggctactggggtgaggcccagagcctgtgccaggctgtggacgagcacctgcgggagactcaggcgcagtaccaggccctggagcgcaagtacagcaaggccaagcgcctcatcaaggactaccagcagaaggagatcgagttcctgaaaaaggagactgcacagcgtcgggttctggaggagtcggagctggccagaaaggaggagatggacaagctcctggacaagatctcagaactggaaggaaacttgcaaacactgaggaattccaattctacttaacaggaatcattccatgactggacaataattaacccccctcccattgtcctccctcccctgtcctcaacaccccacccctcccccttccagcctggggacaggtgccccgactccccccacccctccaccccacctcccccagcttcagggaccagagggctcatatcacaggcccccttaagatggcctgggcagacagaggtggctagaagggcagcctctttcttgccccatggggctgaggcacagaggccgagggctgccgagggctggcctggtggtcgacggacacaagcacctgcagatcaaactgccagactttacacactccagcttttgtctctggactggaacggggctggggctctcccagcatctgccaactgggggctgctccctgcccatggggcacctgggtggcccctgggcctcttgacttgagattctaccttctcggcccttccctctccccccatcattgtgccgtctctgttgcattctgaccctcccgcctggggggtgggggcgttgcctcaacacctcccccatccctgttccctgtcctgggagggatagagtccaccccagagcccggaggctgggcctggccctggccctgcactgatttctcatgtgtccttcgggaaaagggggagtgagagtgggaaaaagggagagttcaggacacctggtccccagctccccattgcctggggcagcagccctcaatttctccttgtgcctcccctcttccaggtgccaaatagccataacctcgtcttggaactgttatgtggcctctctggggtccaggtttcctggtcaagcctgggaatgccagggaggaaagggggtctggctacagcgaccctggtcttaggcaaggggaacatttctccctggagagtcaggtcctatcctgtgctgccctgtctgcccagcccagggcgatgcctggaagcctactgacattgcagggagtcagcctcgcccccaccccctactggttttccaatgttttgactggagggcaaaattttactactactcatctttttggagaccagggctgccctgctggcagcctgccttctaagtgaaatcgactctgtttccccactttaaccccaaattggggcttggaccaagggaggtgagaccacctcccccaggtcccctcccctttcaaaatccatctcattttgccacttcatgcccctgccctaactgggtttttgttcattttttaaaaacagaccacccatcccatccgttttggcttcttgtcccctgtaaatagaccatgacttcgatcagtatttcttgtccccaccccttcctatccccagatgtgcccccatcccctgaaggagctggctgtctcagtcctgggctcgcgcacttcaccccggcagatggagggggcggaaccgggtgggcggggccgcttcgggctgcttgggccagcggccacccctgcccagccgtcgggagggccgcatctctgtatataatatatatatgtatgtattgttcccggttttgtacggaccatgccctctgtcaggtcgtccccataaaagcagcccccaga

SEQ ID NO: 377128 - DNA, 2509 bp, Homo sapiens
tgtttttggcagcttggttttggggggaccctaaaaaaggccttcggggtttcttttatcggggggagggggcggtggtcccgacttggccagccgcctgttgaagcgggggagcggggagcaggggcatgcgaacccggctccccccaccatgatgaagacggagccacgggggcccgggggtcccctccggagcgcctccccgcaccgcagcgcctacgaggcgggcatccaggcgctgaagccgcccgacgcgcccgggcccgacgaggcacccaagggggcccaccacaagaaatatggctccaacgtccaccgcatcaaaagtatgttcctgcagatgggcacgacggcggggccctcgggcgaggcgggcggcggcgcgggcctggccgaggccccacgggcgtccgagcgcggcgtgcgcctgtcgctgccgcgggccagcagcctgaacgagaacgtggaccacagcgccctgctgaagctgggcaccagcgtgtcggagcgcgtgagccgcttcgactccaagcccgcgccctccgcgcagcctgcgccgccgccgcacccgccgtcccggctgcaggagacgcggaagctgttcgaacggagcgccccagcggcaggcggcgacaaggaggcggcgcggcggctgctgaggcaggagcgcgccggcctgcaggaccggaagctggacgtcgtggtgcgcttcaacggcagcaccgaggcgctggacaagctggacgctgacgccgtgtcccccacggtcagccagctcagcgccgtcttcgagaaggccgactcgaggaccggcctccaccgcgggcccgggctccccagggccgcaggggttccccaggtcaactcgaagctggtcagcaagcggtcccgggtgttccagcccccgccgccgccgccgcccgccccgtcgggggatgccccggccgagaaagagcgatgccccgcagggcagcagcccccgcagcaccgagtggccccttccagcctggggacaggtgccccgactccccccacccctccaccccacctcccccagcttcagggaccagagggctcatatcacaggcccccttaagatggcctgggcagacagaggtggctagaagggcagcctctttcttgccccatggggctgaggcacagaggccgagggctgccgagggctggcctggtggtcgacggacacaagcacctgcagatcaaactgccagactttacacactccagcttttgtctctggactggaacggggctggggctctcccagcatctgccaactgggggctgctccctgcccatggggcacctgggtggcccctgggcctcttgacttgagattctaccttctcggcccttccctctccccccatcattgtgccgtctctgttgcattctgaccctcccgcctggggggtgggggcgttgcctcaacacctcccccatccctgttccctgtcctgggagggatagagtccaccccagagcccggaggctgggcctggccctggccctgcactgatttctcatgtgtccttcgggaaaagggggagtgagagtgggaaaaagggagagttcaggacacctggtccccagctccccattgcctggggcagcagccctcaatttctccttgtgcctcccctcttccaggtgccaaatagccataacctcgtcttggaactgttatgtggcctctctggggtccaggtttcctggtcaagcctgggaatgccagggaggaaagggggtctggctacagcgaccctggtcttaggcaaggggaacatttctccctggagagtcaggtcctatcctgtgctgccctgtctgcccagcccagggcgatgcctggaagcctactgacattgcagggagtcagcctcgcccccaccccctactggttttccaatgttttgactggagggcaaaattttactactactcatctttttggagaccagggctgccctgctggcagcctgccttctaagtgaaatcgactctgtttccccactttaaccccaaattggggcttggaccaagggaggtgagaccacctcccccaggtcccctcccctttcaaaatccatctcattttgccacttcatgcccctgccctaactgggtttttgttcattttttaaaaacagaccacccatcccatccgttttggcttcttgtcccctgtaaatagaccatgacttcgatcagtatttcttgtccccaccccttcctatccccagatgtgcccccatcccctgaaggagctggctgtctcagtcctgggctcgcgcacttcaccccggcagatggagggggcggaaccgggtgggcggggccgcttcgggctgcttgggccagcggccacccctgcccagccgtcgggagggccgcatctctgtatataatatatatatgtatgtattgttcccggttttgtacggaccatgccctctgtcaggtcgtccccataaaagcagcccccaga

SEQ ID NO: 377129 - DNA, 2143 bp, Homo sapiens
gtcccctgctgtcatcatatacgtccgcgagaagcctggtagcacaagtatcaacggcagctcgatgcatcaatgctattgctggtcgattgacgtgctcgacgatccagtcaagactcgatgaatgaaacgctgcagcatgtcacatgtaatacttggacgaatggtggctcgtggctggtgatgagaagaagcgccgtcgcgttggacgcatcactctgttgcatcgacgtacatcaaagtgacgctgcaatggagaaactggaaggctactggggtgaggcccagagcctgtgccaggctgtggacgagcacctgcgggagactcaggcgcagtaccaggccctggagcgcaagtacagcaaggccaagcgcctcatcaaggactaccagcagaaggagatcgagttcctgaaaaaggagactgcacagcgtcgggttctggaggagtcggagctggccagaaaggaggagatggacaagctcctggacaagatctcagaactggaaggaaacttgcaaacactgaggaattccaattctacttaacaggaatcattccatgactggacaataattaacccccctcccattgtcctccctcccctgtcctcaacaccccacccctcccccttccagcctggggacaggtgccccgactccccccacccctccaccccacctcccccagcttcagggaccagagggctcatatcacaggcccccttaagatggcctgggcagacagaggtggctagaagggcagcctctttcttgccccatggggctgaggcacagaggccgagggctgccgagggctggcctggtggtcgacggacacaagcacctgcagatcaaactgccagactttacacactccagcttttgtctctggactggaacggggctggggctctcccagcatctgccaactgggggctgctccctgcccatggggcacctgggtggcccctgggcctcttgacttgagattctaccttctcggcccttccctctccccccatcattgtgccgtctctgttgcattctgaccctcccgcctggggggtgggggcgttgcctcaacacctcccccatccctgttccctgtcctgggagggatagagtccaccccagagcccggaggctgggcctggccctggccctgcactgatttctcatgtgtccttcgggaaaagggggagtgagagtgggaaaaagggagagttcaggacacctggtccccagctccccattgcctggggcagcagccctcaatttctccttgtgcctcccctcttccaggtgccaaatagccataacctcgtcttggaactgttatgtggcctctctggggtccaggtttcctggtcaagcctgggaatgccagggaggaaagggggtctggctacagcgaccctggtcttaggcaaggggaacatttctccctggagagtcaggtcctatcctgtgctgccctgtctgcccagcccagggcgatgcctggaagcctactgacattgcagggagtcagcctcgcccccaccccctactggttttccaatgttttgactggagggcaaaattttactactactcatctttttggagaccagggctgccctgctggcagcctgccttctaagtgaaatcgactctgtttccccactttaaccccaaattggggcttggaccaagggaggtgagaccacctcccccaggtcccctcccctttcaaaatccatctcattttgccacttcatgcccctgccctaactgggtttttgttcattttttaaaaacagaccacccatcccatccgttttggcttcttgtcccctgtaaatagaccatgacttcgatcagtatttcttgtccccaccccttcctatccccagatgtgcccccatcccctgaaggagctggctgtctcagtcctgggctcgcgcacttcaccccggcagatggagggggcggaaccgggtgggcggggccgcttcgggctgcttgggccagcggccacccctgcccagccgtcgggagggccgcatctctgtatataatatatatatgtatgtattgttcccggttttgtacggaccatgccctctgtcaggtcgtccccataaaagcagcccccaga

SEQ ID NO: 377130 - DNA, 2686 bp, Homo sapiens
  misc_feature (2686)..(2686): n is a, c, g, or t
tgtttttggcagcttggttttggggggaccctaaaaaaggccttcggggtttcttttatcggggggagggggcggtggtcccgacttggccagccgcctgttgaagcgggggagcggggagcaggggcatgcgaacccggctccccccaccatgatgaagacggagccacgggggcccgggggtcccctccggagcgcctccccgcaccgcagcgcctacgaggcgggcatccaggcgctgaagccgcccgacgcgcccgggcccgacgaggcacccaagggggcccaccacaagaaatatggctccaacgtccaccgcatcaaaagtatgttcctgcagatgggcacgacggcggggccctcgggcgaggcgggcggcggcgcgggcctggccgaggccccacgggcgtccgagcgcggcgtgcgcctgtcgctgccgcgggccagcagcctgaacgagaacgtggaccacagcgccctgctgaagctgggcaccagcgtgtcggagcgcgtgagccgcttcgactccaagcccgcgccctccgcgcagcctgcgccgccgccgcacccgccgtcccggctgcaggagacgcggaagctgttcgaacggagcgccccagcggcaggcggcgacaaggaggcggcgcggcggctgctgaggcaggagcgcgccggcctgcaggaccggaagctggacgtcgtggtgcgcttcaacggcagcaccgaggcgctggacaagctggacgctgacgccgtgtcccccacggtcagccagctcagcgccgtcttcgagaaggccgactcgaggaccggcctccaccgcgggcccgggctccccagggccgcaggggttccccaggtcaactcgaagctggtcagcaagcggtcccgggtgttccagcccccgccgccgccgccgcccgccccgtcgggggatgccccggccgagaaagagcgatgccccgcagggcagcagcccccgcagcaccgagtggcccctgcccggccgccccccaagccccgggaggtgcgcaagattaagccggtggaggtggaggagagcggggagtcggaggccgagtcggcgcccggggaggtgatccaggccgaggttacggtccacgcggccctggagaatggcagcaccgtggcaactgcagccagccccgcgcccgaggagccaaaggcccaagcggccccggagaaggaggcggcggcggtagcgccgccagagaggggggtgggcaatggccgggccccggacgtggcccctgaggaggtagatgaatccaagaaggaggacttctcggaggcggacttggtggacgtgagcgcctacagtgggctcggggaggactctgcgggcagtgccctggaggaggacgacgaagacgacgaggaggatggggagcccccctacgagcccgagtcggggtgcgtggagatcccggggctgtcggaggaggaggacccagccccgagccggaagatccatttcagcacggcgcccatccaagtgttcagcacttactccaacgaggattacgatcgtcgcaacgaggatgtggatcccatggcagcctctgctgagtacgagctggagaagcgtgtggagaggttggagctgttccctgtggagctggagaaggactccgagggcctgggcatcagcatcatcggcatgggcgccggggcagacatgggcctggagaagctgggtatcttcgtcaagaccgtgacggagggtggtgcggcccatcgggatggcaggatccaggtgaatgatctcctggtggaggtggatggaacaagtctggtgggagtgacccagagcttcgcggcgtctgtgctccggaacaccaagggccgagtgcggtttatgattggccgggagcggccgggagagcagagcgaagtggcccagctaattcagcagactttggaacaggagcgatggcagcgggagatgatggagcagagatacgcccagtatggggaggatgacgaggagacgggagagtatgccactgacgaggatgaggagctgagccccacgttcccgggtggtgagatggccatcgaggtgtttgagctagcggagaacgaggatgcactgtcccctgtggacatggagcccgagaagctggtgcacaagttcaaggagctccagatcaagcatgcggtcactgaggcagagatccagcagctgaaaagaaagctgcagagcctggagcaggagaaggggcgctggcgggtggagaaggcgcagttggagcagagtgtggaggagaacaaggagcgcatggagaaactggaaggctactggggtgaggcccagagcctgtgccaggctgtggacgagcacctgcgggagactcaggcgcagtaccaggccctggagcgctttgggtccaggaatggcaagaccagcaagaagatcaccattgctgactgtggacaactcgaataagtttgacttgtgttttatcttaaccaccagatcattccttctgtagctcaggagagcacccctccaccccatttgctcgcagtatcctagaatctttgtgctctcgctgcagttccctttgggttccatgttttcctttgttccctcccatgcctagctggattgcagagttaagtttatgattatgaaataaaactaaataacaaaaaaaaaatn

SEQ ID NO: 377131 - DNA, 4324 bp, Homo sapiens
tgtttttggcagcttggttttggggggaccctaaaaaaggccttcggggtttcttttatcggggggagggggcggtggtcccgacttggccagccgcctgttgaagcgggggagcggggagcaggggcatgcgaacccggctccccccaccatgatgaagacggagccacgggggcccgggggtcccctccggagcgcctccccgcaccgcagcgcctacgaggcgggcatccaggcgctgaagccgcccgacgcgcccgggcccgacgaggcacccaagggggcccaccacaagaaatatggctccaacgtccaccgcatcaaaagtatgttcctgcagatgggcacgacggcggggccctcgggcgaggcgggcggcggcgcgggcctggccgaggccccacgggcgtccgagcgcggcgtgcgcctgtcgctgccgcgggccagcagcctgaacgagaacgtggaccacagcgccctgctgaagctgggcaccagcgtgtcggagcgcgtgagccgcttcgactccaagcccgcgccctccgcgcagcctgcgccgccgccgcacccgccgtcccggctgcaggagacgcggaagctgttcgaacggagcgccccagcggcaggcggcgacaaggaggcggcgcggcggctgctgaggcaggagcgcgccggcctgcaggaccggaagctggacgtcgtggtgcgcttcaacggcagcaccgaggcgctggacaagctggacgctgacgccgtgtcccccacggtcagccagctcagcgccgtcttcgagaaggccgactcgaggaccggcctccaccgcgggcccgggctccccagggccgcaggggttccccaggtcaactcgaagctggtcagcaagcggtcccgggtgttccagcccccgccgccgccgccgcccgccccgtcgggggatgccccggccgagaaagagcgatgccccgcagggcagcagcccccgcagcaccgagtggcccctgcccggccgccccccaagccccgggaggtgcgcaagattaagccggtggaggtggaggagagcggggagtcggaggccgagtcggcgcccggggaggtgatccaggccgaggttacggtccacgcggccctggagaatggcagcaccgtggcaactgcagccagccccgcgcccgaggagccaaaggcccaagcggccccggagaaggaggcggcggcggtagcgccgccagagaggggggtgggcaatggccgggccccggacgtggcccctgaggaggtagatgaatccaagaaggaggacttctcggaggcggacttggtggacgtgagcgcctacagtgggctcggggaggactctgcgggcagtgccctggaggaggacgacgaagacgacgaggaggatggggagcccccctacgagcccgagtcggggtgcgtggagatcccggggctgtcggaggaggaggacccagccccgagccggaagatccatttcagcacggcgcccatccaagtgttcagcacttactccaacgaggattacgatcgtcgcaacgaggatgtggatcccatggcagcctctgctgagtacgagctggagaagcgtgtggagaggttggagctgttccctgtggagctggagaaggactccgagggcctgggcatcagcatcatcggcatgggcgccggggcagacatgggcctggagaagctgggtatcttcgtcaagaccgtgacggagggtggtgcggcccatcgggatggcaggatccaggtgaatgatctcctggtggaggtggatggaacaagtctggtgggagtgacccagagcttcgcggcgtctgtgctccggaacaccaagggccgagtgcgccttcggactcagccctctcatctctcctcccctgggagggcctgagtttggagaggggagcatcagcagggaggatgatgcattacctggctgaggacagaggcagcggatgatgccggtgcccctgcaggtttatgattggccgggagcggccgggagagcagagcgaagtggcccagctaattcagcagactttggaacaggagcgatggcagcgggagatgatggagcagagatacgcccagtatggggaggatgacgaggagacgggagagtatgccactgacgaggatgaggagctgagccccacgttcccgggtggtgagatggccatcgaggtgtttgagctagcggagaacgaggatgcactgtcccctgtggacatggagcccgagaagctggtgcacaagttcaaggagctccagatcaagcatgcggtcactgaggcagagatccagcagctgaaaagaaagctgcagagcctggagcaggagaaggggcgctggcgggtggagaaggcgcagttggagcagagtgtggaggagaacaaggagcgcatggagaaactggaaggctactggggtgaggcccagagcctgtgccaggctgtggacgagcacctgcgggagactcaggcgcagtaccaggccctggagcgcaagtacagcaaggccaagcgcctcatcaaggactaccagcagaaggagatcgagttcctgaaaaaggagactgcacagcgtcgggttctggaggagtcggagctggccagaaaggaggagatggacaagctcctggacaagatctcagaactggaaggaaacttgcaaacactgaggaattccaattctacttaacaggaatcattccatgactggacaataattaacccccctcccattgtcctccctcccctgtcctcaacaccccacccctcccccttccagcctggggacaggtgccccgactccccccacccctccaccccacctcccccagcttcagggaccagagggctcatatcacaggcccccttaagatggcctgggcagacagaggtggctagaagggcagcctctttcttgccccatggggctgaggcacagaggccgagggctgccgagggctggcctggtggtcgacggacacaagcacctgcagatcaaactgccagactttacacactccagcttttgtctctggactggaacggggctggggctctcccagcatctgccaactgggggctgctccctgcccatggggcacctgggtggcccctgggcctcttgacttgagattctaccttctcggcccttccctctccccccatcattgtgccgtctctgttgcattctgaccctcccgcctggggggtgggggcgttgcctcaacacctcccccatccctgttccctgtcctgggagggatagagtccaccccagagcccggaggctgggcctggccctggccctgcactgatttctcatgtgtccttcgggaaaagggggagtgagagtgggaaaaagggagagttcaggacacctggtccccagctccccattgcctggggcagcagccctcaatttctccttgtgcctcccctcttccaggtgccaaatagccataacctcgtcttggaactgttatgtggcctctctggggtccaggtttcctggtcaagcctgggaatgccagggaggaaagggggtctggctacagcgaccctggtcttaggcaaggggaacatttctccctggagagtcaggtcctatcctgtgctgccctgtctgcccagcccagggcgatgcctggaagcctactgacattgcagggagtcagcctcgcccccaccccctactggttttccaatgttttgactggagggcaaaattttactactactcatctttttggagaccagggctgccctgctggcagcctgccttctaagtgaaatcgactctgtttccccactttaaccccaaattggggcttggaccaagggaggtgagaccacctcccccaggtcccctcccctttcaaaatccatctcattttgccacttcatgcccctgccctaactgggtttttgttcattttttaaaaacagaccacccatcccatccgttttggcttcttgtcccctgtaaatagaccatgacttcgatcagtatttcttgtccccaccccttcctatccccagatgtgcccccatcccctgaaggagctggctgtctcagtcctgggctcgcgcacttcaccccggcagatggagggggcggaaccgggtgggcggggccgcttcgggctgcttgggccagcggccacccctgcccagccgtcgggagggccgcatctctgtatataatatatatatgtatgtattgttcccggttttgtacggaccatgccctctgtcaggtcgtccccataaaagcagcccccaga

SEQ ID NO: 377132 - DNA, 2253 bp, Homo sapiens
gggtgtctaatcagtcacgagggtgagtgggtgtcagagatacgcccaggggggggagtgatgacgaggagacgggagagtatgccactgacgaggatgaggagctgagccccacgttcccgggtggtgagatggccatcgaggtgtttgagctagcggagaacgaggatgcactgtcccctgtggacatggagcccgagaagctggtgcacaagttcaaggagctccagatcaagcatgcggtcactgaggcagagatccagcagctgaaaagaaagctgcagagcctggagcaggagaaggggcgctggcgggtggagaaggcgcagttggagcagagtgtggaggagaacaaggagcgcatggagaaactggaaggctactggggtgaggcccagagcctgtgccaggctgtggacgagcacctgcgggagactcaggcgcagtaccaggccctggagcgcaagtacagcaaggccaagcgcctcatcaaggactaccagcagaaggagatcgagttcctgaaaaaggagactgcacagcgtcgggttctggaggagtcggagctggccagaaaggaggagatggacaagctcctggacaagatctcagaactggaaggaaacttgcaaacactgaggaattccaattctacttaacaggaatcattccatgactggacaataattaacccccctcccattgtcctccctcccctgtcctcaacaccccacccctcccccttccagcctggggacaggtgccccgactccccccacccctccaccccacctcccccagcttcagggaccagagggctcatatcacaggcccccttaagatggcctgggcagacagaggtggctagaagggcagcctctttcttgccccatggggctgaggcacagaggccgagggctgccgagggctggcctggtggtcgacggacacaagcacctgcagatcaaactgccagactttacacactccagcttttgtctctggactggaacggggctggggctctcccagcatctgccaactgggggctgctccctgcccatggggcacctgggtggcccctgggcctcttgacttgagattctaccttctcggcccttccctctccccccatcattgtgccgtctctgttgcattctgaccctcccgcctggggggtgggggcgttgcctcaacacctcccccatccctgttccctgtcctgggagggatagagtccaccccagagcccggaggctgggcctggccctggccctgcactgatttctcatgtgtccttcgggaaaagggggagtgagagtgggaaaaagggagagttcaggacacctggtccccagctccccattgcctggggcagcagccctcaatttctccttgtgcctcccctcttccaggtgccaaatagccataacctcgtcttggaactgttatgtggcctctctggggtccaggtttcctggtcaagcctgggaatgccagggaggaaagggggtctggctacagcgaccctggtcttaggcaaggggaacatttctccctggagagtcaggtcctatcctgtgctgccctgtctgcccagcccagggcgatgcctggaagcctactgacattgcagggagtcagcctcgcccccaccccctactggttttccaatgttttgactggagggcaaaattttactactactcatctttttggagaccagggctgccctgctggcagcctgccttctaagtgaaatcgactctgtttccccactttaaccccaaattggggcttggaccaagggaggtgagaccacctcccccaggtcccctcccctttcaaaatccatctcattttgccacttcatgcccctgccctaactgggtttttgttcattttttaaaaacagaccacccatcccatccgttttggcttcttgtcccctgtaaatagaccatgacttcgatcagtatttcttgtccccaccccttcctatccccagatgtgcccccatcccctgaaggagctggctgtctcagtcctgggctcgcgcacttcaccccggcagatggagggggcggaaccgggtgggcggggccgcttcgggctgcttgggccagcggccacccctgcccagccgtcgggagggccgcatctctgtatataatatatatatgtatgtattgttcccggttttgtacggaccatgccctctgtcaggtcgtccccataaaagcagcccccaga

SEQ ID NO: 377133 - DNA, 2936 bp, Homo sapiens
tgtttttggcagcttggttttggggggaccctaaaaaaggccttcggggtttcttttatcggggggagggggcggtggtcccgacttggccagccgcctgttgaagcgggggagcggggagcaggggcatgcgaacccggctccccccaccatgatgaagacggagccacgggggcccgggggtcccctccggagcgcctccccgcaccgcagcgcctacgaggcgggcatccaggcgctgaagccgcccgacgcgcccgggcccgacgaggcacccaagggggcccaccacaagaaatatggctccaacgtccaccgcatcaaaagtatgttcctgcagatgggcacgacggcggggccctcgggcgaggcgggcggcggcgcgggcctggccgaggccccacgggcgtccgagcgcggcgtgcgcctgtcgctgccgcgggccagcagcctgaacgagaacgtggaccacagcgccctgctgaagctgggcaccagcgtgtcggagcgcgtgagccgcttcgactccaagcccgcgccctccgcgcagcctgcgccgccgccgcacccgccgtcccggctgcaggagacgcggaagctgttcgaacggagcgccccagcggcaggcggcgacaaggaggcggcgcggcggctgctgaggcaggagcgcgccggcctgcaggaccggaagctggacgtcgtggtgcgcttcaacggcagcaccgaggcgctggacaagctggacgctgacgccgtgtcccccacggtcagccagctcagcgccgtcttcgagaaggccgactcgaggaccggcctccaccgcgggcccgggctccccagggccgcaggggttccccaggtcaactcgaagctggtcagcaagcggtcccgggtgttccagcccccgccgccgccgccgcccgccccgtcgggggatgccccggccgagaaagagcgatgccccgcagggcagcagcccccgcagcaccgagtggcccctgcccggccgccccccaagccccgggaggtgcgcaagattaagccggtggaggtggaggagagcggggagtcggaggccgagtcggcgcccggggaggtgatccaggccgaggttacggtccacgcggccctggagaatggcagcaccgtggcaactgcagccagccccgcgcccgaggagccaaaggcccaagcggccccggagaaggaggcggcggcggtagcgccgccagagaggggggtgggcaatggccgggccccggacgtggcccctgaggaggtagatgaatccaagaaggaggacttctcggaggcggacttggtggacgtgagcgcctacagtgggctcggggaggactctgcgggcagtgccctggaggaggacgacgaagacgacgaggaggatggggagcccccctacgagcccgagtcggggtgcgtggagatcccggggctgtcggaggaggaggacccagccccgagccggaagatccatttcagcacggcgcccatccaagtgttcagcacttactccaacgaggattacgatcgtcgcaacgaggatgtggatcccatggcagcctctgctgagtacgagctggagaagcgtgtggagaggttggagctgttccctgtggagctggagaaggactccgagggcctgggcatcagcatcatcggcatgggcgccggggcagacatgggcctggagaagctgggtatcttcgtcaagaccgtgacggagggtggtgcggcccatcgggatggcaggatccaggtgaatgatctcctggtggaggtggatggaacaagtctggtgggagtgacccagagcttcgcggcgtctgtgctccggaacaccaagggccgagtgcggtttatgattggccgggagcggccgggagagcagagcgaagtggcccagctaattcagcagactttggaacaggagcgatggcagcgggagatgatggagcagagatacgcccagtatggggaggatgacgaggagacgggagagtatgccactgacgaggatgaggagctgagccccacgttcccgggtggtgagatggccatcgaggtgtttgagctagcggagaacgaggatgcactgtcccctgtggacatggagcccgagaagctggtgcacaagttcaaggagctccagatcaagcatgcggtcactgaggcagagatccagcagctgaaaagaaagctgcagagcctggagcaggagaaggggcgctggcgggtggagaaggcgcagttggagcagagtgtggaggagaacaaggagcgcatggagaaactggaaggctactggggtgaggcccagagcctgtgccaggctgtggacgagcacctgcgggagactcaggcgcagtaccaggccctggagcgcaagtacagcaaggccaagcgcctcatcaaggactaccagcagaaggagatcgagttcctgaaaaaggagactgcacagcgtcgggttctggaggagtcggagctggccagaaaggaggagatggacaagctcctggacaagatctcagaactggaaggaaacttgcaaacactgaggaattccaattctacttaacaggaatcattccatgactggacaataattaacccccgcgtcagatggtcctcgctggtgtggtgcatctacagagtagtgggggatgatctcggagagaccaccaggagaggatcgccaaggacgtgcacaggcagagaaagtccgggcaactggctcctggcatcaaacggccaaccagattggcatcgcgatgaccgagtcatcttcaggcgtgcaagcgggaccaggccaacgggtggggcgtcatgggtctcatcgtcgggggagactgaagataccttcatcgctgagctggatgtggggctgggcacgggcagatcaagactggtgcccc

SEQ ID NO: 377134 - DNA, 689 bp, Homo sapiens
cctaaacatgcataccaggatgaagtttaatttataaattaggcacagtaagagatgaacagcaataattaatagtgaaatagaacaattataacaatattctgtaataaattatgttacgtggatgtggtctgtggtctgtctctcctttaaaataccttattgtactatacccactcttcttcttcctgtgatctgtcaacctgataactgagcaacccactaagtgactaatgggaaggtagcatgtacagtgtggatatgctctacgaaggcatgattcgcagcccaaggaggacacagcaggatggcatgagatttcatcacactactcggaacagcctgcaacttaaagcatatgaattgtttacttctggaattttccattgaatatttttggactgtagttgacagcaggtaaccgataccacagaaagtaaaaccaaagataaggggggactactatgcatttcctgatgtaaaacagaaaaaaaaaaattatttcacatttttctagcggtggtctctattttagaaaaaaaaatgcttccagatcataaatgcaaaactcgtgggcatacttttctgtggatatgatggaacgattctcatttgtttttcctaaggttttccaaataatatttccatgaaaacgtatctttttttagtattgaggtatgatttatata

SEQ ID NO: 377135 - DNA, 1107 bp, Homo sapiens
ttagctagactgggttggcatctgtttttcctaagacagccttttctcgtcactgtgaagataaatcaatttaatggacaccactggttgggggtagattgtactttttttgtaagtattgaccacccattagtggcagtgcccagcagcatacaccattgtaccttctccagaaaccctccacttggctgtagatctatccccttccaactctgccctggaagcaagcccaaaatgacctctggagccctaagatgccatcccacggccacgggctttgttctttggctttgtgaaagtgtgctttataaaccttgttggcagactcataattctgctaaggacttatttgttgtgtcaatctacagatcaaaggtgggagcctaaaagcctttgacattgctcataccaaccatattacactctgggatacattgtattaagtactatgggccatcatacaagtaagaaatagttcctgccctccagggacttacaatctagacagcatgaaatgtacaccaataactagcttcactgcttgctggtgatatgacaagacttgctggaagttgtagatgccatatggaagactcagaaggggtgctggatatttgctgaaatcggtggttctcatacttgagcatgcattaaaatcacctagagagctgttaacacagattgctgggtgccactcttagcatttctgattcagtagatctagggtgggcccacaaagttgcattcctaccaagtggccagctgatgcaagtgtggcccaggaataccctgtccaaaatatttttataggagaagcttcttacatatgtaatttccttctgggattgtaacagaactgacatttgttgagtgtctaatatgttctattcagtatattaggtactttggctataatattttctttagattttacaaccctgtgaatttcgtattattactagcactctacaatgagcaaactaaggcttagaaggaggaacttacatttgccagatatccagtatgtaccataaaggatgtggggcattatccaatttaaaactttttgaattctaaatgattagtactcctagtttaggagtggta

SEQ ID NO: 377136 - DNA, 402 bp, Homo sapiens
ccagcccagaagaatagatttgaaagtagtgcagagactggctttcagactcctattatcagccttattggttttcatgttttgccaaatacagcctaagcagtgagagatgtattgagttcctcacaacagaacatgttgaaacataagctacacatttaattggaagaaggcaatatagacaggattcagcctttactgctttgcttttaagctcaaataatagtggtatttggaaaacatcacaaagctctgcagttattttccatagatgttgacttttttttttcctagaagtgattataatattgccagttgatcctgagattacgcatgtgttgaggaaatactaatcagaagtatgtcagtccttcttgcttcacaaagcttctgtatcactaa

SEQ ID NO: 377137 - DNA, 443 bp, Homo sapiens
caggaagactcagaaacatgtcatgcacacgataaaacattttttcttctaatgttgggactttgaagtcccttttggcatgaagagttgtgattccctactcccaggtgttaaatgctgtttacaaatgttatcaggcattttttttcttcgcaaagaggcagaggggcatggctttcttatataggagtgcctgctttgttaaaatactaaaatttaggtttaagatgttaatagaaactccttcaaggtccttcatagtggttcttattgccttccccttacttaccacctagccatagaaggaagaagtaggtggctgggcacagtggctcacatttgtaatcccagcactttgggaggctgaggtggagggaggattgcttgagcccaagagtttgagaccagcctgggcaacatagtgagactcttatctctaaaag

SEQ ID NO: 377138 - DNA, 442 bp, Homo sapiens
  misc_feature (348)..(348): n is a, c, g, or t
  misc_feature (371)..(371): n is a, c, g, or t
  misc_feature (383)..(383): n is a, c, g, or t
  misc_feature (430)..(430): n is a, c, g, or t
gaattaatttttgtaaaagatgtaagatctatgtctagattcatttttttgcctgtggaaatctagttgttctggcaccatttgttgaaaagactgttctttctccattgaaatgtctttgttcctttgtcaaagatcaggtgactatatttatgagggtctgtgttcccttgatctatttgttcttttgctaccagtacaccatcttaattattgaaacttttttttttttttgagacagagtcttgctcagcctgggcgacagagcgagactccgtatcaaaaaaaaaaaatagaaagcatataagcaccagttgtgtctggccagtctgattacggccagcattncagcagctgggaatttgccttcncaagcagtacantggccaggactggtaacaaggggtgagtgcctaggagccagctgganggacagggttct

SEQ ID NO: 377139 - DNA, 221 bp, Homo sapiens
tcccattaagtaacaactgctcattttaccctctctccagccctgacagacaaaccttcaactttctgttttatgatttttgactacttatgatacctcatatagctgggtgtggtggcttacacctgtaatcccatcactttgggaggctgaggcaggcagatcacctgagatcgggagtttgagaccagcctgaccaacatggaaaaaccctgtctgta

SEQ ID NO: 377140 - DNA, 403 bp, Homo sapiens
ttcattacgacaaaaaattaattcacattggaggtttgaggcatcctgaagaattgaggtgcaagctgtgaatgcatctgtcatttttattttgtctgtgtctgacttaattatttcctgttcttgaagattagctgtgatacttgttacagttaagtttcctgatagtagtgtttgctgatattggccgtgcagtgaaaactaggtgcttttgtattgattgggcagacaatggaaaagaagataaaaatattgcggggttaacatcttcaagacatttttatacatttgaacattttccctatctagaataccctgccacgtggaatgagagggtactaaaaataaaaacctatcccattatgcttacgtattgttgagatatttattcatccctggcact

SEQ ID NO: 377141 - DNA, 344 bp, Homo sapiens
ttttttttgccaaatttgggggaatttcaacctttatttcttcattttttaagtctcatcttcgttctcctctccttctggtactccaacaatatgaatatttggattttttgtgagagtcccacagctctctgaggttttgttcagttttttttttcagtctattttctgttgttcagatgggtgatttctattgttctatcttcaagttcattgattctttattctctcatttctgttttgccactgagcccattcactgagtttttaaatttgactactgttatttatttatttttgagatggagtttcgctcttctctcccaggctagagtgcaatggtg

SEQ ID NO: 377142 - DNA, 499 bp, Homo sapiens
ggtggtttagttttctgctttgtggttacaatattgttttttaaatattcaacatgaatacactttcttgtttggataacgtgtaaaacgtctacaaggagggatagataataagttttcccttcagaatgcactgctttgcctgggatgaggaataatttataatggtaactgttgctggttaaaatttggctcctacccacattcatgcaaactcagtgttctagattaaaagagatttaagagacttgccaagcaaatgcatggcatccttagatgtatcctgatttgaataaaacagctataaataataatatttttggggattattgaaaaatttgactataggattagttttcaggtgatattggagaattaatgttattattgttagggtatgttaggcacggtcatgcagcaatgtgtctttctttttaagagatgcatacaaaaatatttgggtgtgaaatgttcttgtgctataatttgctttaaaatt

SEQ ID NO: 377143 - DNA, 358 bp, Homo sapiens
tctgtccattatagatgtaacaagctactcaaaaacaagatccatttctttattattctcccctatatccccaacacctactagaaagtctggctcatagtaagtgctcaataaatgcttgttgaatgaagattaacagatgtacaatcattccatgacatctcaagtataagaaacattgtatgtctttatttttctatatcaaatcaaatcttaatttgccaagattagtgacaattccaatattcgctttttaaatttgcttccatctcctatggatcatactaaaatcccagtaggtaagcagttgaggaaaatggaagtgaaaggtctctgtcccttacatctgcctcttggg

SEQ ID NO: 377144 - DNA, 737 bp, Homo sapiens
tcttttctgtctgaccttgcttataaagcatcgacgagaaaattacagtcttcaaccctcttctggattgacaaattgtggctgggaagtggcgatctagctttcagcccagtaaccagtctttcatgcctactactcccagcattccctcctctccccacgtgtctgtccacacagtgaagaggcctgaccagccgtggtaccagggacaggacgtgtccaggggaacgctgacacctgtcctcgcgccttctcagtggcccagcgtgatgaaaccagcacgtctccgtggatgtgattgggaacccaggggcagtgccagggggagggcttccctcgaggaggctgtttctaacagatttccccactcaaagatcagatcaccagcagaggagcatcagaaactggctccactgttgggcttttccagagattttgggtccctgcgggttgccctaaatagattctggcccacagtttacctcgaaaggctgttgatgttgttctgtttctcctctttcacttagagatcaatgttgattttgcgtacaccatgacatcagcgttaggcaattaggagaaaaaaatctaatcatttcgcctttatttcaagtggttcttgaattccctccagtctcattgtgaaaggggcagggaaaaaaataaaagggtaataatctgatttctgtccatatttccagtgttttatgctttccattaaaaccttgctaatctct

SEQ ID NO: 377145 - DNA, 390 bp, Homo sapiens
tcacaagtgtgacttcatttgaaatagaaaattgtgatgaagtaagcatacagtcctcatctagagtgacctggagaggctatatgagcttgtttgtaagtagaatcctcttagaacttgtgtagtagaatactcctagttgaaatcttagtcctattacttatcaatcttggaatgttggttaaatttaaggccttgaaacacagcttctttatttgtaaactaaggaaaataataccttcttttatgggttgtaaaaaataagacagtgaggctgaactcatgagagggtctcagtaaatgttccttctcctctgatctgagattccaagtactagaatctgaagccagaggaaatcggtgtttcaactcaatccatgacttcttaaa

SEQ ID NO: 377146 - DNA, 6048 bp, Homo sapiens
cctcagcctggcccctgcgcgccgcccgagccggtcccgctgagccgcgggccccgtgccctgcgatggctcggctggtgcagcgcggcgccaggtgccagccgtcctcccgctgagacgcgcccgagtggggacccgctgggcctcggggctcgcagccttcgcctccccgccgcgcccgctccctttctggggactccgccgctgtttctggggacgaggggacaggggacccagacaaagcccactttgtgcagggagttggccgcaggcggggaatgtgcgcgtcggcgcgcgccccctccccgctcccggccagctgcgagtcttggctcccggacttgtctcgtcgcgtcggagaaatcgccccccagcgccgctctcccgcccgggggtcttggttccgagctcgcgcggccgggagtcgcctcggtcttccttggggcgcgcgcagatgtgagcgtgcgagagttgtgtaggggattttgttccctccgaaactgagacccagggcgcccagtgggcacccgtgccttgactctgtcctttctgcagccgctggtccgagctgtctggcctcagtttccctccgacttttctccgctctgccagccctcactgctgcccgtcattgttctcgcagttagatgggggtgctttgtgacggctgccaagttggggtgtgttctctttattccgtttttcaaacagaacaaggcctccaaggctgaccccagacaacccaccccctcggaccctaattcaccttattgcactgattttttttatcaagtcgtattttattgtacaggagccacgccctgatttcttaaaggcgccttgcactctggccatgtgttatctctgcagccggtgtgtgggaggcctcttgtgagccagttgttttcccgcctccaccacccccctcgaagatttagggatgccaggggggaagaaggtggctgggggtggcagcagcggtgccactccaacgtccgctgcggccaccgccccctctggggtcaggcgtttggagaccagcgaaggaacctcagcccagagagatgaggagccagaagaggaaggggaagaggacctgcgagacggaggcgtccccttctttgtcaaccggggtgggctacctgtggatgaggccacctgggaaaggatgtggaaacacgtggccaagatccaccccgatggagagaaggtggcgcaacggatccgtggggccacagacctgcccaagatccccataccgagtgtgcctacgttccagccgtctacacctgtccctgagcgcctggaagctgtgcagcgctatatcagagagctgcagtacaatcacacagggacacagttctttgaaattaagaagagcagacctctgacagggctgatggacctggccaaggaaatgaccaaagaggccctgccaatcaaatgcctggaagccgtgatcctgggaatttacctcaccaacagcatgcccaccctggagcgcttccccatcagcttcaagacctacttctcagggaactacttccgccacatcgtgctgggggtgaacttcgcgggccgctacggtgcgctgggcatgagtcggcgcgaggacctgatgtacaagccgcccgccttccgcacgctcagcgagctcgtgctggacttcgaggccgcctacggccgctgctggcacgtgctcaagaaggtgaagctgggccagagcgtgtcacacgacccgcacagcgtggagcagatcgagtggaagcactcggtgctggacgtggagcgcctgggccgcgatgacttccgcaaggagctggagcgccacgcccgcgacatgcggctcaagattggcaaagggacgggccctccctctcccaccaaggaccggaagaaggatgtttcttccccgcagcgggcccagtccagcccccaccgcaggaacagccgcagtgaaagacggccctcgggtgacaagaagacttccgagcccaaagccatgccagaccttaacgggtaccagatccgggtctgaggcggatgccagcaccccaggccccacccactcttgggggccaggatccacctgctggaaccagccttatgcatggggaaggcggggctggtgacaaggcagggcaagaggctgcaggaagagtgtgttccagctcagccccccaagctgctctcgctcccactgagccaagccccctaactttgggcctagaggccgttagtattttatttggagtttttaactctacaactgaagtttaaggtatttggggaaaacttagtccaaatggatctgctgatggtgggaaggccagtgcttaacaaatccatgtgtcatggggccaggtgagggaaactgctggttctgctggtgcctctgcccctggcttctctctgggagttgggtgcatcttatcagtgggaaatctcccagccttaccaggcctgtgatggggggtgggggtggggtggagatgtttctccagttctgcctgccctggcagaatcttgacccagggaaagggaagcagggtaggagtccttctgagaaaggtctgtgtagcccattaaccaggagcttggcacaggccacatctgccccaagagcatgagctcgtggctcaggagagccttcaggcccttgaggcccccatgggcagtgctgtgtgggcagaggaggggtgatatgagagcgagcccagggaaggacctctgggcaaaaagttcccaggccctaactgcgtctacttgctcagtcccagctctgcctgttgctctagcccacaggctccctgcggagggtctgggcttggcggaggacccagaatggcactgaggccagcatggctgtgggagttgagcaaaccctgggtgccagtccaggagctgtggctggacatggggtgatggggcgggatgcttgggcctgggtctctccgccagcagtgccaggagcccttgctggggaaatcaagaccagactaggatgcttctgccccaggcctgccttccattctttaacagcccatcttggcttggggttgcaatgatggctgggccagtcacttgtggcagggcatcagggccctggcagggaagaacctaggcacctggggttgtccccagcctgcccgtcagcatgagatacccagtgggaaagtgagaggatgcggagaggttggcagagccaggggtaggttctggaggctcaagcaacaaggaggtgcaggtaaagggtgcagtgcagccactgagggacagctgggaactgggggatgcaagtgagaaagggatgtgggggagagttcaggatcaggctgcttgaggagtaatgggttacctacagcagagacgagatggctgtttgtcaggaggcggtagaaaggtagaaaggattcagattgtggaagggtaaatggatgagatgaccattaaggttttgttttactgagaggctgtaagtctgccagggacagctgtcagtaaggctgcagaagggctggggggctacacaaggaagagcagaactagggttgtaagctcaaatgacgagcaaacggtgagaaggaggcctgaagggctgtgtggggactatggctacctgaagagggcacaccctgttaaaggggccacagctgctcagctgttcttacagtgccggccctgtgttgccagattgtctgctttgtcagaggccagaattctgactttttatgtgaaataggatttttaaatgctggtgatcacttaaaaaaaacttaaaaacccaatactggcaaaagaggatgccagtttgcaatccctgaagtagagagagctcgtgctggggagaagtccaccaagatgctttgaggcgggctgtagcaaagtcctgtttctcagagctgggctgggctggggtaggatccttgcagctgaggaggaggaaaagccactgagtctcctcccagagcgggacaaaccagaggccctttgcagttgctgggtcaccagcgggggtggcgcatggagtacagacagtgtagctcttggcctgccagggagacggatggtgcctttgaagcaaagaggaagggaaggcagaaccagggatgcctttgctgatgagagtgcctgtcagggaaggcgccacaggctggcagctcttcaaaccagcagcgcttgacccagagccagatccagcatggcctggccagaggcaccctgggaggccagctggtcagtcccttgcctccccaagttccccctggggtcaatgagccctgggaggatgcctaacctaactccagccagactaataggggcatggtgacccttgactcaccatcccatcccagctttcagggagtgggggtagtgtggtctccatgttcctactatgcctaagaagagatggctcaccttgggaggtgccaggctgaaactaggtcctttccgggtctggatgctgccgctcaggagcaggggcgtggcctcagctgcctctgggagcttcccgggaatgacagggtttgaggggagtagatatgagagggagccgctcctggttctggagtcttaggaggttccaacttgcaggatcctttcccagagccctccatggagaaaacagcaaaatgaagcccttacctgcttgctgtctgcaagggagggagccgagccccagctgataatcccccagcactcacccttcctgagctgagacttcggggctgtggagaccagcacaggacatagtggtgctttttaaatttatttttaactgtttctcatatgtagcaacccctcctcccctcctgggcatgtttacacaggctctgctctgggggctggcctggctgtgaggtttctggggaggcagagaggcagggactttggggccttagtcaccatccatggtatcacctcatctcacttcctgtgagggacagggcctggctgatgtgatcccagctccccccagttcaggactgtctttcagctcctttgcccctggaggtgggggctgctggctgaggaggggtcaaggtgagttcaagaaagctacctgtggaaaatggaccaggttgggggggtgattgcaaagtctccccaaagcctggctcctcatgctcagtgccaggggcagaacactggggagccaggtatagagagccttcctgtcataactgccagtcctcttcctccaaggcctctgcatattctcatgttcccctcacccatcatgccagccacccctatccctcttctagcagggccaagatggggacagcagcagccctctggccttgggatgtgatgataaagcaagcctagggccagggtttggggagcagagagagccaagaagttgaccacgtgtgatttccagcccttcccactgggacttgacttcccaggtcaaggagtccgtctcattctggctggtcgagtgaccagaggcctgtgtgaatgtgtgcacctgcttttcctgcctggaatgttttctggctcagctgcagcaacatctgtgagcccagtgtctgccctgtgtccctgggctcgctccaagtgcaggaacatacatgcagggcccaacatgatgatggtgtgaagggcaggaaacagtcctctgaaggagtggggaggtgggcagtctgcccccgccaggtaccatcgcctcctgccagcttccttagaccaggcagggctgccatggtgctagctgcaagtccatcagtattgaccgtctcgctccatcttggtcctccggagtcccaagtttccttttcatcaaatctgacaagagagaagaaacatgggtgtgcttggcccacagggcctggtggtgatggacctccccgctccctcaagctctggatggctgcagtgttgtactagactttgttcaggctgttctcatctcagtattgccccttcctttcactttcacacttcatctcattcctgttgtcactttccccgaaacgaataaagtctccccagctcctgctgtgtaggctgggcagaaaccacaacacgtaagccttg

SEQ ID NO: 377147 - DNA, 2314 bp, Homo sapiens
cctcagcctggcccctgcgcgccgcccgagccggtcccgctgagccgcgggccccgtgccctgcgatggctcggctggtgcagcgcggcgccaggtgccagccgtcctcccgctgagacgcgcccgagtggggacccgctgggcctcggggctcgcagccttcgcctccccgccgcgcccgctccctttctggggactccgccgctgtttctggggacgaggggacaggggacccagacaaagcccactttgtgcagggagttggccgcaggcggggaatgtgcgcgtcggcgcgcgccccctccccgctcccggccagctgcgagtcttggctcccggacttgtctcgtcgcgtcggagaaatcgccccccagcgccgctctcccgcccgggggtcttggttccgagctcgcgcggccgggagtcgcctcggtcttccttggggcgcgcgcagatgtgagcgtgcgagagttgtgtaggggattttgttccctccgaaactgagacccagggcgcccagtgggcacccgtgccttgactctgtcctttctgcagccgctggtccgagctgtctggcctcagtttccctccgacttttctccgctctgccagccctcactgctgcccgtcattgttctcgcagttagatgggggtgctttgtgacggctgccaagttggggtgtgttctctttattccgtttttcaaacagaacaaggcctccaaggctgaccccagacaacccaccccctcggaccctaattcaccttattgcactgattttttttatcaagtcgtattttattgtacaggagccacgccctgatttcttaaaggcgccttgcactctggccatgtgttatctctgcagccggtgtgtgggaggcctcttgtgagccagttgttttcccgcctccaccacccccctcgaagatttagggatgccaggggggaagaaggtggctgggggtggcagcagcggtgccactccaacgtccgctgcggccaccgccccctctggggtcaggcgtttggagaccagcgaaggaacctcagcccagagagatgaggagccagaagaggaaggggaagaggacctgcgagacggaggcgtccccttctttgtcaaccggggtgggctacctgtggatgaggccacctgggaaaggatgtggaaacacgtggccaagatccaccccgatggagagaaggtggcgcaacggatccgtggggccacagacctgcccaagatccccataccgagtgtgcctacgttccagccgtctacacctgtccctgagcgcctggaagctgtgcagcgctatatcagagagctgcagtacaatcacacagggacacagttctttgaaattaagaagagcagacctctgacagggctgatggacctggccaaggaaatgaccaaagaggccctgccaatcaaatgcctggaagccgtgatcctgggaatgttttccagtcacacccccgcctccaacccaaagggcagaagtggggcctgtagctgagtcaccagggtagccttggagacagaccagccaccaggagaggctgtcctccccagccccacagtcaacagcgggagaggaggaagtgtttatggctggttctccatcctaactggtcaatgcctgagccctaccttttcttctcagtcattttattattaaaaatgtcataaatacacgtgaaacctagaacaacatcatgaactcctgtgcacccgttactcagcttcaccaactcaaagccaattctgtttcatctcttccaccctgcccgtattctttaccagcttttaaacattttgcctgcgcccctggggtaggcagcccactgggctcagtgctgcagaggagcacagattaggtgggagccaagagggtgacggggagggggtctgatggaacaggagtcccatctgagggcaggtcctgggaggactgtgatccaggggtccatccccaccccccacacagacatgcctgcctgaagttcacacaaagaggctgcgggtgcccttctcttcccgcagaggtctcggagggaacgccactatggcaggcatttgctaacagggcaggcccatttctggagcccgacatccctgccctgtttatggggttctttgctgggataagcctgaggccacccgagaaattcaggctgcaggcagtgcctccttcatgtcttcacgttcacttctccctcaggggtcacacaccaaagtggaggctcccaccctcataggagagagactggtccttttccccaggaggacacacagaagtcac

SEQ ID NO: 377148 - DNA, 4010 bp, Homo sapiens
cctcagcctggcccctgcgcgccgcccgagccggtcccgctgagccgcgggccccgtgccctgcgatggctcggctggtgcagcgcggcgccaggtgccagccgtcctcccgctgagacgcgcccgagtggggacccgctgggcctcggggctcgcagccttcgcctccccgccgcgcccgctccctttctggggactccgccgctgtttctggggacgaggggacaggggacccagacaaagcccactttgtgcagggagttggccgcaggcggggaatgtgcgcgtcggcgcgcgccccctccccgctcccggccagctgcgagtcttggctcccggacttgtctcgtcgcgtcggagaaatcgccccccagcgccgctctcccgcccgggggtcttggttccgagctcgcgcggccgggagtcgcctcggtcttccttggggcgcgcgcagatgtgagcgtgcgagagttgtgtaggggattttgttccctccgaaactgagacccagggcgcccagtgggcacccgtgccttgactctgtcctttctgcagccgctggtccgagctgtctggcctcagtttccctccgacttttctccgctctgccagccctcactgctgcccgtcattgttctcgcagttagatgggggtgctttgtgacggctgccaagttggggtgtgttctctttattccgtttttcaaacagaacaaggcctccaaggctgaccccagacaacccaccccctcggaccctaattcaccttattgcactgattttttttatcaagtcgtattttattgtacaggagccacgccctgatttcttaaaggcgccttgcactctggccatgtgttatctctgcagccggtgtgtgggaggcctcttgtgagccagttgttttcccgcctccaccacccccctcgaagatttagggatgccaggggggaagaaggtggctgggggtggcagcagcggtgccactccaacgtccgctgcggccaccgccccctctggggtcaggcgtttggagaccagcgaaggaacctcagcccagagagatgaggagccagaagaggaaggggaagaggacctgcgagacggaggcgtccccttctttgtcaaccggggtgggctacctgtggatgaggccacctgggaaaggatgtggaaacacgtggccaagatccaccccgatggagagaaggtggcgcaacggatccgtggggccacagacctgcccaagatccccataccgagtgtgcctacgttccagccgtctacacctgtccctgagcgcctggaagctgtgcagcgctatatcagagagctgcagtacaatcacacagggacacagttctttgaaattaagaagagcagacctctgacagggctgatggacctggccaaggaaatgaccaaagaggccctgccaatcaaatgcctggaagccgtgatcctgggaatttacctcaccaacagcatgcccaccctggagcgcttccccatcagcttcaagacctacttctcagggaactacttccgccacatcgtgctgggggtgaacttcgcgggccgctacggtgcgctgggcatgagtcggcgcgaggacctgatgtacaagccgcccgccttccgcacgctcagcgagctcgtgctggacttcgaggccgcctacggccgctgctggcacgtgctcaagaaggtgaagctgggccagagcgtgtcacacgacccgcacagcgtggagcagatcgagtggaagcactcggtgctggacgtggagcgcctgggccgcgatgacttccgcaaggagctggagcgccacgcccgcgacatgcggctcaagattggcaaagggacgggccctccctctcccaccaaggaccggaagaaggatgtttcttccccgcagcgggcccagtccagcccccaccgcaggaacagccgcagtgaaagacggccctcgggtgacaagaagacttccgagcccaaagccatgccagaccttaacgggtaccagatccgggtctgaggcggatgccagcaccccaggccccacccactcttgggggccaggatccacctgctggaaccagccttatgcatggggaaggcggggctggtgacaaggcagggcaagaggctgcaggaagagtgtgttccagctcagccccccaagctgctctcgctcccactgagccaagccccctaactttgggcctagaggccgttagtattttatttggagtttttaactctacaactgaagtttaaggtatttggggaaaacttagtccaaatggatctgctgatggtgggaaggccagtgcttaacaaatccatgtgtcatggggccaggtgagggaaactgctggttctgctggtgcctctgcccctggcttctctctgggagttgggtgcatcttatcagtgggaaatctcccagccttaccaggcctgtgatggggggtgggggtggggtggagatgtttctccagttctgcctgccctggcagaatcttgacccagggaaagggaagcagggtaggagtccttctgagaaaggtctgtgtagcccattaaccaggagcttggcacaggccacatctgccccaagagcatgagctcgtggctcaggagagccttcaggcccttgaggcccccatgggcagtgctgtgtgggcagaggaggggtgatatgagagcgagcccagggaaggacctctgggcaaaaagttcccaggccctaactgcgtctacttgctcagtcccagctctgcctgttgctctagcccacaggctccctgcggagggtctgggcttggcggaggacccagaatggcactgaggccagcatggctgtgggagttgagcaaaccctgggtgccagtccaggagctgtggctggacatggggtgatggggcgggatgcttgggcctgggtctctccgccagcagtgccaggagcccttgctggggaaatcaagaccagactaggatgcttctgccccaggcctgccttccattctttaacagcccatcttggcttggggttgcaatgatggctgggccagtcacttgtggcagggcatcagggccctggcagggaagaacctaggcacctggggttgtccccagcctgcccgtcagcatgagatacccagtgggaaagtgagaggatgcggagaggttggcagagccaggggtaggttctggaggctcaagcaacaaggaggtgcaggtaaagggtgcagtgcagccactgagggacagctgggaactgggggatgcaagtgagaaagggatgtgggggagagttcaggatcaggctgcttgaggagtaatgggttacctacagcagagacgagatggctgtttgtcaggaggcggtagaaaggtagaaaggattcagattgtggaagggtaaatggatgagatgaccattaaggttttgttttactgagaggctgtaagtctgccagggacagctgtcagtaaggctgcagaagggctggggggctacacaaggaagagcagaactagggttgtaagctcaaatgacgagcaaacggtgagaaggaggcctgaagggctgtgtggggactatggctacctgaagagggcacaccctgttaaaggggccacagctgctcagctgttcttacagtgccggccctgtgttgccagattgtctgctttgtcagaggccagaattctgactttttatgtgaaataggatttttaaatgctggtgatcacttaaaaaaaacttaaaaacccaatactggcaaaagaggatgccagtttgcaatccccgctccctcaagctctggatggctgcagtgttgtactagactttgttcaggctgttctcatctcagtattgccccttcctttcactttcacacttcatctcattcctgttgtcactttccccgaaacgaataaagtctccccagctcctgctgtgtaggctgggcagaaaccacaacacgtaagccttg

SEQ ID NO: 377149 - DNA, 3729 bp, Homo sapiens
cctcagcctggcccctgcgcgccgcccgagccggtcccgctgagccgcgggccccgtgccctgcgatggctcggctggtgcagcgcggcgccaggtgccagccgtcctcccgctgagacgcgcccgagtggggacccgctgggcctcggggctcgcagccttcgcctccccgccgcgcccgctccctttctggggactccgccgctgtttctggggacgaggggacaggggacccagacaaagcccactttgtgcagggagttggccgcaggcggggaatgtgcgcgtcggcgcgcgccccctccccgctcccggccagctgcgagtcttggctcccggacttgtctcgtcgcgtcggagaaatcgccccccagcgccgctctcccgcccgggggtcttggttccgagctcgcgcggccgggagtcgcctcggtcttccttggggcgcgcgcagatgtgagcgtgcgagagttgtgtaggggattttgttccctccgaaactgagacccagggcgcccagtgggcacccgtgccttgactctgtcctttctgcagccgctggtccgagctgtctggcctcagtttccctccgacttttctccgctctgccagccctcactgctgcccgtcattgttctcgcagttagatgggggtgctttgtgacggctgccaagttggggtgtgttctctttattccgtttttcaaacagaacaaggcctccaaggctgaccccagacaacccaccccctcggaccctaattcaccttattgcactgattttttttatcaagtcgtattttattgtacaggagccacgccctgatttcttaaaggcgccttgcactctggccatgtgttatctctgcagccggtgtgtgggaggcctcttgtgagccagttgttttcccgcctccaccacccccctcgaagatttagggatgccaggggggaagaaggtggctgggggtggcagcagcggtgccactccaacgtccgctgcggccaccgccccctctggggtcaggcgtttggagaccagcgaaggaacctcagcccagagagatgaggagccagaagaggaaggggaagaggacctgcgagacggaggcgtccccttctttgtcaaccggggtgggctacctgtggatgaggccacctgggaaaggatgtggaaacacgtggccaagatccaccccgatggagagaaggtggcgcaacggatccgtggggccacagacctgcccaagatccccataccgagtgtgcctacgttccagccgtctacacctgtccctgagcgcctggaagctgtgcagcgctatatcagagagctgcagtacaatcacacagggacacagttctttgaaattaagaagagcagacctctgacagggctgatggacctggccaaggaaatgaccaaagaggccctgccaatcaaatgcctggaagccgtgatcctgggaatttacctcaccaacagcatgcccaccctggagcgcttccccatcagcttcaagacctacttctcagggaactacttccgccacatcgtgctgggggtgaacttcgcgggccgctacggtgcgctgggcatgagtcggcgcgaggacctgatgtacaagccgcccgccttccgcacgctcagcgagctcgtgctggacttcgaggccgcctacggccgctgctggcacgtgctcaagaaggtgaagctgggccagagcgtgtcacacgacccgcacagcgtggagcagatcgagtggaagcactcggtgctggacgtggagcgcctgggccgcgatgacttccgcaaggagctggagcgccacgcccgcgacatgcggctcaagattggcaaagggacgggccctccctctcccaccaaggaccggaagaaggatgtttcttccccgcagcgggcccagtccagcccccaccgcaggaacagccgcagtgaaagacggccctcgggtgacaagaagacttccgagcccaaagccatgccagaccttaacgggtaccagatccgggtctgaggcggatgccagcaccccaggccccacccactcttgggggccaggatccacctgctggaaccagccttatgcatggggaaggcggggctggtgacaaggcagggcaagaggctgcaggaagagtgtgttccagctcagccccccaagctgctctcgctcccactgagccaagccccctaactttgggcctagaggccgttagtattttatttggagtttttaactctacaactgaagtttaaggtatttggggaaaacttagtccaaatggatctgctgatggtgggaaggccagtgcttaacaaatccatgtgtcatggggccaggtgagggaaactgctggttctgctggtgcctctgcccctggcttctctctgggagttgggtgcatcttatcagtgggaaatctcccagccttaccaggcctgtgatggggggtgggggtggggtggagatgtttctccagttctgcctgccctggcagaatcttgacccagggaaagggaagcagggtaggagtccttctgagaaaggtctgtgtagcccattaaccaggagcttggcacaggccacatctgccccaagagcatgagctcgtggctcaggagagccttcaggcccttgaggcccccatgggcagtgctgtgtgggcagaggaggggtgatatgagagcgagcccagggaaggacctctgggcaaaaagttcccaggccctaactgcgtctacttgctcagtcccagctctgcctgttgctctagcccacaggctccctgcggagggtctgggcttggcggaggacccagaatggcactgaggccagcatggctgtgggagttgagcaaaccctgggtgccagtccaggagctgtggctggacatggggtgatggggcgggatgcttgggcctgggtctctccgccagcagtgccaggagcccttgctggggaaatcaagaccagactaggatgcttctgccccaggcctgccttccattctttaacagcccatcttggcttggggttgcaatgatggctgggccagtcacttgtggcagggcatcagggccctggcagggaagaacctaggcacctggggttgtccccagcctgcccgtcagcatgagatacccagtgggaaagtgagaggatgcggagaggttggcagagccaggggtaggttctggaggctcaagcaacaaggaggtgcaggtaaagggtgcagtgcagccactgagggacagctgggaactgggggatgcaagtgagaaagggatgtgggggagagttcaggatcaggctgcttgaggagtaatgggttacctacagcagagacgagatggctgtttgtcaggaggcggtagaaaggtagaaaggattcagattgtggaagggtaaatggatgagatgaccattaaggttttgttttactgagaggctgtaagtctgccagggacagctgtcagtaaggctgcagaagggctggggggctacacaaggaagagcagaactagggttgtaagctcaaatgacgagcaaacggtgagaaggaggcctgagggacagctgggaactgggggatgcaagtgagaaagggatgtgggggagagttcaggatcaggctgcttgaggagtaatgggttacctacagcagagacgagatggctgtttgtcaggaggcggcagaaaggtaa

SEQ ID NO: 377150 - DNA, 1774 bp, Homo sapiens
cctcagcctggcccctgcgcgccgcccgagccggtcccgctgagccgcgggccccgtgccctgcgatggctcggctggtgcagcgcggcgccaggtgccagccgtcctcccgctgagacgcgcccgagtggggacccgctgggcctcggggctcgcagccttcgcctccccgccgcgcccgctccctttctggggactccgccgctgtttctggggacgaggggacaggggacccagacaaagcccactttgtgcagggagttggccgcaggcggggaatgtgcgcgtcggcgcgcgccccctccccgctcccggccagctgcgagtcttggctcccggacttgtctcgtcgcgtcggagaaatcgccccccagcgccgctctcccgcccgggggtcttggttccgagctcgcgcggccgggagtcgcctcggtcttccttggggcgcgcgcagatgtgagcgtgcgagagttgtgtaggggattttgttccctccgaaactgagacccagggcgcccagtgggcacccgtgccttgactctgtcctttctgcagccgctggtccgagctgtctggcctcagtttccctccgacttttctccgctctgccagccctcactgctgcccgtcattgttctcgcagttagatgggggtgctttgtgacggctgccaagttggggtgtgttctctttattccgtttttcaaacagaacaaggcctccaaggctgaccccagacaacccaccccctcggaccctaattcaccttattgcactgattttttttatcaagtcgtattttattgtacaggagccacgccctgatttcttaaaggcgccttgcactctggccatgtgttatctctgcagccggtgtgtgggaggcctcttgtgagccagttgttttcccgcctccaccacccccctcgaagatttagggatgccaggggggaagaaggtggctgggggtggcagcagcggtgccactccaacgtccgctgcggccaccgccccctctggggtcaggcgtttggagaccagcgaaggaacctcagcccagagagatgaggagccagaagaggaaggggaagaggacctgcgagacggaggcgtccccttctttgtcaaccggggtgggctacctgtggatgaggccacctgggaaaggatgtggaaacacgtggccaagatccaccccgatggagagaaggtggcgcaacggatccgtggggccacagacctgcccaagatccccataccgagtgtgcctacgttccagccgtctacacctgtccctgagcgcctggaagctgtgcagcgctatatcagagagctgcagtatcctctctggtcaagggtcatggccaccttctggccggtgtggtgggccttgtttccaggcagagctggagaggtatcagcagagccgcctcattccacaacgccagggccaccattcacgtgacatctctgtgctccctggtgctgtgggacgcggcgcgtgtgcctcctgggtgtcggaggaattttgtctgatgagtgcagggcccactctgcactctctgccacccccttcccgctcctgccgtgtgatggggtaaagagaggaaaatgggtcctgagtgacttgctggtggggtggccaagtctagatagatctcatgctctgttgtccacccagccctagcagagggggagagagggagctgccttggggcttttaaaagtctgattttgaataaagggaaaaatggcagagaaaaaggaaaaaaaa

SEQ ID NO: 377151 - DNA, 1918 bp, Homo sapiens
cctcagcctggcccctgcgcgccgcccgagccggtcccgctgagccgcgggccccgtgccctgcgatggctcggctggtgcagcgcggcgccaggtgccagccgtcctcccgctgagacgcgcccgagtggggacccgctgggcctcggggctcgcagccttcgcctccccgccgcgcccgctccctttctggggactccgccgctgtttctggggacgaggggacaggggacccagacaaagcccactttgtgcagggagttggccgcaggcggggaatgtgcgcgtcggcgcgcgccccctccccgctcccggccagctgcgagtcttggctcccggacttgtctcgtcgcgtcggagaaatcgccccccagcgccgctctcccgcccgggggtcttggttccgagctcgcgcggccgggagtcgcctcggtcttccttggggcgcgcgcagatgtgagcgtgcgagagttgtgtaggggattttgttccctccgaaactgagacccagggcgcccagtgggcacccgtgccttgactctgtcctttctgcagccgctggtccgagctgtctggcctcagtttccctccgacttttctccgctctgccagccctcactgctgcccgtcattgttctcgcagttagatgggggtgctttgtgacggctgccaagttggggtgtgttctctttattccgtttttcaaacagaacaaggcctccaaggctgaccccagacaacccaccccctcggaccctaattcaccttattgcactgattttttttatcaagtcgtattttattgtacaggagccacgccctgatttcttaaaggcgccttgcactctggccatgtgttatctctgcagccggtgtgtgggaggcctcttgtgagccagttgttttcccgcctccaccacccccctcgaagatttagggatgccaggggggaagaaggtggctgggggtggcagcagcggtgccactccaacgtccgctgcggccaccgccccctctggggtcaggcgtttggagaccagcgaaggaacctcagcccagagagatgaggagccagaagaggaaggggaagaggacctgcgagacggaggcgtccccttctttgtcaaccggggtgggctacctgtggatgaggccacctgggaaaggatgtggaaacacgtggccaagatccaccccgatggagagaaggtggcgcaacggatccgtggggccacagacctgcccaagatccccataccgagtgtgcctacgttccagccgtctacacctgtccctgagcgcctggaagctgtgcagcgctatatcagagagctgcagtacaatcacacagggacacagttctttgaaattaagaagagcagacctctgacagggctgatggacctggccaaggaaatgaccaaagaggccctgccaatcaaatgcctggaagccgtgatcctgggaatgtatccttcctcacctgaaggggaggggtccgggcttctctgggcctcagcttcctgctctgaaagtgagggtggggtaggttgaatgggctccagggctctcccatatgcagtcatctgcttggccccaagatggagaagcaccccactaaagtggaagaaccccccaaaatggaggagccccgaggtcccagtaccccacatctcagttgctaccttcccaggcttactgggcagctcttttttgagtcacgtggatacagggaccgttttctgaaccccaaatcagggcacagtgtctcacaaagacagttgtaccatttccaagaactagacagtctgggaggcacagttggaatgcccagatgttggcatttccagaacatgttgatttctggacgagatattaaagcaaaactgccttaaaaaaaaaaaaaccacaaacaag

SEQ ID NO: 377152 - DNA, 5701 bp, Homo sapiens
cctcagcctggcccctgcgcgccgcccgagccggtcccgctgagccgcgggccccgtgccctgcgatggctcggctggtgcagcgcggcgccaggtgccagccgtcctcccgctgagacgcgcccgagtggggacccgctgggcctcggggctcgcagccttcgcctccccgccgcgcccgctccctttctggggactccgccgctgtttctggggacgaggggacaggggacccagacaaagcccactttgtgcagggagttggccgcaggcggggaatgtgcgcgtcggcgcgcgccccctccccgctcccggccagctgcgagtcttggctcccggacttgtctcgtcgcgtcggagaaatcgccccccagcgccgctctcccgcccgggggtcttggttccgagctcgcgcggccgggagtcgcctcggtcttccttggggcgcgcgcagatgtgagcgtgcgagagttgtgtaggggattttgttccctccgaaactgagacccagggcgcccagtgggcacccgtgccttgactctgtcctttctgcagccgctggtccgagctgtctggcctcagtttccctccgacttttctccgctctgccagccctcactgctgcccgtcattgttctcgcagttagatgggggtgctttgtgacggctgccaagttggggtgtgttctctttattccgtttttcaaacagaacaaggcctccaaggctgaccccagacaacccaccccctcggaccctaattcaccttattgcactgattttttttatcaagtcgtattttattgtacaggagccacgccctgatttcttaaaggcgccttgcactctggccatgtgttatctctgcagccggtgtgtgggaggcctcttgtgagccagttgttttcccgcctccaccacccccctcgaagatttagggatgccaggggggaagaaggtggctgggggtggcagcagcggtgccactccaacgtccgctgcggccaccgccccctctggggtcaggcgtttggagaccagcgaaggaacctcagcccagagagatgaggagccagaagaggaaggggaagaggacctgcgagacggaggcgtccccttctttgtcaaccggggtgggctacctgtggatgaggccacctgggaaaggatgtggaaacacgtggccaagatccaccccgatggagagaaggtggcgcaacggatccgtggggccacagacctgcccaagatccccataccgagtgtgcctacgttccagccgtctacacctgtccctgagcgcctggaagctgtgcagcgctatatcagagagctgcagtacaatcacacagggacacagttctttgaaattaagaagagcagacctctgacagggctgatggacctggccaaggaaatgaccaaagaggccctgccaatcaaatgcctggaagccgtgatcctgggaatttacctcaccaacagcatgcccaccctggagcgcttccccatcagcttcaagacctacttctcagggaactacttccgccacatcgtgctgggggtgaacttcgcgggccgctacggtgcgctgggcatgagtcggcgcgaggacctgatgtacaagccgcccgccttccgcacgctcagcgagctcgtgctggacttcgaggccgcctacggccgctgctggcacgtgctcaagaaggtgaagctgggccagagcgtgtcacacgacccgcacagcgtggagcagatcgagtggaagcactcggtgctggacgtggagcgcctgggccgcgatgacttccgcaaggagctggagcgccacgcccgcgacatgcggctcaagattggcaaagggacgggccctccctctcccaccaaggaccggaagaaggatgtttcttccccgcagcgggcccagtccagcccccaccgcaggaacagccgcagtgaaagacggccctcgggtgacaagaagacttccgagcccaaagccatgccagaccttaacgggtaccagatccgggtctgaggcggatgccagcaccccaggccccacccactcttgggggccaggatccacctgctggaaccagccttatgcatggggaaggcggggctggtgacaaggcagggcaagaggctgcaggaagagtgtgttccagctcagccccccaagctgctctcgctcccactgagccaagccccctaactttgggcctagaggccgttagtattttatttggagtttttaactctacaactgaagtttaaggtatttggggaaaacttagtccaaatggatctgctgatggtgggaaggccagtgcttaacaaatccatgtgtcatggggccaggtgagggaaactgctggttctgctggtgcctctgcccctggcttctctctgggagttgggtgcatcttatcagtgggaaatctcccagccttaccaggcctgtgatggggggtgggggtggggtggagatgtttctccagttctgcctgccctggcagaatcttgacccagggaaagggaagcagggtaggagtccttctgagaaaggtctgtgtagcccattaaccaggagcttggcacaggccacatctgccccaagagcatgagctcgtggctcaggagagccttcaggcccttgaggcccccatgggcagtgctgtgtgggcagaggaggggtgatatgagagcgagcccagggaaggacctctgggcaaaaagttcccaggccctaactgcgtctacttgctcagtcccagctctgcctgttgctctagcccacaggctccctgcggagggtctgggcttggcggaggacccagaatggcactgaggccagcatggctgtgggagttgagcaaaccctgggtgccagtccaggagctgtggctggacatggggtgatggggcgggatgcttgggcctgggtctctccgccagcagtgccaggagcccttgctggggaaatcaagaccagactaggatgcttctgccccaggcctgccttccattctttaacagcccatcttggcttggggttgcaatgatggctgggccagtcacttgtggcagggcatcagggccctggcagggaagaacctaggcacctggggttgtccccagcctgcccgtcagcatgagatacccagtgggaaagtgagaggatgcggagaggttggcagagccaggggtaggttctggaggctcaagcaacaaggaggtgcaggtaaagggtgcagtgcagccactgagggacagctgggaactgggggatgcaagtgagaaagggatgtgggggagagttcaggatcaggctgcttgaggagtaatgggttacctacagcagagacgagatggctgtttgtcaggaggcggtagaaaggtagaaaggattcagattgtggaagggtaaatggatgagatgaccattaaggttttgttttactgagaggctgtaagtctgccagggacagctgtcagtaaggctgcagaagggctggggggctacacaaggaagagcagaactagggttgtaagctcaaatgacgagcaaacggtgagaaggaggcctgaagggctgtgtggggactatggctacctgaagagggcacaccctgttaaaggggccacagctgctcagctgttcttacagtgccggccctgtgttgccagattgtctgctttgtcagaggccagaattctgactttttatgtgaaataggatttttaaatgctggtgatcacttaaaaaaaacttaaaaacccaatactggcaaaagaggatgccagtttgcaatccctgaagtagagagagctcgtgctggggagaagtccaccaagatgctttgaggcgggctgtagcaaagtcctgtttctcagagctgggctgggctggggtaggatccttgcagctgaggaggaggaaaagccactgagtctcctcccagagcgggacaaaccagaggccctttgcagttgctgggtcaccagcgggggtggcgcatggagtacagacagtgtagctcttggcctgccagggagacggatggtgcctttgaagcaaagaggaagggaaggcagaaccagggatgcctttgctgatgagagtgcctgtcagggaaggcgccacaggctggcagctcttcaaaccagcagcgcttgacccagagccagatccagcatggcctggccagaggcaccctgggaggccagctggtcagtcccttgcctccccaagttccccctggggtcaatgagccctgggaggatgcctaacctaactccagccagactaataggggcatggtgacccttgactcaccatcccatcccagctttcagggagtgggggtagtgtggtctccatgttcctactatgcctaagaagagatggctcaccttgggaggtgccaggctgaaactaggtcctttccgggtctggatgctgccgctcaggagcaggggcgtggcctcagctgcctctgggagcttcccgggaatgacagggtttgaggggagtagatatgagagggagccgctcctggttctggagtcttaggaggttccaacttgcaggatcctttcccagagccctccatggagaaaacagcaaaatgaagcccttacctgcttgctgtctgcaagggagggagccgagccccagctgataatcccccagcactcacccttcctgagctgagacttcggggctgtggagaccagcacaggacatagtggtgctttttaaatttatttttaactgtttctcatatgtagcaacccctcctcccctcctgggcatgtttacacaggctctgctctgggggctggcctggctgtgaggtttctggggaggcagagaggcagggactttggggccttagtcaccatccatggtatcacctcatctcacttcctgtgagggacagggcctggctgatgtgatcccagctccccccagttcaggactgtctttcagctcctttgcccctggaggtgggggctgctggctgaggaggggtcaaggtgagttcaagaaagctacctgtggaaaatggaccaggttgggggggtgattgcaaagtctccccaaagcctggctcctcatgctcagtgccaggggcagaacactggggagccaggtatagagagccttcctgtcataactgccagtcctcttcctccaaggcctctgcatattctcatgttcccctcacccatcatgccagccacccctatccctcttctagcagggccaagatggggacagcagcagccctctggccttgggatgtgatgataaagcaagcctagggccagggtttggggagcagagagagccaagaagttgaccacgtgtgatttccagcccttcccactgggacttgacttcccaggtcaaggatcccaagtttccttttcatcaaatctgacaagagagaagaaacatgggtgtgcttggcccacagggcctggtggtgatggacctccccgctccctcaagctctggatggctgcagtgttgtactagactttgttcaggctgttctcatctcagtattgccccttcctttcactttcacacttcatctcattcctgttgtcactttccccgaaacgaataaagtctccccagctcctgctgtgtaggctgggcagaaaccacaacacgtaagccttg

SEQ ID NO: 377153 - DNA, 2762 bp, Homo sapiens
cctcagcctggcccctgcgcgccgcccgagccggtcccgctgagccgcgggccccgtgccctgcgatggctcggctggtgcagcgcggcgccaggtgccagccgtcctcccgctgagacgcgcccgagtggggacccgctgggcctcggggctcgcagccttcgcctccccgccgcgcccgctccctttctggggactccgccgctgtttctggggacgaggggacaggggacccagacaaagcccactttgtgcagggagttggccgcaggcggggaatgtgcgcgtcggcgcgcgccccctccccgctcccggccagctgcgagtcttggctcccggacttgtctcgtcgcgtcggagaaatcgccccccagcgccgctctcccgcccgggggtcttggttccgagctcgcgcggccgggagtcgcctcggtcttccttggggcgcgcgcagatgtgagcgtgcgagagttgtgtaggggattttgttccctccgaaactgagacccagggcgcccagtgggcacccgtgccttgactctgtcctttctgcagccgctggtccgagctgtctggcctcagtttccctccgacttttctccgctctgccagccctcactgctgcccgtcattgttctcgcagttagatgggggtgctttgtgacggctgccaagttggggtgtgttctctttattccgtttttcaaacagaacaaggcctccaaggctgaccccagacaacccaccccctcggaccctaattcaccttattgcactgattttttttatcaagtcgtattttattgtacaggagccacgccctgatttcttaaaggcgccttgcactctggccatgtgttatctctgcagccggtgtgtgggaggcctcttgtgagccagttgttttcccgcctccaccacccccctcgaagatttagggatgccaggggggaagaaggtggctgggggtggcagcagcggtgccactccaacgtccgctgcggccaccgccccctctggggtcaggcgtttggagaccagcgaaggaacctcagcccagagagatgaggagccagaagaggaaggggaagaggacctgcgagacggaggcgtccccttctttgtcaaccggggtgggctacctgtggatgaggccacctgggaaaggatgtggaaacacgtggccaagatccaccccgatggagagaaggtggcgcaacggatccgtggggccacagacctgcccaagatccccataccgagtgtgcctacgttccagccgtctacacctgtccctgagcgcctggaagctgtgcagcgctatatcagagagctgcagtacaatcacacagggacacagttctttgaaattaagaagagcagacctctgacagggctgatggacctggccaaggaaatgaccaaagaggccctgccaatcaaatgcctggaagccgtgatcctgggaatgtatccttcctcacctgaaggggaggggtccgggcttctctgggcctcagcttcctgctctgaaagtgagggtggggtaggttgaatgggctccagggctctcccatatgcagtcatctgcttggccccaagatggagaagcaccccactaaagtggaagaaccccccaaaatggaggagccccgaggtcccagtaccccacatctcagttgctaccttcccaggcttactgggcagctcttttttgagtcacgtggatacagggaccgttttctgaaccccaaatcagggcacagtgtctcacaaagacagttgtaccatttccaagaactagacagtctgggaggcacagttggaatgcccagatgttggcatttccagaacatgttgatttctggacgagatattaaagcaaaactgccttaaaaaaaaaaaaaccacaaacaaggttttccagtcacacccccgcctccaacccaaagggcagaagtggggcctgtagctgagtcaccagggtagccttggagacagaccagccaccaggagaggctgtcctccccagccccacagtcaacagcgggagaggaggaagtgtttatggctggttctccatcctaactggtcaatgcctgagccctaccttttcttctcagtcattttattattaaaaatgtcataaatacacgtgaaacctagaacaacatcatgaactcctgtgcacccgttactcagcttcaccaactcaaagccaattctgtttcatctcttccaccctgcccgtattctttaccagcttttaaacattttgcctgcgcccctggggtaggcagcccactgggctcagtgctgcagaggagcacagattaggtgggagccaagagggtgacggggagggggtctgatggaacaggagtcccatctgagggcaggtcctgggaggactgtgatccaggggtccatccccaccccccacacagacatgcctgcctgaagttcacacaaagaggctgcgggtgcccttctcttcccgcagaggtctcggagggaacgccactatggcaggcatttgctaacagggcaggcccatttctggagcccgacatccctgccctgtttatggggttctttgctgggataagcctgaggccacccgagaaattcaggctgcaggcagtgcctccttcatgtcttcacgttcacttctccctcaggggtcacacaccaaagtggaggctcccaccctcataggagagagactggtccttttccccaggaggacacacagaagtcac

SEQ ID NO: 377154 - DNA, 241 bp, Homo sapiens
tgctctattatactatcttttattaaatttcaacctctgagaaacccacagatcttatttataagttttatccagttccaccttctggctcacctgtgtcttgctcgttttgagggataccctccagcctgaggttctgcaattcctcctgtccttctgggtactttgaggtatccttcaacaatgtctacctaaggacaaaataataaaaacaaaacaaaaaccacaaaagccaaaaatg

SEQ ID NO: 377155 - DNA, 498 bp, Homo sapiens
atgttgatcaggaacaacctccccacccccacccatgtctcacaaggataataaaattgatgcaaatctaatctgggagacttgatatctcgtaaactagattttaatcatttcagaaatgtattcacttcttaatgatttttaagtcactcagaattttgtagctttcctcatatagatgacatatatttctggccaagtttattctttgttactgtagtaaatggttttatttttttccattgttttctaacaaatttgtcttggcatatattaaaattatttctctttaataatttgataattaggcttcttataaaactcttactagacaggtactttcagctaattctttttgggttttccatttaacactaatataatttgtaagttattttattttgcctcctttttttctgtgtctcatcttatttcaaccttgcctcccttctaattgctttggttagaatttctttgggcaatagttttttttttttt

SEQ ID NO: 377156 - DNA, 2106 bp, Homo sapiens
atgcgcacggcccagcctttatagcggccgcgggggccttgccttccgcactcgggcgcagccgggtggatctcgagcaggtgtgagcagcctatcagtcaccatgtccgcagcctggatcccggctctcggcctcggtgtgtgtctgctgctgctgccggggcccgcgggcagcgagggagccgctcccattgctatcacatgttttaccagaggcttggacatcaggaaagagaaagcagatgtcctctgcccagggggctgccctcttgaggaattctctgtgtatgggaacatagtatatgcttctgtatcgagcatatgtggggctgctgtccacaggggagtaatcagcaactcagggggacctgtacgagtctatagcctacctggtcgagaaaactattcctcagtagatgccaatggcatccagtctcaaatgctttctagatggtctgcttctttcacagtaactaaaggcaaaagtagtacacaggaggccacaggacaagcagtgtccacagcacatccaccaacaggtaaacgactaaagaaaacacccgagaagaaaactggcaataaagattgtaaagcagacattgcatttctgattgatggaagctttaatattgggcagcgccgatttaatttacagaagaattttgttggaaaagtggctctaatgttgggaattggaacagaaggaccacatgtgggccttgttcaagccagtgaacatcccaaaatagaattttacttgaaaaactttacatcagccaaagatgttttgtttgccataaaggaagtaggtttcagagggggtaattccaatacaggaaaagccttgaagcatactgctcagaaattcttcacggtagatgctggagtaagaaaagggatccccaaagtggtggtggtatttattgatggttggccttctgatgacatcgaggaagcaggcattgtggccagagagtttggtgtcaatgtatttatagtttctgtggccaagcctatccctgaagaactggggatggttcaggatgtcacatttgttgacaaggctgtctgtcggaataatggcttcttctcttaccacatgcccaactggtttggcaccacaaaatacgtaaagcctctggtacagaagctgtgcactcatgaacaaatgatgtgcagcaagacctgttataactcagtgaacattgcctttctaattgatggctccagcagtgttggagatagcaatttccgcctcatgcttgaatttgtttccaacatagccaagacttttgaaatctcggacattggtgccaagatagctgctgtacagtttacttatgatcagcgcacggagttcagtttcactgactatagcaccaaagagaatgtcctagctgtcatcagaaacatccgctatatgagtggtggaacagctactggtgatgccatttccttcactgttagaaatgtgtttggccctataagggagagccccaacaagaacttcctagtaattgtcacagatgggcagtcctatgatgatgtccaaggccctgcagctgctgcacatgatgcaggaatcactatcttctctgttggtgtggcttgggcacctctggatgacctgaaagatatggcttctaaaccgaaggagtctcatgctttcttcacaagagagttcacaggattagaaccaattgtttctgatgtcatcagaggcatttgtagagatttcttagaatcccagcaataatggtaacattttgacaactgaaagaaaaagtacaaggggatccagtgtgtaaattgtattctcataatactgaaatgctttagcatactagaatcagatacaaaactattaagtatgtcaacagccatttaggcaaataagcactcctttaaagccgctgccttctggttacaatttacagtgtactttgttaaaaacactgctgaggcttcataatcatggctcttagaaactcaggaaagaggagataatgtggattaaaaccttaagagttctaaccatgcctactaaatgtacagatatgcaaattccatagctcaataaaagaatctgatacttagaccaaaagc

SEQ ID NO: 377157 - DNA, 622 bp, Homo sapiens
atgcgcacggcccagcctttatagcggccgcgggggccttgccttccgcactcgggcgcagccgggtggatctcgagcaggtgcggagccccgggcggcgggcgcgggtgcgagggatccctgacgcctctgtccctgtttctttgtcgctcccagcctgtctgtcgtcgttttggcgcccccgcctccccgcggtgcggggttgcacaccgatcctgggcttcgctcgatttgccgccgaggcgcctcccagacctagaggggcgctggcctggagcagcgggtcgtctgtgtcctctctcctctgcgccgcgcccggggatccgaagggtgcggggctctgaggaggtgacgcgcggggcctcccgcaccctggccttgcccgcattctccctctctcccaggtgtgagcagcctatcagtcaccatgtccgcagcctggatcccggctctcggcctcggtgtgtgtctgctgctgctgccggggcccgcgggcagcgagggagccggtgagtgggggagctggggtgcgtccaggcggtcgcaggggctgagcaccagcgggtacaagcgggactcagatccagccccttgggcttcagccctaccgcctgaggaggaa

SEQ ID NO: 377158 - DNA, 2076 bp, Homo sapiens
atgcgcacggcccagcctttatagcggccgcgggggccttgccttccgcactcgggcgcagccgggtggatctcgagcaggtgcggagccccgggcggcgggcgcgggtgcgagggatccctgacgcctctgtccctgtttctttgtcgctcccagcctgtctgtcgtcgttttggcgcccccgcctccccgcggtgcggggttgcacaccgatcctgggcttcgctcgatttgccgccgaggcgcctcccagacctagaggggcgctggcctggagcagcgggtcgtctgtgtcctctctcctctgcgccgcgcccggggatccgaagggtgcggggctctgaggaggtgacgcgcggggcctcccgcaccctggccttgcccgcattctccctctctcccaggtgtgagcagcctatcagtcaccatgtccgcagcctggatcccggctctcggcctcggtgtgtgtctgctgctgctgccggggcccgcgggcagcgagggagccggtaaacgactaaagaaaacacccgagaagaaaactggcaataaagattgtaaagcagacattgcatttctgattgatggaagctttaatattgggcagcgccgatttaatttacagaagaattttgttggaaaagtggctctaatgttgggaattggaacagaaggaccacatgtgggccttgttcaagccagtgaacatcccaaaatagaattttacttgaaaaactttacatcagccaaagatgttttgtttgccataaaggaagtaggtttcagagggggtaattccaatacaggaaaagccttgaagcatactgctcagaaattcttcacggtagatgctggagtaagaaaagggatccccaaagtggtggtggtatttattgatggttggccttctgatgacatcgaggaagcaggcattgtggccagagagtttggtgtcaatgtatttatagtttctgtggccaagcctatccctgaagaactggggatggttcaggatgtcacatttgttgacaaggctgtctgtcggaataatggcttcttctcttaccacatgcccaactggtttggcaccacaaaatacgtaaagcctctggtacagaagctgtgcactcatgaacaaatgatgtgcagcaagacctgttataactcagtgaacattgcctttctaattgatggctccagcagtgttggagatagcaatttccgcctcatgcttgaatttgtttccaacatagccaagacttttgaaatctcggacattggtgccaagatagctgctgtacagtttacttatgatcagcgcacggagttcagtttcactgactatagcaccaaagagaatgtcctagctgtcatcagaaacatccgctatatgagtggtggaacagctactggtgatgccatttccttcactgttagaaatgtgtttggccctataagggagagccccaacaagaacttcctagtaattgtcacagatgggcagtcctatgatgatgtccaaggccctgcagctgctgcacatgatgcaggaatcactatcttctctgttggtgtggcttgggcacctctggatgacctgaaagatatggcttctaaaccgaaggagtctcatgctttcttcacaagagagttcacaggattagaaccaattgtttctgatgtcatcagaggcatttgtagagatttcttagaatcccagcaataatggtaacattttgacaactgaaagaaaaagtacaaggggatccagtgtgtaaattgtattctcataatactgaaatgctttagcatactagaatcagatacaaaactattaagtatgtcaacagccatttaggcaaataagcactcctttaaagccgctgccttctggttacaatttacagtgtactttgttaaaaacactgctgaggcttcataatcatggctcttagaaactcaggaaagaggagataatgtggattaaaaccttaagagttctaaccatgcctactaaatgtacagatatgcaaattccatagctcaataaaagaatctgatacttagaccaaaagc

SEQ ID NO: 377159 - DNA, 2382 bp, Homo sapiens
atgcgcacggcccagcctttatagcggccgcgggggccttgccttccgcactcgggcgcagccgggtggatctcgagcaggtgcggagccccgggcggcgggcgcgggtgcgagggatccctgacgcctctgtccctgtttctttgtcgctcccagcctgtctgtcgtcgttttggcgcccccgcctccccgcggtgcggggttgcacaccgatcctgggcttcgctcgatttgccgccgaggcgcctcccagacctagaggggcgctggcctggagcagcgggtcgtctgtgtcctctctcctctgcgccgcgcccggggatccgaagggtgcggggctctgaggaggtgacgcgcggggcctcccgcaccctggccttgcccgcattctccctctctcccaggtgtgagcagcctatcagtcaccatgtccgcagcctggatcccggctctcggcctcgctcccattgctatcacatgttttaccagaggcttggacatcaggaaagagaaagcagatgtcctctgcccagggggctgccctcttgaggaattctctgtgtatgggaacatagtatatgcttctgtatcgagcatatgtggggctgctgtccacaggggagtaatcagcaactcagggggacctgtacgagtctatagcctacctggtcgagaaaactattcctcagtagatgccaatggcatccagtctcaaatgctttctagatggtctgcttctttcacagtaactaaaggcaaaagtagtacacaggaggccacaggacaagcagtgtccacagcacatccaccaacaggtaaacgactaaagaaaacacccgagaagaaaactggcaataaagattgtaaagcagacattgcatttctgattgatggaagctttaatattgggcagcgccgatttaatttacagaagaattttgttggaaaagtggctctaatgttgggaattggaacagaaggaccacatgtgggccttgttcaagccagtgaacatcccaaaatagaattttacttgaaaaactttacatcagccaaagatgttttgtttgccataaaggaagtaggtttcagagggggtaattccaatacaggaaaagccttgaagcatactgctcagaaattcttcacggtagatgctggagtaagaaaagggatccccaaagtggtggtggtatttattgatggttggccttctgatgacatcgaggaagcaggcattgtggccagagagtttggtgtcaatgtatttatagtttctgtggccaagcctatccctgaagaactggggatggttcaggatgtcacatttgttgacaaggctgtctgtcggaataatggcttcttctcttaccacatgcccaactggtttggcaccacaaaatacgtaaagcctctggtacagaagctgtgcactcatgaacaaatgatgtgcagcaagacctgttataactcagtgaacattgcctttctaattgatggctccagcagtgttggagatagcaatttccgcctcatgcttgaatttgtttccaacatagccaagacttttgaaatctcggacattggtgccaagatagctgctgtacagtttacttatgatcagcgcacggagttcagtttcactgactatagcaccaaagagaatgtcctagctgtcatcagaaacatccgctatatgagtggtggaacagctactggtgatgccatttccttcactgttagaaatgtgtttggccctataagggagagccccaacaagaacttcctagtaattgtcacagatgggcagtcctatgatgatgtccaaggccctgcagctgctgcacatgatgcaggaatcactatcttctctgttggtgtggcttgggcacctctggatgacctgaaagatatggcttctaaaccgaaggagtctcatgctttcttcacaagagagttcacaggattagaaccaattgtttctgatgtcatcagaggcatttgtagagatttcttagaatcccagcaataatggtaacattttgacaactgaaagaaaaagtacaaggggatccagtgtgtaaattgtattctcataatactgaaatgctttagcatactagaatcagatacaaaactattaagtatgtcaacagccatttaggcaaataagcactcctttaaagccgctgccttctggttacaatttacagtgtactttgttaaaaacactgctgaggcttcataatcatggctcttagaaactcaggaaagaggagataatgtggattaaaaccttaagagttctaaccatgcctactaaatgtacagatatgcaaattccatagctcaataaaagaatctgatacttagaccaaaagc

SEQ ID NO: 377160 - DNA, 1155 bp, Homo sapiens
agtgctgactgcctcttatctagattaacttgaaacattcaggattttccagtttttaagaagaaacaacttttgatccttttggatatcttttatgtgtctcccccattaggctgtctgtcggaataatggcttcttctcttaccacatgcccaactggtttggcaccacaaaatacgtaaagcctctggtacagaagctgtgcactcatgaacaaatgatgtgcagcaagacctgttataactcagtgaacattgcctttctaattgatggctccagcagtgttggagatagcaatttccgcctcatgcttgaatttgtttccaacatagccaagacttttgaaatctcggacattggtgccaagatagctgctgtacagtttacttatgatcagcgcacggagttcagtttcactgactatagcaccaaagagaatgtcctagctgtcatcagaaacatccgctatatgagtggtggaacagctactggtgatgccatttccttcactgttagaaatgtgtttggccctataagggagagccccaacaagaacttcctagtaattgtcacagatgggcagtcctatgatgatgtccaaggccctgcagctgctgcacatgatgcaggaatcactatcttctctgttggtgtggcttgggcacctctggatgacctgaaagatatggcttctaaaccgaaggagtctcatgctttcttcacaagagagttcacaggattagaaccaattgtttctgatgtcatcagaggcatttgtagagatttcttagaatcccagcaataatggtaacattttgacaactgaaagaaaaagtacaaggggatccagtgtgtaaattgtattctcataatactgaaatgctttagcatactagaatcagatacaaaactattaagtatgtcaacagccatttaggcaaataagcactcctttaaagccgctgccttctggttacaatttacagtgtactttgttaaaaacactgctgaggcttcataatcatggctcttagaaactcaggaaagaggagataatgtggattaaaaccttaagagttctaaccatgcctactaaatgtacagatatgcaaattccatagctcaataaaagaatctgatacttagaccaaaagc

SEQ ID NO: 377161 - DNA, 1906 bp, Homo sapiens
atgcgcacggcccagcctttatagcggccgcgggggccttgccttccgcactcgggcgcagccgggtggatctcgagcaggtgcggagccccgggcggcgggcgcgggtgcgagggatccctgacgcctctgtccctgtttctttgtcgctcccagcctgtctgtcgtcgttttggcgcccccgcctccccgcggtgcggggttgcacaccgatcctgggcttcgctcgatttgccgccgaggcgcctcccagacctagaggggcgctggcctggagcagcgggtcgtctgtgtcctctctcctctgcgccgcgcccggggatccgaagggtgcggggctctgaggaggtgacgcgcggggcctcccgcaccctggccttgcccgcattctccctctctcccaggtgtgagcagcctatcagtcaccatgtccgcagcctggatcccggctctcggcctcggtgtgtgtctgctgctgctgccggggcccgcgggcagcgagggagccgctcccattgctatcacatgttttaccagaggcttggacatcaggaaagagaaagcagatgtcctctgcccagggggctgccctcttgaggaattctctgtgtatgggaacatagtatatgcttctgtatcgagcatatgtggggctgctgtccacaggggagtaatcagcaactcagggggacctgtacgagtctatagcctacctggtcgagaaaactattcctcagtagatgccaatggcatccagtctcaaatgctttctagatggtctgcttctttcacagtaactaaaggcaaaagtagtacacaggaggccacaggacaagcagtgtccacagcacatccaccaacaggtaaacgactaaagaaaacacccgagaagaaaactggcaataaagattgtaaagcagacattgcatttctgattgatggaagctttaatattgggcagcgccgatttaatttacagaagaattttgttggaaaagtggctctaatgttgggaattggaacagaaggaccacatgtgggccttgttcaagccagtgaacatcccaaaatagaattttacttgaaaaactttacatcagccaaagatgttttgtttgccataaaggaagtaggtttcagagggggtaattccaatacaggaaaagccttgaagcatactgctcagaaattcttcacggtagatgctggagtaagaaaagggatccccaaagtggtggtggtatttattgatggttggccttctgatgacatcgaggaagcaggcattgtggccagagagtttggtgtcaatgtatttatagtttctgtggccaagcctatccctgaagaactggggatggttcaggatgtcacatttgttgacaaggctgtctgtcggaataatggcttcttctcttaccacatgcccaactggtttggcaccacaaaatacgtaaagcctctggtacagaagctgtgcactcatgaacaaatgatgtgcagcaagacctgttataactcagtgaacattgcctttctaattgatggctccagcagtgttggagatagcaatttccgcctcatgcttgaatttgtttccaacatagccaagacttttgaaatctcggacattggtgccaagatagctgctgtacagtttacttatgatcagcgcacggagttcagttccttgatattgccccaaaaatgtgctaatgtcacgaacatcgaaataatggggacgacggggagccatactacgctgttggccacgggaccccaaacccagagtccagtgcccacaaacaacgcaacggcacagcggacatctggagaggccgtcgaagggtcagaggatacagcgaaaccctcgagctgcacgtcacgcgtatgctctaggggcggc

SEQ ID NO: 377162 - DNA, 489 bp, Homo sapiens
taactcagtgaacattgcctttctaattgatggctccagcagtgttggagatagcaatttccgcctcatgcttgaatttgtttccaacatagccaagacttttgaaatctcggacattggtgccaagatagctgctgtacagtttacttatgatcagcgcacggagttcagtttcactgactatagcaccaaagagaatgtcctagctgtcatcagaaacatccgctatatgagtggtggaacagctactggtgatgccatttccttcactgttagaaatgtgtttggccctataagggagagccccaacaagaacttcctagtaattgtcacagatgggcagtcctatgatgatgtccaaggccctgcagctgctgcacatgatgcaggtaaggtccttgttctttataggagaagggaacagaaaaaacggttcagtgaatttaggagtaaataaaaatttaagcatttatttcattaaacaaacac

SEQ ID NO: 377163 - DNA, 2593 bp, Homo sapiens
atgcgcacggcccagcctttatagcggccgcgggggccttgccttccgcactcgggcgcagccgggtggatctcgagcaggtgtgagcagcctatcagtcaccatgtccgcagcctggatcccggctctcggcctcggtgtgtgtctgctgctgctgccggggcccgcgggcagcgagggagccgctcccattgctatcacatgttttaccagaggcttggacatcaggaaagagaaagcagatgtcctctgcccagggggctgccctcttgaggaattctctgtgtatgggaacatagtatatgcttctgtatcgagcatatgtggggctgctgtccacaggggagtaatcagcaactcagggggacctgtacgagtctatagcctacctggtcgagaaaactattcctcagtagatgccaatggcatccagtctcaaatgctttctagatggtctgcttctttcacagtaactaaaggcaaaagtagtacacaggaggccacaggacaagcagtgtccacagcacatccaccaacaggtaaacgactaaagaaaacacccgagaagaaaactggcaataaagattgtaaagcagacattgcatttctgattgatggaagctttaatattgggcagcgccgatttaatttacagaagaattttgttggaaaagtggctctaatgttgggaattggaacagaaggaccacatgtgggccttgttcaagccagtgaacatcccaaaatagaattttacttgaaaaactttacatcagccaaagatgttttgtttgccataaaggaagtaggtttcagagggggtaattccaatacaggaaaagccttgaagcatactgctcagaaattcttcacggtagatgctggagtaagaaaagggatccccaaagtggtggtggtatttattgatggttggccttctgatgacatcgaggaagcaggcattgtggccagagagtttggtgtcaatgtatttatagtttctgtggccaagcctatccctgaagaactggggatggttcaggatgtcacatttgttgacaaggctgtctgtcggaataatggcttcttctcttaccacatgcccaactggtttggcaccacaaaatacgtaaagcctctggtacagaagctgtgcactcatgaacaaatgatgtgcagcaagacctgttataactcagtgaacattgcctttctaattgatggctccagcagtgttggagatagcaatttccgcctcatgcttgaatttgtttccaacatagccaagacttttgaaatctcggacattggtgccaagatagctgctgtacagtttacttatgatcagcgcacggagttcagtttcactgactatagcaccaaagagaatgtcctagctgtcatcagaaacatccgctatatgagtggtggaacagctactggtgatgccatttccttcactgttagaaatgtgtttggccctataagggagagccccaacaagaacttcctagtaattgtcacagatgggcagtcctatgatgatgtccaaggccctgcagctgctgcacatgatgcaggaatcactatcttctctgttggtgtggcttgggcacctctggatgacctgaaagatatggcttctaaaccgaaggagtctcatgctttcttcacaagagagttcacaggattagaaccaattgtttctgatgtcatcagaggcatttgtagagatttcttagaatcccagcaataatggtaacattttgacaactgaaagaaaaagtacaaggggatccagtgtgtaaattgtattctcataatactgaaatgctttagcatactagaatcagatacaaaactattaagtatgtcaacagccatttaggcaaataagcactcctttaaagccgctgccttctggttacaatttacagtgtactttgttaaaaacactgctgaggcttcataatcatggctcttagaaactcaggaaagaggagataatgtggattaaaaccttaagagttctaaccatgcctactaaatgtacagatatgcaaattccatagctcaataaaagaatctgatacttagaccaaaagcaacattcgttctctaaccattctgtattgattatataagcaaaatgaaaagagaaacttaaatgaacacagctctttaacatggttcaggtacacatattttgacccaagtggatattttcttaaaaccaatcaataatagctagctattactgcagactataaaatctggatatagaaaggagacctgtatcaaactgcttttgtagtgtgttttcataacaacttatgactaaaaatatcacactgaataagagagcaggattgccaggtatttttctatttctctccttaattttatatgtatatagatatatttggcttatattctaagtcacctaagtacttaaaagttaagttggtaaagtatttactgactgcttataaacatttaaagacaaagacatttcaaataactgcagaaaaaatattgtagtttgaatatttaagcaataaaactgctagtgagttattgtaagctggcttac

SEQ ID NO: 377164 - DNA, 2050 bp, Homo sapiens
atgcgcacggcccagcctttatagcggccgcgggggccttgccttccgcactcgggcgcagccgggtggatctcgagcaggtgcggagccccgggcggcgggcgcgggtgcgagggatccctgacgcctctgtccctgtttctttgtcgctcccagcctgtctgtcgtcgttttggcgcccccgcctccccgcggtgcggggttgcacaccgatcctgggcttcgctcgatttgccgccgaggcgcctcccagacctagaggggcgctggcctggagcagcgggtcgtctgtgtcctctctcctctgcgccgcgcccggggatccgaagggtgcggggctctgaggaggtgacgcgcggggcctcccgcaccctggccttgcccgcattctccctctctcccaggtgtgagcagcctatcagtcaccatgtccgcagcctggatcccggctctcggcctcggtgtgtgtctgctgctgctgccggggcccgcgggcagcgagggagccgctcccattgctatcacatgttttaccagaggcttggacatcaggaaagagaaagcagatgtcctctgcccagggggctgccctcttgaggaattctctgtgtatgggaacatagtatatgcttctgtatcgagcatatgtggggctgctgtccacaggggagtaatcagcaactcagggggacctgtacgagtctatagcctacctggtcgagaaaactattcctcagtagatgccaatggcatccagtctcaaatgctttctagatggtctgcttctttcacagtaactaaaggcaaaagtagtacacaggaggccacaggacaagcagtgtccacagcacatccaccaacaggtaaacgactaaagaaaacacccgagaagaaaactggcaataaagattgtaaagcagacattgcatttctgattgatggaagctttaatattgggcagcgccgatttaatttacagaagaattttgttggaaaagtggctctaatgttgggaattggaacagaaggaccacatgtgggccttgttcaagccagtgaacatcccaaaatagaattttacttgaaaaactttacatcagccaaagatgttttgtttgccataaaggaagtaggtttcagagggggtaattccaatacaggaaaagccttgaagcatactgctcagaaattcttcacggtagatgctggagtaagaaaagggatccccaaagtggtggtggtatttattgatggttggccttctgatgacatcgaggaagcaggcattgtggccagagagtttggtgtcaatgtatttatagtttctgtggccaagcctatccctgaagaactggggatggttcaggatgtcacatttgttgacaaggctgtctgtcggaataatggcttcttctcttaccacatgcccaactggtttggcaccacaaaatacgtaaagcctctggtacagaagctgtgcactcatgaacaaatgatgtgcagcaagacctgttataactcagtgaacattgcctttctaattgatggctccagcagtgttggagatagcaatttccgcctcatgcttgaatttgtttccaacatagccaagacttttgaaatctcggacattggtgccaagatagctgctgtacagtttacttatgatcagcgcacggagttcagtttcactgactatagcaccaaagagaatgtcctagctgtcatcagaaacatccgctatatgagtggtggaacagctactggtgatgccatttccttcactgttagaaatgtgtttggccctataagggagagccccaacaagaacttcctagtaattgtcacagatgggcagtcctatgatgatgtccaaggccctgcagctgctgcacatgatgcagcaaaataagtttaaaagggaatctgtggcattcaaccgataaacagaagatcactaagagatgaaaaaaagctactcttggagctcacttcccccaacaagagcaccacattcctaacccctaaggcagcacacagagtccaaaaa

SEQ ID NO: 377165 - DNA, 2430 bp, Homo sapiens
atgcgcacggcccagcctttatagcggccgcgggggccttgccttccgcactcgggcgcagccgggtggatctcgagcaggtgcggagccccgggcggcgggcgcgggtgcgagggatccctgacgcctctgtccctgtttctttgtcgctcccagcctgtctgtcgtcgttttggcgcccccgcctccccgcggtgcggggttgcacaccgatcctgggcttcgctcgatttgccgccgaggcgcctcccagacctagaggggcgctggcctggagcagcgggtcgtctgtgtcctctctcctctgcgccgcgcccggggatccgaagggtgcggggctctgaggaggtgacgcgcggggcctcccgcaccctggccttgcccgcattctccctctctcccaggtgtgagcagcctatcagtcaccatgtccgcagcctggatcccggctctcggcctcggtgtgtgtctgctgctgctgccggggcccgcgggcagcgagggagccgctcccattgctatcacatgttttaccagaggcttggacatcaggaaagagaaagcagatgtcctctgcccagggggctgccctcttgaggaattctctgtgtatgggaacatagtatatgcttctgtatcgagcatatgtggggctgctgtccacaggggagtaatcagcaactcagggggacctgtacgagtctatagcctacctggtcgagaaaactattcctcagtagatgccaatggcatccagtctcaaatgctttctagatggtctgcttctttcacagtaactaaaggcaaaagtagtacacaggaggccacaggacaagcagtgtccacagcacatccaccaacaggtaaacgactaaagaaaacacccgagaagaaaactggcaataaagattgtaaagcagacattgcatttctgattgatggaagctttaatattgggcagcgccgatttaatttacagaagaattttgttggaaaagtggctctaatgttgggaattggaacagaaggaccacatgtgggccttgttcaagccagtgaacatcccaaaatagaattttacttgaaaaactttacatcagccaaagatgttttgtttgccataaaggaagtaggtttcagagggggtaattccaatacaggaaaagccttgaagcatactgctcagaaattcttcacggtagatgctggagtaagaaaagggatccccaaagtggtggtggtatttattgatggttggccttctgatgacatcgaggaagcaggcattgtggccagagagtttggtgtcaatgtatttatagtttctgtggccaagcctatccctgaagaactggggatggttcaggatgtcacatttgttgacaaggctgtctgtcggaataatggcttcttctcttaccacatgcccaactggtttggcaccacaaaatacgtaaagcctctggtacagaagctgtgcactcatgaacaaatgatgtgcagcaagacctgttataactcagtgaacattgcctttctaattgatggctccagcagtgttggagatagcaatttccgcctcatgcttgaatttgtttccaacatagccaagacttttgaaatctcggacattggtgccaagatagctgctgtacagtttacttatgatcagcgcacggagttcagtttcactgactatagcaccaaagagaatgtcctagctgtcatcagaaacatccgctatatgagtggtggaacagctactggtgatgccatttccttcactgttagaaatgtgtttggccctataagggagagccccaacaagaacttcctagtaattgtcacagatgggcagtcctatgatgatgtccaaggccctgcagctgctgcacatgatgcaggaatcactatcttctctgttggtgtggcttgggcacctctggatgacctgaaagatatggcttctaaaccgaaggagtctcatgctttcttcacaagagagttcacaggattagaaccaattgtttctgatgtcatcagaggcatttgtagagatttcttagaatcccagcaataatggtaacattttgacaactgaaagaaaaagtacaaggggatccagtgtgtaaattgtattctcataatactgaaatgctttagcatactagaatcagatacaaaactattaagtatgtcaacagccatttaggcaaataagcactcctttaaagccgctgccttctggttacaatttacagtgtactttgttaaaaacactgctgaggcttcataatcatggctcttagaaactcaggaaagaggagataatgtggattaaaaccttaagagttctaaccatgcctactaaatgtacagatatgcaaattccatagctcaataaaagaatctgatacttagaccaaaagc

SEQ ID NO: 377166 - DNA, 2376 bp, Homo sapiens
atgcgcacggcccagcctttatagcggccgcgggggccttgccttccgcactcgggcgcagccgggtggatctcgagcaggtgcggagccccgggcggcgggcgcgggtgcgagggatccctgacgcctctgtccctgtttctttgtcgctcccagcctgtctgtcgtcgttttggcgcccccgcctccccgcggtgcggggttgcacaccgatcctgggcttcgctcgatttgccgccgaggcgcctcccagacctagaggggcgctggcctggagcagcgggtcgtctgtgtcctctctcctctgcgccgcgcccggggatccgaagggtgcggggctctgaggaggtgacgcgcggggcctcccgcaccctggccttgcccgcattctccctctctcccaggtgtgagcagcctatcagtcaccatgtccgcagcctggatcccggctctcggcctcggtgtgtgtctgctgctgctgccggggcccgcgggcagcgagggagccgctcccattgctatcacatgttttaccagaggcttggacatcaggaaagagaaagcagatgtcctctgcccagggggctgccctcttgaggaattctctgtgtatgggaacatagtatatgcttctgtatcgagcatatgtggggctgctgtccacaggggagtaatcagcaactcagggggacctgtacgagtctatagcctacctggtcgagaaaactattcctcagtagatgccaatggcatccagtctcaaatgctttctagatggtctgcttctttcacagtaactaaaggcaaaagtagtacacaggaggccacaggacaagcagtgtccacagcacatccaccaacaggtaaacgactaaagaaaacacccgagaagaaaactggcaataaagattgtaaagcagacattgcatttctgattgatggaagctttaatattgggcagcgccgatttaatttacagaagaattttgttggaaaagtggctctaatgttgggaattggaacagaaggaccacatgtgggccttgttcaagccagtgaacatcccaaaatagaattttacttgaaaaactttacatcagccaaagatgttttgtttgccataaaggaagtaggtttcagagggggtaattccaatacaggaaaagccttgaagcatactgctcagaaattcttcacggtagatgctggagtaagaaaagggatccccaaagtggtggtggtatttattgatggttggccttctgatgacatcgaggaagcaggcattgtggccagagagtttggtgtcaatgtatttatagtttctgtggccaagcctatccctgaagaactggggatggttcaggatgtcacatttgttgacaaggctgtctgtcggaataatggcttcttctcttaccacatgcccaactggtttggcaccaccagcaagacctgttataactcagtgaacattgcctttctaattgatggctccagcagtgttggagatagcaatttccgcctcatgcttgaatttgtttccaacatagccaagacttttgaaatctcggacattggtgccaagatagctgctgtacagtttacttatgatcagcgcacggagttcagtttcactgactatagcaccaaagagaatgtcctagctgtcatcagaaacatccgctatatgagtggtggaacagctactggtgatgccatttccttcactgttagaaatgtgtttggccctataagggagagccccaacaagaacttcctagtaattgtcacagatgggcagtcctatgatgatgtccaaggccctgcagctgctgcacatgatgcaggaatcactatcttctctgttggtgtggcttgggcacctctggatgacctgaaagatatggcttctaaaccgaaggagtctcatgctttcttcacaagagagttcacaggattagaaccaattgtttctgatgtcatcagaggcatttgtagagatttcttagaatcccagcaataatggtaacattttgacaactgaaagaaaaagtacaaggggatccagtgtgtaaattgtattctcataatactgaaatgctttagcatactagaatcagatacaaaactattaagtatgtcaacagccatttaggcaaataagcactcctttaaagccgctgccttctggttacaatttacagtgtactttgttaaaaacactgctgaggcttcataatcatggctcttagaaactcaggaaagaggagataatgtggattaaaaccttaagagttctaaccatgcctactaaatgtacagatatgcaaattccatagctcaataaaagaatctgatacttagaccaaaagc

SEQ ID NO: 377167 - DNA, 2267 bp, Homo sapiens
  misc_feature (2221)..(2221): n is a, c, g, or t
  misc_feature (2228)..(2228): n is a, c, g, or t
  misc_feature (2254)..(2254): n is a, c, g, or t
  misc_feature (2261)..(2261): n is a, c, g, or t
atgcgcacggcccagcctttatagcggccgcgggggccttgccttccgcactcgggcgcagccgggtggatctcgagcaggtgcggagccccgggcggcgggcgcgggtgcgagggatccctgacgcctctgtccctgtttctttgtcgctcccagcctgtctgtcgtcgttttggcgcccccgcctccccgcggtgcggggttgcacaccgatcctgggcttcgctcgatttgccgccgaggcgcctcccagacctagaggggcgctggcctggagcagcgggtcgtctgtgtcctctctcctctgcgccgcgcccggggatccgaagggtgcggggctctgaggaggtgacgcgcggggcctcccgcaccctggccttgcccgcattctccctctctcccaggtgtgagcagcctatcagtcaccatgtccgcagcctggatcccggctctcggcctcggtgtgtgtctgctgctgctgccggggcccgcgggcagcgagggagccgctcccattgctatcacatgttttaccagaggcttggacatcaggaaagagaaagcagatgtcctctgcccagggggctgccctcttgaggaattctctgtgtatgggaacatagtatatgcttctgtatcgagcatatgtggggctgctgtccacaggggagtaatcagcaactcagggggacctgtacgagtctatagcctacctggtcgagaaaactattcctcagtagatgccaatggcatccagtctcaaatgctttctagatggtctgcttctttcacagtaactaaaggcaaaagtagtacacaggaggccacaggacaagcagtgtccacagcacatccaccaacaggtaaacgactaaagaaaacacccgagaagaaaactggcaataaagattgtaaagcagacattgcatttctgattgatggaagctttaatattgggcagcgccgatttaatttacagaagaattttgttggaaaagtggctctaatgttgggaattggaacagaaggaccacatgtgggccttgttcaagccagtgaacatcccaaaatagaattttacttgaaaaactttacatcagccaaagatgttttgtttgccataaaggaagtaggtttcagagggggtaattccaatacaggaaaagccttgaagcatactgctcagaaattcttcacggtagatgctggagtaagaaaagggatccccaaagtggtggtggtatttattgatggttggccttctgatgacatcgaggaagcaggcattgtggccagagagtttggtgtcaatgtatttatagtttctgtggccaagcctatccctgaagaactggggatggttcaggatgtcacatttgttgacaaggctgtctgtcggaataatggcttcttctcttaccacatgcccaactggtttggcaccacaaaatacgtaaagcctctggtacagaagctgtgcactcatgaacaaatgatgtgcagcaagacctgttataactcagtgaacattgcctttctaattgatggctccagcagtgttggagatagcaatttccgcctcatgcttgaatttgtttccaacatagccaagacttttgaaatctcggacattggtgccaagatagctgctgtacagtttacttatgatcagcgcacggagttcagtttcactgactatagcaccaaagagaatgtcctagctgtcatcagaaacatccgctatatgagtggtggaacagctactggtgatgccatttccttcactgttagaaatgtgtttggccctataagggagagccccaacaagaacttcctagtaattgtcacagatgggcagtcctatgatgatgtccaaggccctgcagctgctgcacatgatgcaggaatcactatcttctctgttggtgtggcttgggcacctctggatgacctgaaagatatggcttctaaaccgaaggagtctcatgctttcttcacaagagagttcacaggattagaaccaattgtttctgatgtcatcagaggcatttgtagagatttcttagaatcccagcaataatggtaacattttgacaactgaaagaaaaagtacaaggggatccagtgtgtaaattgtattctcataatactgaaatgctttagcatactagaatcagatacaaaactattaaatgtttcaaacttttctcaaatatctggngatcgtnagctgtctttttaaattgaaaagtgnggcactnaaaact

SEQ ID NO: 377168 - DNA, 405 bp, Homo sapiens
agtggtaaaggctatttgtttgcttctttttcaaatttaggaaaagccttgaagcatactgctcagaaattcttcacggtagatgctggagtaagaaaagggatccccaaagtggtggtggtatttattgatggttggccttctgatgacatcgaggaagcaggcattgtggccagagagtttggtgtcaatgtatttatagtttctgtggccaagcctatccctgaagaactggggatggttcaggatgtcacatttgttgacaaggtaaagtggtgagggttatcttctgttacagtgatgggtattccattttggacctctaagtgcagtgctgactgcctcttatctagattaacttgaaacattcaggattttccagtttttaagaagaaacaacttttg

SEQ ID NO: 377169 - DNA, 380 bp, Homo sapiens
taacagaccatatttgagatgacagatgcaaaataaacaggcatgactttagacaggtccagaatggtcttaatatcctgaagcttattcttattcaaacttcgcgttttaattgtttggaattcttagacagagtaggtggaatttcatcctttgtatgttttaaggagagcttcgctcctctctttaccacccaccccccgccacccagtaaaatactgaactttcattttaatccataacactaaatgcttttgtgtttttctttcttcaaagactgtcattaagaatgtctacaaggaaatcatgggaaatgacaaaatctcccccagattgattttttacgtgttgttggaaataaccacataactaaaaaaaaa

SEQ ID NO: 377170 - DNA, 476 bp, Homo sapiens
agagccctgggagaagacatagagcaattatgcagggctctgaagagtaaatcatagcaggcaggctggggagggaaattattagacagcagtgagtttcctgtgtgttgctttctcctcacatgtctcctagttgagactttgaagcagtgcaaatcatggaattgcacacatgggaaaatccaaagagttccacgaagaattccttcaggccagaggatgctaggaacgggtctctgcaggatgaagcatgtggaagagatccctgggggtgtttgtctttctttattctccttttccttcccttctctccctttttccaccccagccctgccttatggcaatagcagccacacatccagataaaacataattcactttttactcgctttcaaaatgtcaacagtaaagatgaacaggatgcaagatgaaagaacattgaaaaataaagattaacaagaaagtagtttaaataa

SEQ ID NO: 377171 - DNA, 2013 bp, Homo sapiens
agagaatgtccggattgctattggactttggagcgtatggctccaaatcaactcattggctaaaacttgacggaaaatggtggttaggtggccagaatggatttgtggccaggggcatggatgctgctgctgctgctcttcctgctgctgctcttcctgctgcccaccctgtggttctgcagccccagtgccaagtacttcttcaagatggccttctacaatggctggatcctcttcctggctgtgctcgccatccctgtgtgtgccgtgcgaggacgcaacgtcgagaacatgaagatcttgcgtctaatgctgctccacatcaaatacctgtacgggatccgagtggaggtgcgaggggctcaccacttccctccctcgcagccctatgttgttgtctccaaccaccagagctctctcgatctgcttgggatgatggaggtactgccaggccgctgtgtgcccattgccaagcgcgagctactgtgggctggctctgccgggctggcctgctggctggcaggagtcatcttcatcgaccggaagcgcacgggggatgccatcagtgtcatgtctgaggtcgcccagaccctgctcacccaggacgtgagggtctgggtgtttcctgagggaacgagaaaccacaatggctccatgctgcccttcaaacgtggcgccttccatcttgcagtgcaggcccaggttcccattgtccccatagtcatgtcctcctaccaagacttctactgcaagaaggagcgtcgcttcacctcgggacaatgtcaggtgcgggtgctgcccccagtgcccacggaagggctgacaccagatgacgtcccagctctggctgacagagtccggcactccatgctcactgttttccgggaaatctccactgatggccggggtggtggtgactatctgaagaagcctgggggcggtgggtgaaccctggctctgagctctcctcccatctgtccccatcttcctccccacacctacccacccagtgggccctgaagcagggccaaaccctcttccttgtctcccctctccccacttattctcctctttggaatcttcaacttctgaagtgaatgtggatacagcgccactcctgccccctcttggccccatccatggactcttgcctcggtgcagtctccactcttgacccccacctcctactgtcttgtctgtgggacagttgcctccccctcatctccagtgactcagcctacacaagggaggggaacattccatccccagtggagtctcttcctatgtggtcttctctacccctctaccccacattggccagtggactcatccattctttggaacaaatcccccccactccaaagtccatggattcaatggactcatccatttgtgaggaggacttctcgccctctggctggaagctgatacctgaagcactcccaggctcatcctgggagctttcctcagcaccttcaccttccctcccagtgtagcctcctgtcagtgggggctggacccttctaattcagaggtctcatgcctgcccttgcccagatgcccagggtcgtgcactctctgggataccagttcagtctccacatttctggttttctgtccccatagtacagttcttcagtggacatgaccccacccagcccccctgcagccctgctgcaccatctcaccagacacaaggggaagaagcagacatcaggtgctgcactcacttctgccccctggggagttggggaaaggaacgaaccctggctggaggggataggagggcttttaatttatttctttttctgttgaggcttccccctctctgagccagttttcatttcttcctggtggcattagccactccctgcctctcactccagacctgttcccacaactggggaggtaggctgggagcaaaaggagagggtgggacccagttttgcgtggttggtttttattaattatctggataacagcaaaaaaactgaaaataaagagagagagaga

SEQ ID NO: 377172 - DNA, 2447 bp, Homo sapiens
ggaagtcagcaggcgttggggaggggtggcgggggaatagcggcggcagcagccccagccctcagagagacagcagaaagggagggagggagggtgctggggggacagccccccaccattcctaccgctatgggcccaacctcccactcccacctcccctccatcggccggggctaggacacccccaaatcccgtcgcccccttggcaccgacaccccgacagagacagagacacagccatccgccaccaccgctgccgcagcctggctggggagggggccagccccccaggccccctacccctctgaggtggccagaatggatttgtggccaggggcatggatgctgctgctgctgctcttcctgctgctgctcttcctgctgcccaccctgtggttctgcagccccagtgccaagtacttcttcaagatggccttctacaatggctggatcctcttcctggctgtgctcgccatccctgtgtgtgccgtgcgaggacgcaacgtcgagaacatgaagatcttgcgtctaatgctgctccacatcaaatacctgtacgggatccgagtggaggtgcgaggggctcaccacttccctccctcgcagccctatgttgttgtctccaaccaccagagctctctcgatctgcttgggatgatggaggtactgccaggccgctgtgtgcccattgccaagcgcgagctactgtgggctggctctgccgggctggcctgctggctggcaggagtcatcttcatcgaccggaagcgcacgggggatgccatcagtgtcatgtctgaggtcgcccagaccctgctcacccaggacgtgagggtctgggtgtttcctgagggaacgagaaaccacaatggctccatgctgcccttcaaacgtggcgccttccatcttgcagtgcaggcccaggttcccattgtccccatagtcatgtcctcctaccaagacttctactgcaagaaggagcgtcgcttcacctcgggacaatgtcaggtgcgggtgctgcccccagtgcccacggaagggctgacaccagatgacgtcccagctctggctgacagagtccggcactccatgctcactgttttccgggaaatctccactgatggccggggtggtggtgactatctgaagaagcctgggggcggtgggtgaaccctggctctgagctctcctcccatctgtccccatcttcctccccacacctacccacccagtgggccctgaagcagggccaaaccctcttccttgtctcccctctccccacttattctcctctttggaatcttcaacttctgaagtgaatgtggatacagcgccactcctgccccctcttggccccatccatggactcttgcctcggtgcagtctccactcttgacccccacctcctactgtcttgtctgtgggacagttgcctccccctcatctccagtgactcagcctacacaagggaggggaacattccatccccagtggagtctcttcctatgtggtcttctctacccctctaccccacattggccagtggactcatccattctttggaacaaatcccccccactccaaagtccatggattcaatggactcatccatttgtgaggaggacttctcgccctctggctggaagctgatacctgaagcactcccaggctcatcctgggagctttcctcagcaccttcaccttccctcccagtgtagcctcctgtcagtgggggctggacccttctaattcagaggtctcatgcctgcccttgcccagatgcccagggtcgtgcactctctgggataccagttcagtctccacatttctggttttctgtccccatagtacagttcttcagtggacatgaccccacccagcccccctgcagccctgctgcaccatctcaccagacacaaggggaagaagcagacatcaggtgctgcactcacttctgccccctggggagttggggaaaggaacgaaccctggctggaggggataggagggcttttaatttatttctttttctgttgaggcttccccctctctgagccagttttcatttcttcctggtggcattagccactccctgcctctcactccagacctgttcccacaactggggaggtaggctgggagcaaaaggagagggtgggacccagttttgcgtggttggtttttattaattatctggataacagcaaaaaaactgaaaataaagagagagagagaaaaaaaaaaaaaaaaaaaaaaaaaaaaaaaaaaaaaaaaaaaaaaaaaaaaaaaaaaaaaaaatttgaaaaaaaaaaaaaaaaaataaaaaaaataaaaaaaaaaaaacaggggggggcccagaacccaaaaccccccggggggggccggggccccaatcccccctttagggaagttttttaccccccccttttgggcggttttttaaaaat

SEQ ID NO: 377173 - DNA, 2122 bp, Homo sapiens
cctctcttcctcttgagccctttcctctcccagggcaagtgctgttaggtcacctttactccattccctccttttttcacttggtgaggcctcacacactgtacctgcccacgcaaagtgtcactagaaggaagggaaagggtagtaggattcgtttgcctgtctggaggtaggattggtctttgtagctattcaggtggccagaatggatttgtggccaggggcatggatgctgctgctgctgctcttcctgctgctgctcttcctgctgcccaccctgtggttctgcagccccagtgccaagtacttcttcaagatggccttctacaatggctggatcctcttcctggctgtgctcgccatccctgtgtgtgccgtgcgaggacgcaacgtcgagaacatgaagatcttgcgtctaatgctgctccacatcaaatacctgtacgggatccgagtggaggtgcgaggggctcaccacttccctccctcgcagccctatgttgttgtctccaaccaccagagctctctcgatctgcttgggatgatggaggtactgccaggccgctgtgtgcccattgccaagcgcgagctactgtgggctggctctgccgggctggcctgctggctggcaggagtcatcttcatcgaccggaagcgcacgggggatgccatcagtgtcatgtctgaggtcgcccagaccctgctcacccaggacgtgagggtctgggtgtttcctgagggaacgagaaaccacaatggctccatgctgcccttcaaacgtggcgccttccatcttgcagtgcaggcccaggttcccattgtccccatagtcatgtcctcctaccaagacttctactgcaagaaggagcgtcgcttcacctcgggacaatgtcaggtgcgggtgctgcccccagtgcccacggaagggctgacaccagatgacgtcccagctctggctgacagagtccggcactccatgctcactgttttccgggaaatctccactgatggccggggtggtggtgactatctgaagaagcctgggggcggtgggtgaaccctggctctgagctctcctcccatctgtccccatcttcctccccacacctacccacccagtgggccctgaagcagggccaaaccctcttccttgtctcccctctccccacttattctcctctttggaatcttcaacttctgaagtgaatgtggatacagcgccactcctgccccctcttggccccatccatggactcttgcctcggtgcagtctccactcttgacccccacctcctactgtcttgtctgtgggacagttgcctccccctcatctccagtgactcagcctacacaagggaggggaacattccatccccagtggagtctcttcctatgtggtcttctctacccctctaccccacattggccagtggactcatccattctttggaacaaatcccccccactccaaagtccatggattcaatggactcatccatttgtgaggaggacttctcgccctctggctggaagctgatacctgaagcactcccaggctcatcctgggagctttcctcagcaccttcaccttccctcccagtgtagcctcctgtcagtgggggctggacccttctaattcagaggtctcatgcctgcccttgcccagatgcccagggtcgtgcactctctgggataccagttcagtctccacatttctggttttctgtccccatagtacagttcttcagtggacatgaccccacccagcccccctgcagccctgctgcaccatctcaccagacacaaggggaagaagcagacatcaggtgctgcactcacttctgccccctggggagttggggaaaggaacgaaccctggctggaggggataggagggcttttaatttatttctttttctgttgaggcttccccctctctgagccagttttcatttcttcctggtggcattagccactccctgcctctcactccagacctgttcccacaactggggaggtaggctgggagcaaaaggagagggtgggacccagttttgcgtggttggtttttattaattatctggataacagcaaaaaaactgaaaataaagagagagagaga

SEQ ID NO: 377174 - DNA, 2974 bp, Homo sapiens
ggaagtcagcaggcgttggggaggggtggcgggggaatagcggcggcagcagccccagccctcagagagacagcagaaagggagggagggagggtgctggggggacagccccccaccattcctaccgctatgggcccaacctcccactcccacctcccctccatcggccggggctaggacacccccaaatcccgtcgcccccttggcaccgacaccccgacagagacagagacacagccatccgccaccaccgctgccgcagcctggctggggagggggccagccccccaggccccctacccctctgaggtggccagaatggatttgtggccaggggcatggatgctgctgctgctgctcttcctgctgctgctcttcctgctgcccaccctgtggttctgcagccccagtgccaagtacttcttcaagatggccttctacaatggctggatcctcttcctggctgtgctcgccatccctgtgtgtgccgtgcgaggacgcaacgtcgagaacatgaagatcttgcgtctaatgctgctccacatcaaatacctgtacgggatccgagtggaggtgcgaggggctcaccacttccctccctcgcagccctatgttgttgtctccaaccaccagagctctctcgatctgcttgggatgatggaggtactgccaggccgctgtgtgcccattgccaagcgcgagctactgtgggctggctctgccgggctggcctgctggctggcaggagtcatcttcatcgaccggaagcgcacgggggatgccatcagtgtcatgtctgaggtcgcccagaccctgctcacccaggacgtgagggtctgggtgtttcctgagggaacgagaaaccacaatggctccatgctgcccttcaaacgtggcgccttccatcttgcagtgcaggcccaggttcccattgtccccatagtcatgtcctcctaccaagacttctactgcaagaaggagcgtcgcttcacctcgggacaatgtcaggtgcgggtgctgcccccagtgcccacggaagggctgacaccagatgacgtcccagctctggctgacagagtccggcactccatgctcactgttttccgggaaatctccactgatggccggggtggtggtgactatctgaagaagcctgggggcggtgggtgaaccctggctctgagctctcctcccatctgtccccatcttcctccccacacctacccacccagtgggccctgaagcagggccaaaccctcttccttgtctcccctctccccacttattctcctctttggaatcttcaacttctgaagtgaatgtggatacagcgccactcctgccccctcttggccccatccatggactcttgcctcggtgcagtctccactcttgacccccacctcctactgtcttgtctgtgggacagttgcctccccctcatctccagtgactcagcctacacaagggaggggaacattccatccccagtggagtctcttcctatgtggtcttctctacccctctaccccacattggccagtggactcatccattctttggaacaaatcccccccactccaaagtccatggattcaatggactcatccatttgtgaggaggacttctcgccctctggctggaagctgatacctgaagcactcccaggctcatcctgggagctttcctcagcaccttcaccttccctcccagtgtagcctcctgtcagtgggggctggacccttctaattcagaggtctcatgcctgcccttgcccagatgcccagggtcgtgcactctctgggataccagttcagtctccacatttctggttttctgtccccatagtacagttcttcagtggacatgaccccacccagcccccctgcagccctgctgcaccatctcaccagacacaaggggaagaagcagacatcaggtgctgcactcacttctgccccctggggagttggggaaaggaacgaaccctggctggaggggataggagggcttttaatttatttctttttctgttgaggcttccccctctctgagccagttttcatttcttcctggtggcattagccactccctgcctctcactccagacctgttcccacaactggggaggtaggctgggagcaaaaggagagggtgggacccagttttgcgtggttggtttttattaattatctggataacagcaaaaaaactgaaaataaagagagagagagatctgggtgttggtggttgcatttgttaaggaattgaagaagcagttcttgcccaggcaacctgcccccagccagaagactcaggggcaggccaagaacacaggcctccccctttcttcagctctctgaagtttccattgttcattgctctttggtggctgatagccttatctgcagctcacagtcggccaatcccagaggattagtgggtccggtttctgtataaattagggggcaggggtgctgtagaggcttcttatcgatgattgacgccgaggcccaggcttgttgtcctcacaggagcaggcacctagcctctcctccagcagcagcacctggtcgctgagagattcgatccggtcaccccggccccacagctcagccacctgttctggctgcagctcttcaggcggcacgggcagcaccgctctgacccaggccccagcctgaccggcccactgctccagccgctccaggcgccctcgcagctcgtgaatctcctgcttcagagcgcgctcatctttttccgcctcccgaacggccacgctgagtatgctggcactggttgggggctctggggacccctccatgcaggtgcgcccgtccacgcctagcactaggtcatgggggcagccgcaggtgaagctgcctgccgtattaaaacaatggtgcgagcagagggtgatgctggtcctacattcatccacgtccacatgacagtgcttccctccccagccggg

SEQ ID NO: 377175 - DNA, 2993 bp, Homo sapiens
ggaagtcagcaggcgttggggaggggtggcgggggaatagcggcggcagcagccccagccctcagagagacagcagaaagggagggagggagggtgctggggggacagccccccaccattcctaccgctatgggcccaacctcccactcccacctcccctccatcggccggggctaggacacccccaaatcccgtcgcccccttggcaccgacaccccgacagagacagagacacagccatccgccaccaccgctgccgcagcctggctggggagggggccagccccccaggccccctacccctctgaggtggccagaatggatttgtggccaggggcatggatgctgctgctgctgctcttcctgctgctgctcttcctgctgcccaccctgtggttctgcagccccagtgccaagtacttcttcaagatggccttctacaatggctggatcctcttcctggctgtgctcgccatccctgtgtgtgccgtgcgaggacgcaacgtcgagaacatgaagatcttgcgtctaatgctgctccacatcaaatacctgtacgggatccgagtggaggtgcgaggggctcaccacttccctccctcgcagccctatgttgttgtctccaaccaccagagctctctcgatctgcttgggatgatggaggtactgccaggccgctgtgtgcccattgccaagcgcgagctactgtgggctggctctgccgggctggcctgctggctggcaggagtcatcttcatcgaccggaagcgcacgggggatgccatcagtgtcatgtctgaggtcgcccagaccctgctcacccaggacgtgagggtctgggtgtttcctgagggaacgagaaaccacaatggctccatgctgcccttcaaacgtggcgccttccatcttgcagtgcaggcccaggttcccattgtccccatagtcatgtcctcctaccaagacttctactgcaagaaggagcgtcgcttcacctcgggacaatgtcaggtgcgggtgctgcccccagtgcccacggaagggctgacaccagatgacgtcccagctctggctgacagagtccggcactccatgctcactgttttccgggaaatctccactgatggccggggtggtggtgactatctgaagaagcctgggggcggtgggtgaaccctggctctgagctctcctcccatctgtccccatcttcctccccacacctacccacccagtgggccctgaagcagggccaaaccctcttccttgtctcccctctccccacttattctcctctttggaatcttcaacttctgaagtgaatgtggatacagcgccactcctgccccctcttggccccatccatggactcttgcctcggtgcagtctccactcttgacccccacctcctactgtcttgtctgtgggacagttgcctccccctcatctccagtgactcagcctacacaagggaggggaacattccatccccagtggagtctcttcctatgtggtcttctctacccctctaccccacattggccagtggactcatccattctttggaacaaatcccccccactccaaagtccatggattcaatggactcatccatttgtgaggaggacttctcgccctctggctggaagctgatacctgaagcactcccaggctcatcctgggagctttcctcagcaccttcaccttccctcccagtgtagcctcctgtcagtgggggctggacccttctaattcagaggtctcatgcctgcccttgcccagatgcccagggtcgtgcactctctgggataccagttcagtctccacatttctggttttctgtccccatagtacagttcttcagtggacatgaccccacccagcccccctgcagccctgctgcaccatctcaccagacacaaggggaagaagcagacatcaggtgctgcactcacttctgccccctggggagttggggaaaggaacgaaccctggctggaggggataggagggcttttaatttatttctttttctgttgaggcttccccctctctgagccagttttcatttcttcctggtggcattagccactccctgcctctcactccagacctgttcccacaactggggaggtaggctgggagcaaaaggagagggtgggacccagttttgcgtggttggtttttattaattatctggataacagcaaaaaaactgaaaataaagagagagagagatctgggtgttggtggttgcatttgttaaggaattgaagaagcagttcttgcccaggcaacctgcccccagccagaagactcaggggcaggccaagaacacaggcctccccctttcttcagctctctgaagtttccattgttcattgctctttggtggctgatagccttatctgcagctcacagtcggccaatcccagaggattagtgggtccggtttctgtataaattagggggcaggggtgctgtagaggcttcttatcgatgattgacgccgaggcccaggcttgttgtcctcacaggagcaggcacctagcctctcctccagcagcagcacctggtcgctgagagattcgatccggtcaccccggccccacagctcagccacctgttctggctgcagctcttcaggcggcacgggcagcaccgctctgacccaggccccagcctgaccggcccactagaaaggaagagatgcctcagggtattgacagtgacgtctggcctcgccccacccagcaggcttggctcacctgctccagccgctccgcctcccgaacggccacgctgagtatgctggcactggttgggggctctggggacccctccatgcaggtgcgcccgtccacgcctagcactaggtcatgggggcagccgcaggtgaagctgcctgccgtattaaaacaatggtgcgagcagagggtgatgctggtcctacattcatccacgtccacatgacagtgcttccctccccagccggg

SEQ ID NO: 377176 - DNA, 2204 bp, Homo sapiens
ggaagtcagcaggcgttggggaggggtggcgggggaatagcggcggcagcagccccagccctcagagagacagcagaaagggagggagggagggtgctggggggacagccccccaccattcctaccgctatgggcccaacctcccactcccacctcccctccatcggccggggctaggacacccccaaatcccgtcgcccccttggcaccgacaccccgacagagacagagacacagccatccgccaccaccgctgccgcagcctggctggggagggggccagccccccaggccccctacccctctgaggtggccagaatggatttgtggccaggggcatggatgctgctgctgctgctcttcctgctgctgctcttcctgctgcccaccctgtggttctgcagccccagtgccaagtacttcttcaagatggccttctacaatggctggatcctcttcctggctgtgctcgccatccctgtgtgtgccgtgcgaggacgcaacgtcgagaacatgaagatcttgcgtctaatgctgctccacatcaaatacctgtacgggatccgagtggaggtgcgaggggctcaccacttccctccctcgcagccctatgttgttgtctccaaccaccagagctctctcgatctgcttgggatgatggaggtactgccaggccgctgtgtgcccattgccaagcgcgagctactgtgggctggctctgccgggctggcctgctggctggcaggagtcatcttcatcgaccggaagcgcacgggggatgccatcagtgtcatgtctgaggtcgcccagaccctgctcacccaggacgtgagggtctgggtgtttcctgagggaacgagaaaccacaatggctccatgctgcccttcaaacgtggcgccttccatcttgcagtgcaggcccaggttcccattgtccccatagtcatgtcctcctaccaagacttctactgcaagaaggagcgtcgcttcacctcgggacaatgtcaggtgcgggtgctgcccccagtgcccacggaagggctgacaccagatgacgtcccagctctggctgacagagtccggcactccatgctcactgttttccgggaaatctccactgatggccggggtggtggtgactatctgaagaagcctgggggcggtgggtgaaccctggctctgagctctcctcccatctgtccccatcttcctccccacacctaccctcttccttgtctcccctctccccacttattctcctctttggaatcttcaacttctgaagtgaatgtggatacagcgccactcctgccccctcttggccccatccatggactcttgcctcggtgcagtctccactcttgacccccacctcctactgtcttgtctgtgggacagttgcctccccctcatctccagtgactcagcctacacaagggaggggaacattccatccccagtggagtctcttcctatgtggtcttctctacccctctaccccacattggccagtggactcatccattctttggaacaaatcccccccactccaaagtccatggattcaatggactcatccatttgtgaggaggacttctcgccctctggctggaagctgatacctgaagcactcccaggctcatcctgggagctttcctcagcaccttcaccttccctcccagtgtagcctcctgtcagtgggggctggacccttctaattcagaggtctcatgcctgcccttgcccagatgcccagggtcgtgcactctctgggataccagttcagtctccacatttctggttttctgtccccatagtacagttcttcagtggacatgaccccacccagcccccctgcagccctgctgcaccatctcaccagacacaaggggaagaagcagacatcaggtgctgcactcacttctgccccctggggagttggggaaaggaacgaaccctggctggaggggataggagggcttttaatttatttctttttctgttgaggcttccccctctctgagccagttttcatttcttcctggtggcattagccactccctgcctctcactccagacctgttcccacaactggggaggtaggctgggagcaaaaggagagggtgggacccagttttgcgtggttggtttttattaattatctggataacagcaaaaaaactgaaaataaagagagagagaga

SEQ ID NO: 377177 - DNA, 1970 bp, Homo sapiens
ggaagtcagcaggcgttggggaggggtggcgggggaatagcggcggcagcagccccagccctcagagagacagcagaaagggagggagggagggtgctggggggacagccccccaccattcctaccgctatgggcccaacctcccactcccacctcccctccatcggccggggctaggacacccccaaatcccgtcgcccccttggcaccgacaccccgacagagacagagacacagccatccgccaccaccgctgccgcagcctggctggggagggggccagccccccaggccccctacccctctgaggtggccagaatggatttgtggccaggggcatggatgctgctgctgctgctcttcctgctgctgctcttcctgctgcccaccctgtggttctgcagccccagtgccaagtacttcttcaagatggccttctacaatggctggatcctcttcctggctgtgctcgccatccctgtgtgtgccgtgcgaggacgcaacgtcgagaacatgaagatcttgcgtctaatgctgctccacatcaaatacctgtacgggatccgagtggaggtgcgaggggctcaccacttccctccctcgcagccctatgttgttgtctccaaccaccagagctctctcgatctgcttgggatgatggaggtactgccaggccgctgtgtgcccattgccaagcgcgagctactgtgggctggctctgccgggctggcctgctggctggcaggagtcatcttcatcgaccggaagcgcacgggggatgccatcagtgtcatgtctgaggtcgcccagaccctgctcacccaggacgtgagggtctgggtgtttcctgagggaacgagaaaccacaatggctccatgctgcccttcaaacgtggcgccttccatcttgcagtgcaggcccaggttcccattgtccccatcttcctccccacacctacccacccagtgggccctgaagcagggccaaaccctcttccttgtctcccctctccccacttattctcctctttggaatcttcaacttctgaagtgaatgtggatacagcgccactcctgccccctcttggccccatccatggactcttgcctcggtgcagtctccactcttgacccccacctcctactgtcttgtctgtgggacagttgcctccccctcatctccagtgactcagcctacacaagggaggggaacattccatccccagtggagtctcttcctatgtggtcttctctacccctctaccccacattggccagtggactcatccattctttggaacaaatcccccccactccaaagtccatggattcaatggactcatccatttgtgaggaggacttctcgccctctggctggaagctgatacctgaagcactcccaggctcatcctgggagctttcctcagcaccttcaccttccctcccagtgtagcctcctgtcagtgggggctggacccttctaattcagaggtctcatgcctgcccttgcccagatgcccagggtcgtgcactctctgggataccagttcagtctccacatttctggttttctgtccccatagtacagttcttcagtggacatgaccccacccagcccccctgcagccctgctgcaccatctcaccagacacaaggggaagaagcagacatcaggtgctgcactcacttctgccccctggggagttggggaaaggaacgaaccctggctggaggggataggagggcttttaatttatttctttttctgttgaggcttccccctctctgagccagttttcatttcttcctggtggcattagccactccctgcctctcactccagacctgttcccacaactggggaggtaggctgggagcaaaaggagagggtgggacccagttttgcgtggttggtttttattaattatctggataacagcaaaaaaactgaaaataaagagagagagaga

SEQ ID NO: 377178 - DNA, 1904 bp, Homo sapiens
tggccgacatcgggaaagacggcgaagagctaggaaaagagggaaaacactagggtcgcagggttcaaaatggctccaacctcctttggtgacgtagagagcagaacttgggtctgcccctcccttttagttaagggagcagaactgggattagcccgacgtttggatagtgggaacatcgatctgcggcgctggtgttaacccaactcattcggctggacgactcagccctccccatattaggtggccagaatggatttgtggccaggggcatggatgctgctgctgctgctcttcctgctgctgctcttcctgctgcccaccctgtggttctgcagccccagtgccaagtacttcttcaagatggccttctacaatggctggatcctcttcctggctgtgctcgccatccctgtgtgtgccgtgcgaggacgcaacgtcgagaacatgaagatcttgcgtctaatgctgctccacatcaaatacctgtacgggatccgagtggaggtgcgaggggctcaccacttccctccctcgcagccctatgttgttgtctccaaccaccagagctctctcgatctgcttgggatgatggaggtactgccaggccgctgtgtgcccattgccaagcgcgagctactgtgggctggctctgccgggctggcctgctggctggcaggagtcatcttcatcgaccggaagcgcacgggggatgccatcagtgtcatgtctgaggtcgcccagaccctgctcacccaggacgtgagggtctgggtgtttcctgagggaacgagaaaccacaatggctccatgctgcccttcaaacgtggcgccttccatcttgcagtgcaggcccaggttcccattgtccccatcttcctccccacacctacccacccagtgggccctgaagcagggccaaaccctcttccttgtctcccctctccccacttattctcctctttggaatcttcaacttctgaagtgaatgtggatacagcgccactcctgccccctcttggccccatccatggactcttgcctcggtgcagtctccactcttgacccccacctcctactgtcttgtctgtgggacagttgcctccccctcatctccagtgactcagcctacacaagggaggggaacattccatccccagtggagtctcttcctatgtggtcttctctacccctctaccccacattggccagtggactcatccattctttggaacaaatcccccccactccaaagtccatggattcaatggactcatccatttgtgaggaggacttctcgccctctggctggaagctgatacctgaagcactcccaggctcatcctgggagctttcctcagcaccttcaccttccctcccagtgtagcctcctgtcagtgggggctggacccttctaattcagaggtctcatgcctgcccttgcccagatgcccagggtcgtgcactctctgggataccagttcagtctccacatttctggttttctgtccccatagtacagttcttcagtggacatgaccccacccagcccccctgcagccctgctgcaccatctcaccagacacaaggggaagaagcagacatcaggtgctgcactcacttctgccccctggggagttggggaaaggaacgaaccctggctggaggggataggagggcttttaatttatttctttttctgttgaggcttccccctctctgagccagttttcatttcttcctggtggcattagccactccctgcctctcactccagacctgttcccacaactggggaggtaggctgggagcaaaaggagagggtgggacccagttttgcgtggttggtttttattaattatctggataacagcaaaaaaactgaaaataaagagagagagaga

SEQ ID NO: 377179 - DNA, 2359 bp, Homo sapiens
ggaagtcagcaggcgttggggaggggtggcgggggaatagcggcggcagcagccccagccctcagagagacagcagaaagggagggagggagggtgctggggggacagccccccaccattcctaccgctatgggcccaacctcccactcccacctcccctccatcggccggggctaggacacccccaaatcccgtcgcccccttggcaccgacaccccgacagagacagagacacagccatccgccaccaccgctgccgcagcctggctggggagggggccagccccccaggccccctacccctctgaggtggccagaatggatttgtggccaggggcatggatgctgctgctgctgctcttcctgctgctgctcttcctgctgcccaccctgtggttctgcagccccagtgccaagtacttcttcaagatggccttctacaatggctggatcctcttcctggctgtgctcgccatccctgtgtgtgccgtgcgaggacgcaacgtcgagaacatgaagatcttgcgtctaatgctgctccacatcaaatacctgtacgggatccgagtggaggtgcgaggggctcaccacttccctccctcgcagccctatgttgttgtctccaaccaccagagctctctcgatctgcttgggatgatggaggtactgccaggccgctgtgtgcccattgccaagcgcgagctactgtgggctggctctgccgggctggcctgctggctggcaggagtcatcttcatcgaccggaagcgcacgggggatgccatcagtgtcatgtctgaggtcgcccagaccctgctcacccaggacgtgagggtctgggtgtttcctgagggaacgagaaaccacaatggctccatgctgcccttcaaacgtggcgccttccatcttgcagtgcaggcccaggttcccattgtccccatagtcatgtcctcctaccaagacttctactgcaagaaggagcgtcgcttcacctcgggacaatgtcaggtgcgggtgctgcccccagtgcccacggaagggctgacaccagatgacgtcccagctctggctgacagagtccggcactccatgctcactgttttccgggaaatctccactgatggccggggtggtggtgactatctgaagaagcctgggggcggtgggtgaaccctggctctgagctctcctcccatctgtccccatcttcctccccacacctacccacccagtgggccctgaagcagggccaaaccctcttccttgtctcccctctccccacttattctcctctttggaatcttcaacttctgaagtgaatgtggatacagcgccactcctgccccctggggagttggggaaaggaacgaaccctggctggaggggataggagggcttttaatttatttctttttctgttgaggcttccccctctctgagccagttttcatttcttcctggtggcattagccactccctgcctctcactccagacctgttcccacaactggggaggtaggctgggagcaaaaggagagggtgggacccagttttgcgtggttggtttttattaattatctggataacagcaaaaaaactgaaaataaagagagagagagatctgggtgttggtggttgcatttgttaaggaattgaagaagcagttcttgcccaggcaacctgcccccagccagaagactcaggggcaggccaagaacacaggcctccccctttcttcagctctctgaagtttccattgttcattgctctttggtggctgatagccttatctgcagctcacagtcggccaatcccagaggattagtgggtccggtttctgtataaattagggggcaggggtgctgtagaggcttcttatcgatgattgacgccgaggcccaggcttgttgtcctcacaggagcaggcacctagcctctcctccagcagcagcacctggtcgctgagagattcgatccggtcaccccggccccacagctcagccacctgttctggctgcagctcttcaggcggcacgggcagcaccgctctgacccaggccccagcctgaccggcccactgctccagccgctccaggcgccctcgcagctcgtgaatctcctgcttcagagcgcgctcatctttttccgcctcccgaacggccacgctgagtatgctggcactggttgggggctctggggacccctccatgcaggtgcgcccgtccacgcctagcactaggtcatgggggcagccgcaggtgaagctgcctgccgtattaaaacaatggtgcgagcagagggtgatgctggtcctacattcatccacgtccacatgacagtgcttccctccccagccggg

SEQ ID NO: 377180 - DNA, 2461 bp, Homo sapiens
  misc_feature (1712)..(1712): n is a, c, g, or t
ggaagtcagcaggcgttggggaggggtggcgggggaatagcggcggcagcagccccagccctcagagagacagcagaaagggagggagggagggtgctggggggacagccccccaccattcctaccgctatgggcccaacctcccactcccacctcccctccatcggccggggctaggacacccccaaatcccgtcgcccccttggcaccgacaccccgacagagacagagacacagccatccgccaccaccgctgccgcagcctggctggggagggggccagccccccaggccccctacccctctgaggtggccagaatggatttgtggccaggggcatggatgctgctgctgctgctcttcctgctgctgctcttcctgctgcccaccctgtggttctgcagccccagtgccaagtacttcttcaagatggccttctacaatggctggatcctcttcctggctgtgctcgccatccctgtgtgtgccgtgcgaggacgcaacgtcgagaacatgaagatcttgcgtctaatgctgctccacatcaaatacctgtacgggatccgagtggaggtgcgaggggctcaccacttccctccctcgcagccctatgttgttgtctccaaccaccagagctctctcgatctgcttgggatgatggaggtactgccaggccgctgtgtgcccattgccaagcgcgagctactgtgggctggctctgccgggctggcctgctggctggcaggagtcatcttcatcgaccggaagcgcacgggggatgccatcagtgtcatgtctgaggtcgcccagaccctgctcacccaggacgtgagggtctgggtgtttcctgagggaacgagaaaccacaatggctccatgctgcccttcaaacgtggcgccttccatcttgcagtgcaggcccaggttcccattgtccccatagtcatgtcctcctaccaagacttctactgcaagaaggagcgtcgcttcacctcgggacaatgtcaggtgcgggtgctgcccccagtgcccacggaagggctgacaccagatgacgtcccagctctggctgacagagtccggcactccatgctcactgttttccgggaaatctccactgatggccggggtggtggtgactatctgaagaagcagacatcaggtgctgcactcacttctgccccctggggagttggggaaaggaacgaaccctggctggaggggataggagggcttttaatttatttctttttctgttgaggcttccccctctctgagccagttttcatttcttcctggtggcattagccactccctgcctctcactccagacctgttcccacaactggggaggtaggctgggagcaaaaggagagggtgggacccagttttgcgtggttggtttttattaattatctggataacagcaaaaaaactgaaaataaagagagagagagaaaaaaaaaaaaaaaaaaaaaaaaaaaaaaaaaaaaaaaaaaaaaaaaaaaaaaaaaaaaaaaaaaaaaaagaagaggggcgcgcacccacaaaatatcaccgccggggagaggacacaacatcaagaagtcctcgccacagcatagttttgtataagaagggggcgccccagaagtagcagcagcagaataatatataaaagcacgagacagggcgccgccggataaaacaacgatatgaagagggagaacaanacgacgtcatccaggggtgagactactcttgtgtgaggaagaaagcacccactatctaaaactactgagaggaggagcgagacaccacaatatgtgggcacacacaaccatctccctcagcaagaagatattatatacaaaccccccactagagaggaaatataaatatcaaaacataatctaccaacgagagtacttatatatcgggtgtgtcaaacacacacacactcacggcgacacacattacaactgcttggggcacgcaacggacagaaaaagaacaagattatctggtcgagccacctcacagcaggtacgatatatattctagttacgtcgacgacacacaatacaatttttatcccaacacagcgggcgggggggttgtttttcagtatagtaaacataaactctcaagagagagcgaaaacagaaacgagaagcgcacagaaacaaacagaaacagagccaacacacaacacgaagaagagaaccaaaacaactacagaagaaaagaaaaagagaagagagcaacgacgaagaaacggaacacgaacaagacaaaccaacagagcaaccagacaaagcaagacacaagaaaaggaacgacggacgcgaagagaggagacagaggaagggacgaccgctgcgcacggcaacacagacgcacagacaaaacaagaaacagaagacaaacacacacaaaacaaaaacaaaacaaacgcacgacaagaagaaagaagaaagaa

SEQ ID NO: 377181 - DNA, 617 bp, Homo sapiens
tactggccaatgtggggtagaggggtagagaagaccacataggaagagactccactggggatggaatgttcccctcccttgtgtagctgagtcagtgtagcctcctgtcagtgggggctggacccttctaattcagaggtctcatgcctgcccttgcccagatgcccagggtcgtgcactctctgggataccagttcagtctccacatttctggttttctgtccccatagtacagttcttcagtggacatgaccccacccagcccccctgcagccctgctgcaccatctcaccagacacaaggggaagaagcagacatcaggtgctgcactcacttctgccccctggggagttggggaaaggaacgaaccctggctggaggggataggagggcttttaatttatttctttttctgttgaggcttccccctctctgagccagttttcatttcttcctggtggcattagccactccctgcctctcactccagacctgttcccacaactggggaggtaggctgggagcaaaaggagagggtgggacccagttttgcgtggttggtttttattaattatctggataacagcaaaaaaactgaaaataaagagagagagaga

SEQ ID NO: 377182 - DNA, 2235 bp, Homo sapiens
ggaagtcagcaggcgttggggaggggtggcgggggaatagcggcggcagcagccccagccctcagagagacagcagaaagggagggagggagggtgctggggggacagccccccaccattcctaccgctatgggcccaacctcccactcccacctcccctccatcggccggggctaggacacccccaaatcccgtcgcccccttggcaccgacaccccgacagagacagagacacagccatccgccaccaccgctgccgcagcctggctggggagggggccagccccccaggccccctacccctctgaggtggccagaatggatttgtggccaggggcatggatgctgctgctgctgctcttcctgctgctgctcttcctgctgcccaccctgtggttctgcagccccagtgccaagtacttcttcaagatggccttctacaatggctggatcctcttcctggctgtgctcgccatccctgtgtgtgccgtgcgaggacgcaacgtcgagaacatgaagatcttgcgtctaatgctgctccacatcaaatacctgtacgggatccgagtggaggtgcgaggggctcaccacttccctccctcgcagccctatgttgttgtctccaaccaccagagctctctcgatctgcttgggatgatggaggtactgccaggccgctgtgtgcccattgccaagcgcgagctactgtgggctggctctgccgggctggcctgctggctggcaggagtcatcttcatcgaccggaagcgcacgggggatgccatcagtgtcatgtctgaggtcgcccagaccctgctcacccaggacgtgagggtctgggtgtttcctgagggaacgagaaaccacaatggctccatgctgcccttcaaacgtggcgccttccatcttgcagtgcaggcccaggttcccattgtccccatagtcatgtcctcctaccaagacttctactgcaagaaggagcgtcgcttcacctcgggacaatgtcaggtgcgggtgctgcccccagtgcccacggaagggctgacaccagatgacgtcccagctctggctgacagagtccggcactccatgctcactgttttccgggaaatctccactgatggccggggtggtggtgactatctgaagaagcctgggggcggtgggtgaaccctggctctgagctctcctcccatctgtccccatcttcctccccacacctacccacccagtgggccctgaagcagggccaaaccctcttccttgtctcccctctccccacttattctcctctttggaatcttcaacttctgaagtgaatgtggatacagcgccactcctgccccctcttggccccatccatggactcttgcctcggtgcagtctccactcttgacccccacctcctactgtcttgtctgtgggacagttgcctccccctcatctccagtgactcagcctacacaagggaggggaacattccatccccagtggagtctcttcctatgtggtcttctctacccctctaccccacattggccagtggactcatccattctttggaacaaatcccccccactccaaagtccatggattcaatggactcatccatttgtgaggaggacttctcgccctctggctggaagctgatacctgaagcactcccaggctcatcctgggagctttcctcagcaccttcaccttccctcccagtgtagcctcctgtcagtgggggctggacccttctaattcagaggtctcatgcctgcccttgcccagatgcccagggtcgtgcactctctgggataccagttcagtctccacatttctggttttctgtccccatagtacagttcttcagtggacatgaccccacccagcccccctgcagccctgctgcaccatctcaccagacacaaggggaagaagcagacatcaggtgctgcactcacttctgccccctggggagttggggaaaggaacgaaccctggctggaggggataggagggcttttaatttatttctttttctgttgaggcttccccctctctgagccagttttcatttcttcctggtggcattagccactccctgcctctcactccagacctgttcccacaactggggaggtaggctgggagcaaaaggagagggtgggacccagttttgcgtggttggtttttattaattatctggataacagcaaaaaaactgaaaataaagagagagagaga

SEQ ID NO: 377183 - DNA, 3238 bp, Homo sapiens
  misc_feature (2489)..(2489): n is a, c, g, or t
ggaagtcagcaggcgttggggaggggtggcgggggaatagcggcggcagcagccccagccctcagagagacagcagaaagggagggagggagggtgctggggggacagccccccaccattcctaccgctatgggcccaacctcccactcccacctcccctccatcggccggggctaggacacccccaaatcccgtcgcccccttggcaccgacaccccgacagagacagagacacagccatccgccaccaccgctgccgcagcctggctggggagggggccagccccccaggccccctacccctctgaggtggccagaatggatttgtggccaggggcatggatgctgctgctgctgctcttcctgctgctgctcttcctgctgcccaccctgtggttctgcagccccagtgccaagtacttcttcaagatggccttctacaatggctggatcctcttcctggctgtgctcgccatccctgtgtgtgccgtgcgaggacgcaacgtcgagaacatgaagatcttgcgtctaatgctgctccacatcaaatacctgtacgggatccgagtggaggtgcgaggggctcaccacttccctccctcgcagccctatgttgttgtctccaaccaccagagctctctcgatctgcttgggatgatggaggtactgccaggccgctgtgtgcccattgccaagcgcgagctactgtgggctggctctgccgggctggcctgctggctggcaggagtcatcttcatcgaccggaagcgcacgggggatgccatcagtgtcatgtctgaggtcgcccagaccctgctcacccaggacgtgagggtctgggtgtttcctgagggaacgagaaaccacaatggctccatgctgcccttcaaacgtggcgccttccatcttgcagtgcaggcccaggttcccattgtccccatagtcatgtcctcctaccaagacttctactgcaagaaggagcgtcgcttcacctcgggacaatgtcaggtgcgggtgctgcccccagtgcccacggaagggctgacaccagatgacgtcccagctctggctgacagagtccggcactccatgctcactgttttccgggaaatctccactgatggccggggtggtggtgactatctgaagaagcctgggggcggtgggtgaaccctggctctgagctctcctcccatctgtccccatcttcctccccacacctacccacccagtgggccctgaagcagggccaaaccctcttccttgtctcccctctccccacttattctcctctttggaatcttcaacttctgaagtgaatgtggatacagcgccactcctgccccctcttggccccatccatggactcttgcctcggtgcagtctccactcttgacccccacctcctactgtcttgtctgtgggacagttgcctccccctcatctccagtgactcagcctacacaagggaggggaacattccatccccagtggagtctcttcctatgtggtcttctctacccctctaccccacattggccagtggactcatccattctttggaacaaatcccccccactccaaagtccatggattcaatggactcatccatttgtgaggaggacttctcgccctctggctggaagctgatacctgaagcactcccaggctcatcctgggagctttcctcagcaccttcaccttccctcccagtgtagcctcctgtcagtgggggctggacccttctaattcagaggtctcatgcctgcccttgcccagatgcccagggtcgtgcactctctgggataccagttcagtctccacatttctggttttctgtccccatagtacagttcttcagtggacatgaccccacccagcccccctgcagccctgctgcaccatctcaccagacacaaggggaagaagcagacatcaggtgctgcactcacttctgccccctggggagttggggaaaggaacgaaccctggctggaggggataggagggcttttaatttatttctttttctgttgaggcttccccctctctgagccagttttcatttcttcctggtggcattagccactccctgcctctcactccagacctgttcccacaactggggaggtaggctgggagcaaaaggagagggtgggacccagttttgcgtggttggtttttattaattatctggataacagcaaaaaaactgaaaataaagagagagagagaaaaaaaaaaaaaaaaaaaaaaaaaaaaaaaaaaaaaaaaaaaaaaaaaaaaaaaaaaaaaaaaaaaaaaagaagaggggcgcgcacccacaaaatatcaccgccggggagaggacacaacatcaagaagtcctcgccacagcatagttttgtataagaagggggcgccccagaagtagcagcagcagaataatatataaaagcacgagacagggcgccgccggataaaacaacgatatgaagagggagaacaanacgacgtcatccaggggtgagactactcttgtgtgaggaagaaagcacccactatctaaaactactgagaggaggagcgagacaccacaatatgtgggcacacacaaccatctccctcagcaagaagatattatatacaaaccccccactagagaggaaatataaatatcaaaacataatctaccaacgagagtacttatatatcgggtgtgtcaaacacacacacactcacggcgacacacattacaactgcttggggcacgcaacggacagaaaaagaacaagattatctggtcgagccacctcacagcaggtacgatatatattctagttacgtcgacgacacacaatacaatttttatcccaacacagcgggcgggggggttgtttttcagtatagtaaacataaactctcaagagagagcgaaaacagaaacgagaagcgcacagaaacaaacagaaacagagccaacacacaacacgaagaagagaaccaaaacaactacagaagaaaagaaaaagagaagagagcaacgacgaagaaacggaacacgaacaagacaaaccaacagagcaaccagacaaagcaagacacaagaaaaggaacgacggacgcgaagagaggagacagaggaagggacgaccgctgcgcacggcaacacagacgcacagacaaaacaagaaacagaagacaaacacacacaaaacaaaaacaaaacaaacgcacgacaagaagaaagaagaaagaa

SEQ ID NO: 377184 - DNA, 2532 bp, Homo sapiens
atgagaagttagcagttgcgtaaagaaggactggggcagatgaggattcaggaagcttgaggtttaggaaggaagatattgagagggaaaggtggaaatgaaggagagtgaagtgatggaatgatcctagtaaagggataatgggagtggaggaagagaagagggggtggaaaactagatacatggctaccaaattaaggaggcacgcgcattccagaggaatcggcattcttcctcactttttatttttctagaaagcacccctgaagccaaatttccattggaagaaaagatgtacccatattgtatgttgtgagaaggggttgtctcagcttgggcaagtaaggagactgatacgaaggaagtaggaaagaaaaggtacagaggtaaaagagcatggaaaaggaaagggtcagggataaggccaaagagatctcttctctttaaaggccagagaaggcaggtggaggggggagctggactgctgggagatagtgagggacaaagggcaaaggaaaccagaccagaggactggagagtgagatggagtgagatggagtcctggagagaaaaagaagagaggtgaacttaatgcttgtcatataggtggccagaatggatttgtggccaggggcatggatgctgctgctgctgctcttcctgctgctgctcttcctgctgcccaccctgtggttctgcagccccagtgccaagtacttcttcaagatggccttctacaatggctggatcctcttcctggctgtgctcgccatccctgtgtgtgccgtgcgaggacgcaacgtcgagaacatgaagatcttgcgtctaatgctgctccacatcaaatacctgtacgggatccgagtggaggtgcgaggggctcaccacttccctccctcgcagccctatgttgttgtctccaaccaccagagctctctcgatctgcttgggatgatggaggtactgccaggccgctgtgtgcccattgccaagcgcgagctactgtgggctggctctgccgggctggcctgctggctggcaggagtcatcttcatcgaccggaagcgcacgggggatgccatcagtgtcatgtctgaggtcgcccagaccctgctcacccaggacgtgagggtctgggtgtttcctgagggaacgagaaaccacaatggctccatgctgcccttcaaacgtggcgccttccatcttgcagtgcaggcccaggttcccattgtccccatagtcatgtcctcctaccaagacttctactgcaagaaggagcgtcgcttcacctcgggacaatgtcaggtgcgggtgctgcccccagtgcccacggaagggctgacaccagatgacgtcccagctctggctgacagagtccggcactccatgctcactgttttccgggaaatctccactgatggccggggtggtggtgactatctgaagaagcctgggggcggtgggtgaaccctggctctgagctctcctcccatctgtccccatcttcctccccacacctacccacccagtgggccctgaagcagggccaaaccctcttccttgtctcccctctccccacttattctcctctttggaatcttcaacttctgaagtgaatgtggatacagcgccactcctgccccctcttggccccatccatggactcttgcctcggtgcagtctccactcttgacccccacctcctactgtcttgtctgtgggacagttgcctccccctcatctccagtgactcagcctacacaagggaggggaacattccatccccagtggagtctcttcctatgtggtcttctctacccctctaccccacattggccagtggactcatccattctttggaacaaatcccccccactccaaagtccatggattcaatggactcatccatttgtgaggaggacttctcgccctctggctggaagctgatacctgaagcactcccaggctcatcctgggagctttcctcagcaccttcaccttccctcccagtgtagcctcctgtcagtgggggctggacccttctaattcagaggtctcatgcctgcccttgcccagatgcccagggtcgtgcactctctgggataccagttcagtctccacatttctggttttctgtccccatagtacagttcttcagtggacatgaccccacccagcccccctgcagccctgctgcaccatctcaccagacacaaggggaagaagcagacatcaggtgctgcactcacttctgccccctggggagttggggaaaggaacgaaccctggctggaggggataggagggcttttaatttatttctttttctgttgaggcttccccctctctgagccagttttcatttcttcctggtggcattagccactccctgcctctcactccagacctgttcccacaactggggaggtaggctgggagcaaaaggagagggtgggacccagttttgcgtggttggtttttattaattatctggataacagcaaaaaaactgaaaataaagagagagagaga

SEQ ID NO: 377185 - DNA, 1981 bp, Homo sapiens
tttgggcttttcctacaatcactgaccctcactgtgactaaaggagcagaattaggtggccagaatggatttgtggccaggggcatggatgctgctgctgctgctcttcctgctgctgctcttcctgctgcccaccctgtggttctgcagccccagtgccaagtacttcttcaagatggccttctacaatggctggatcctcttcctggctgtgctcgccatccctgtgtgtgccgtgcgaggacgcaacgtcgagaacatgaagatcttgcgtctaatgctgctccacatcaaatacctgtacgggatccgagtggaggtgcgaggggctcaccacttccctccctcgcagccctatgttgttgtctccaaccaccagagctctctcgatctgcttgggatgatggaggtactgccaggccgctgtgtgcccattgccaagcgcgagctactgtgggctggctctgccgggctggcctgctggctggcaggagtcatcttcatcgaccggaagcgcacgggggatgccatcagtgtcatgtctgaggtcgcccagaccctgctcacccaggacgtgagggtctgggtgtttcctgagggaacgagaaaccacaatggctccatgctgcccttcaaacgtggcgccttccatcttgcagtgcaggcccaggttcccattgtccccatagtcatgtcctcctaccaagacttctactgcaagaaggagcgtcgcttcacctcgggacaatgtcaggtgcgggtgctgcccccagtgcccacggaagggctgacaccagatgacgtcccagctctggctgacagagtccggcactccatgctcactgttttccgggaaatctccactgatggccggggtggtggtgactatctgaagaagcctgggggcggtgggtgaaccctggctctgagctctcctcccatctgtccccatcttcctccccacacctacccacccagtgggccctgaagcagggccaaaccctcttccttgtctcccctctccccacttattctcctctttggaatcttcaacttctgaagtgaatgtggatacagcgccactcctgccccctcttggccccatccatggactcttgcctcggtgcagtctccactcttgacccccacctcctactgtcttgtctgtgggacagttgcctccccctcatctccagtgactcagcctacacaagggaggggaacattccatccccagtggagtctcttcctatgtggtcttctctacccctctaccccacattggccagtggactcatccattctttggaacaaatcccccccactccaaagtccatggattcaatggactcatccatttgtgaggaggacttctcgccctctggctggaagctgatacctgaagcactcccaggctcatcctgggagctttcctcagcaccttcaccttccctcccagtgtagcctcctgtcagtgggggctggacccttctaattcagaggtctcatgcctgcccttgcccagatgcccagggtcgtgcactctctgggataccagttcagtctccacatttctggttttctgtccccatagtacagttcttcagtggacatgaccccacccagcccccctgcagccctgctgcaccatctcaccagacacaaggggaagaagcagacatcaggtgctgcactcacttctgccccctggggagttggggaaaggaacgaaccctggctggaggggataggagggcttttaatttatttctttttctgttgaggcttccccctctctgagccagttttcatttcttcctggtggcattagccactccctgcctctcactccagacctgttcccacaactggggaggtaggctgggagcaaaaggagagggtgggacccagttttgcgtggttggtttttattaattatctggataacagcaaaaaaactgaaaataaagagagagagaga

SEQ ID NO: 377186 - DNA, 2169 bp, Homo sapiens
tggccgacatcgggaaagacggcgaagagctaggaaaagagggaaaacactagggtcgcagggttcaaaatggctccaacctcctttggtgacgtagagagcagaacttgggtctgcccctcccttttagttaagggagcagaactgggattagcccgacgtttggatagtgggaacatcgatctgcggcgctggtgttaacccaactcattcggctggacgactcagccctccccatattaggtggccagaatggatttgtggccaggggcatggatgctgctgctgctgctcttcctgctgctgctcttcctgctgcccaccctgtggttctgcagccccagtgccaagtacttcttcaagatggccttctacaatggctggatcctcttcctggctgtgctcgccatccctgtgtgtgccgtgcgaggacgcaacgtcgagaacatgaagatcttgcgtctaatgctgctccacatcaaatacctgtacgggatccgagtggaggtgcgaggggctcaccacttccctccctcgcagccctatgttgttgtctccaaccaccagagctctctcgatctgcttgggatgatggaggtactgccaggccgctgtgtgcccattgccaagcgcgagctactgtgggctggctctgccgggctggcctgctggctggcaggagtcatcttcatcgaccggaagcgcacgggggatgccatcagtgtcatgtctgaggtcgcccagaccctgctcacccaggacgtgagggtctgggtgtttcctgagggaacgagaaaccacaatggctccatgctgcccttcaaacgtggcgccttccatcttgcagtgcaggcccaggttcccattgtccccatagtcatgtcctcctaccaagacttctactgcaagaaggagcgtcgcttcacctcgggacaatgtcaggtgcgggtgctgcccccagtgcccacggaagggctgacaccagatgacgtcccagctctggctgacagagtccggcactccatgctcactgttttccgggaaatctccactgatggccggggtggtggtgactatctgaagaagcctgggggcggtgggtgaaccctggctctgagctctcctcccatctgtccccatcttcctccccacacctacccacccagtgggccctgaagcagggccaaaccctcttccttgtctcccctctccccacttattctcctctttggaatcttcaacttctgaagtgaatgtggatacagcgccactcctgccccctcttggccccatccatggactcttgcctcggtgcagtctccactcttgacccccacctcctactgtcttgtctgtgggacagttgcctccccctcatctccagtgactcagcctacacaagggaggggaacattccatccccagtggagtctcttcctatgtggtcttctctacccctctaccccacattggccagtggactcatccattctttggaacaaatcccccccactccaaagtccatggattcaatggactcatccatttgtgaggaggacttctcgccctctggctggaagctgatacctgaagcactcccaggctcatcctgggagctttcctcagcaccttcaccttccctcccagtgtagcctcctgtcagtgggggctggacccttctaattcagaggtctcatgcctgcccttgcccagatgcccagggtcgtgcactctctgggataccagttcagtctccacatttctggttttctgtccccatagtacagttcttcagtggacatgaccccacccagcccccctgcagccctgctgcaccatctcaccagacacaaggggaagaagcagacatcaggtgctgcactcacttctgccccctggggagttggggaaaggaacgaaccctggctggaggggataggagggcttttaatttatttctttttctgttgaggcttccccctctctgagccagttttcatttcttcctggtggcattagccactccctgcctctcactccagacctgttcccacaactggggaggtaggctgggagcaaaaggagagggtgggacccagttttgcgtggttggtttttattaattatctggataacagcaaaaaaactgaaaataaagagagagagaga

SEQ ID NO: 377187 - DNA, 2701 bp, Homo sapiens
ggaagtcagcaggcgttggggaggggtggcgggggaatagcggcggcagcagccccagccctcagagagacagcagaaagggagggagggagggtgctggggggacagccccccaccattcctaccgctatgggcccaacctcccactcccacctcccctccatcggccggggctaggacacccccaaatcccgtcgcccccttggcaccgacaccccgacagagacagagacacagccatccgccaccaccgctgccgcagcctggctggggagggggccagccccccaggccccctacccctctgaggtggccagaatggatttgtggccaggggcatggatgctgctgctgctgctcttcctgctgctgctcttcctgctgcccaccctgtggttctgcagccccagtgccaagtacttcttcaagatggccttctacaatggctggatcctcttcctggctgtgctcgccatccctgtgtgtgccgtgcgaggacgcaacgtcgagaacatgaagatcttgcgtctaatgctgctccacatcaaatacctgtacgggatccgagtggaggtgcgaggggctcaccacttccctccctcgcagccctatgttgttgtctccaaccaccagagctctctcgatctgcttgggatgatggaggtactgccaggccgctgtgtgcccattgccaagcgcgagctactgtgggctggctctgccgggctggcctgctggctggcaggagtcatcttcatcgaccggaagcgcacgggggatgccatcagtgtcatgtctgaggtcgcccagaccctgctcacccaggacgtgagggtctgggtgtttcctgagggaacgagaaaccacaatggctccatgctgcccttcaaacgtggcgccttccatcttgcagtgcaggcccaggttcccattgtccccatagtcatgtcctcctaccaagacttctactgcaagaaggagcgtcgcttcacctcgggacaatgtcaggtgcgggtgctgcccccagtgcccacggaagggctgacaccagatgacgtcccagctctggctgacagagtccggcactccatgctcactgttttccgggaaatctccactgatggccggggtggtggtgactatctgaagaagcctgggggcggtgggtgaaccctggctctgagctctcctcccatctgtccccatcttcctccccacacctacccacccagtgggccctgaagcagggccaaaccctcttccttgtctcccctctccccacttattctcctctttggaatcttcaacttctgaagtgaatgtggatacagcgccactcctgccccctcttggccccatccatggactcttgcctcggtgcagtctccactcttgacccccacctcctactgtcttgtctgtgggacagttgcctccccctcatctccagtgactcagcctacacaagggaggggaacattccatccccagtggagtctcttcctatgtggtcttctctacccctctaccccacattggccagtggactcatccattctttggaacaaatcccccccactccaaagtccatggattcaatggactcatccatttgtgaggaggacttctcgccctctggctggaagctgatacctgaagcactcccaggctcatcctgggagctttcctcagcaccttcaccttccctcccagtgtagcctcctgtcagtgggggctggacccttctaattcagaggtctcatgcctgcccttgcccagatgcccagggtcgtgcactctctgggataccagttcagtctccacatttctggttttctgtccccatagtacagttcttcagtggacatgaccccacccagcccccctgcagccctgctgcaccatctcaccagacacaaggggaagaagcagacatcaggtgctgcactcacttctgccccctggggagttggggaaaggaacgaaccctggctggaggggataggagggcttttaatttatttctttttctgttgaggcttccccctctctgagccagttttcatttcttcctggtggcattagccactccctgcctctcactccagacctgttcccacaactggggaggtaggctgggagcaaaaggagagggtgggacccagttttgcgtggttggtttttattaattatctggataacagcaaaaaaactgaaaataaagagagagagagatctgggtgttggtggttgcatttgttaaggaattgaagaagcagttcttgcccaggcaacctgcccccagccagaagactcaggggcaggccaagaacacaggcctccccctttcttcagctctctgaagtttccattgttcattgctctttggtggctgatagccttatctgcagctcacagtctgctccagccgctccaggcgccctcgcagctcgtgaatctcctgcttcagagcgcgctcatctttttccgcctcccgaacggccacgctgagtatgctggcactggttgggggctctggggacccctccatgcaggtgcgcccgtccacgcctagcactaggtcatgggggcagccgcaggtgaagctgcctgccgtattaaaacaatggtgcgagcagagggtgatgctggtcctacattcatccacgtccacatgacagtgcttccctccccagccggg

SEQ ID NO: 377188 - DNA, 1972 bp, Homo sapiens
ggaagtcagcaggcgttggggaggggtggcgggggaatagcggcggcagcagccccagccctcagagagacagcagaaagggagggagggagggtgctggggggacagccccccaccattcctaccgctatgggcccaacctcccactcccacctcccctccatcggccggggctaggacacccccaaatcccgtcgcccccttggcaccgacaccccgacagagacagagacacagccatccgccaccaccgctgccgcagcctggctggggagggggccagccccccaggccccctacccctctgaggtggccagaatggatttgtggccaggggcatggatgctgctgctgctgctcttcctgctgctgctcttcctgctgcccaccctgtggttctgcagccccagtgccaagtacttcttcaagatggccttctacaatggctggatcctcttcctggctgtgctcgccatccctgtgtgtgccgtgcgaggacgcaacgtcgagaacatgaagatcttgcgtctaatgctgctccacatcaaatacctgtacgggatccgagtggaggtgcgaggggctcaccacttccctccctcgcagccctatgttgttgtctccaaccaccagagctctctcgatctgcttgggatgatggaggtactgccaggccgctgtgtgcccattgccaagcgcgagctactgtgggctggctctgccgggctggcctgctggctggcaggagtcatcttcatcgaccggaagcgcacgggggatgccatcagtgtcatgtctgaggtcgcccagaccctgctcacccaggacgtgagggtctgggtgtttcctgagggaacgagaaaccacaatggctccatgctgcccttcaaacgtggcgccttccatcttgcagtgcaggcccaggttcccattgtccccatagtcatgtcctcctaccaagacttctactgcaagaaggagcgtcgcttcacctcgggacaatgtcaggtgcgggtgctgcccccagtgcccacggaagggctgacaccagatgacgtcccagctctggctgacagagtccggcactccatgctcactgttttccgggaaatctccactgatggccggggtggtggtgactatctgaagaagcctgggggcggtgggtgaaccctggctctgagctctcctcccatctgtccccatcttcctccccacacctacccacccagtgggccctgaagcagggccaaaccctcttccttgtctcccctctccccacttattctcctctttggaatcttcaacttctgaagtgaatgtggatacagcgccactcctgccccctcttggccccatccatggactcttgcctcggtgcagtctccactcttgacccccacctcctactgtcttgtctgtgggacagttgcctccccctcatctccagtgtagcctcctgtcagtgggggctggacccttctaattcagaggtctcatgcctgcccttgcccagatgcccagggtcgtgcactctctgggataccagttcagtctccacatttctggttttctgtccccatagtacagttcttcagtggacatgaccccacccagcccccctgcagccctgctgcaccatctcaccagacacaaggggaagaagcagacatcaggtgctgcactcacttctgccccctggggagttggggaaaggaacgaaccctggctggaggggataggagggcttttaatttatttctttttctgttgaggcttccccctctctgagccagttttcatttcttcctggtggcattagccactccctgcctctcactccagacctgttcccacaactggggaggtaggctgggagcaaaaggagagggtgggacccagttttgcgtggttggtttttattaattatctggataacagcaaaaaaactgaaaataaagagagagagaga

SEQ ID NO: 377189 - DNA, 1034 bp, Homo sapiens
  misc_feature (27)..(27): n is a, c, g, or t
  misc_feature (48)..(48): n is a, c, g, or t
cttctgacctttgatccgctaggcccnccatctctgaaccctagagcnccgctttctcttccttgtctcccctctccccacttattctcctctttggaatcttcaacttctgaagtgaatgtggatacagcgccactcctgccccctcttggccccatccatggactcttgcctcggtgcagtctccactcttgacccccacctcctactgtcttgtctgtgggacagttgcctccccctcatctccagtgactcagcctacacaagggaggggaacattccatccccagtggagtctcttcctatgtggtcttctctacccctctaccccacattggccagtggactcatccattctttggaacaaatcccccccactccaaagtccatggattcaatggactcatccatttgtgaggaggacttctcgccctctggctggaagctgatacctgaagcactcccaggctcatcctgggagctttcctcagcaccttcaccttccctcccagtgtagcctcctgtcagtgggggctggacccttctaattcagaggtctcatgcctgcccttgcccagatgcccagggtcgtgcactctctgggataccagttcagtctccacatttctggttttctgtccccatagtacagttcttcagtggacatgaccccacccagcccccctgcagccctgctgcaccatctcaccagacacaaggggaagaagcagacatcaggtgctgcactcacttctgccccctggggagttggggaaaggaacgaaccctggctggaggggataggagggcttttaatttatttctttttctgttgaggcttccccctctctgagccagttttcatttcttcctggtggcattagccactccctgcctctcactccagacctgttcccacaactggggaggtaggctgggagcaaaaggagagggtgggacccagttttgcgtggttggtttttattaattatctggataacagcaaaaaaactgaaaataaagagagagagaga

SEQ ID NO: 377190 - DNA, 1620 bp, Homo sapiens
ggaagtcagcaggcgttggggaggggtggcgggggaatagcggcggcagcagccccagccctcagagagacagcagaaagggagggagggagggtgctggggggacagccccccaccattcctaccgctatgggcccaacctcccactcccacctcccctccatcggccggggctaggacacccccaaatcccgtcgcccccttggcaccgacaccccgacagagacagagacacagccatccgccaccaccgctgccgcagcctggctggggagggggccagccccccaggccccctacccctctgaggtggccagaatggatttgtggccaggggcatggatgctgctgctgctgctcttcctgctgctgctcttcctgctgcccaccctgtggttctgcagccccagtgccaagtacttcttcaagatggccttctacaatggctggatcctcttcctggctgtgctcgccatccctgtgtgtgccgtgcgaggacgcaacgtcgagaacatgaagatcttgcgtctaatgctgctccacatcaaatacctgtacgggatccgagtggaggtgcgaggggctcaccacttccctccctcgcagccctatgttgttgtctccaaccaccagagctctctcgatctgcttgggatgatggaggtactgccaggccgctgtgtgcccattgccaagcgcgagctactgtgggctggctctgccgggctggcctgctggctggcaggagtcatcttcatcgaccggaagcgcacgggggatgccatcagtgtcatgtctgaggtcgcccagaccctgctcacccaggacgtgagggtctgggtgtttcctgagggaacgagaaaccacaatggctccatgctgcccttcaaacgtggcgccttccatcttgcagtgcaggcccaggttcccattgtccccatagtcatgtcctcctaccaagacttctactgcaagaaggagcgtcgcttcacctcgggacaatgtcaggtgcgggtgctgcccccagtgcccacggaagggctgacaccagatgacgtcccagctctggctgacagagtccggcactccatgctcactgttttccgggaaatctccactgatggccggggtggtggtgactatctgaagaagcctgggggcggtgggtgaaccctggctctgagctctcctcccatctgtccccatcttcctccccacacctacccacccagtgggccctgaagcagggccaaaccctcttccttgtctcccctctccccacttattctcctctttggaatcttcaacttctgaagtgaatgtggatacagcgccactcctgccccctggggagttggggaaaggaacgaaccctggctggaggggataggagggcttttaatttatttctttttctgttgaggcttccccctctctgagccagttttcatttcttcctggtggcattagccactccctgcctctcactccagacctgttcccacaactggggaggtaggctgggagcaaaaggagagggtgggacccagttttgcgtggttggtttttattaattatctggataacagcaaaaaaactgaaaataaagagagagagaga

SEQ ID NO: 377191 - DNA, 515 bp, Homo sapiens
ccagaagctcagcagttgcctgtgctgtgcttatacagcctgcagaactgtgagccaattaaacctcttttctttatagattaccctggctcagatatttctttatagcaatgcaagaatggactcacaaagatactttcgggcatgccgaggcaagcagctgaagggtcttcatagccaaatttgctcacaggtggggcctcctgcccacctcccaactgcccaccaccttacccttctcccacctgccagagggattgcttgaaaatgcaaatcaggccctgcaatgaccccctcttgctgccagggaagcagactgctcccaaggaccccctgcccagctcatcgctgccgtcttcagccgtcttccctggccatacaggtgcctttgctcacccagggcatcaaattcccaactgtctgggcctctgcgtatgctattctgaattcttagaatattcttcatccttcttttttactcctgttattcactgggaggctcagcttttctttca

SEQ ID NO: 377192 - DNA, 422 bp, Homo sapiens
  misc_feature (347)..(347): n is a, c, g, or t
actgagtttacaacattgagatcaggccctctgagagacctttactcctctgtcatcatatctataaatattcagatattagtggtgttagaaaataaaggaaggactgttacagagctagactttaggtttaagtttattaagcattaggtttacagcctggggcaacatagggagaccccatttctacaaaacagaataaattaggctgggcttgggtgggcatttgcctgtgggtcccagctgttaagggagacttgaggtagggagcattgctttgagcctgggggagggtgaaggctgttagttgagggtgttgatgttcacccacttgcattttccagccntagggccaaccaggagctttttaggatttacctttccaagtttcttttaagttaccattttttagggggtatttg

SEQ ID NO: 377193 - DNA, 475 bp, Homo sapiens
agggtgaacctaagacagtctgtaggctgcccgggctagagtttgctctttggttttcagagtctggggtttcagcttaaagacaggcacaggccagctgcctcaccactggctgtggcgagtgatgtggtccctgagggtggcgtttctgccgacgctggtgcagtacagggtcctgtcttgtccctgtcacccacttggcaaggggctgggagcaggagtgagggaagatgctgtggttgtgctgaggcctgggccacacatgtgtgacgctcgaggtgacaggcagaagcttattctttcattgtccagggaaaccccatgtgtaggaacgtgcttgttttatgacctcttcccctgtgcttcgcagctggctttttgggacctatgtacaccccagccattagatgatgccaacagtcttgttgcagtagggcactggctgccagcctgtgggggtcatttggggttttgg

SEQ ID NO: 377194 - DNA, 575 bp, Homo sapiens
cgaggcagcgcaggcggtgcagctcggccagcttgccgttcctctccctttctctcagcatcttcttggtagcctgcctgtaggtgaagaagcaccagcagcatccatggcctgtcttttggcttaacacttatctcctttggctttgacagcggacggaatagacctcagcagcggcgtggtgaggacttagctgggacctggaatcgtatcctcctgtgttttttcagactccttggaaattaaggaatgcaattctgccaccatgatggaaggattgaaaaaacgtacaaggaaggcctttggaatacggaagaaagaaaaggacactgattctacgtatgtactttaggagtttgcctcctcgaagaagctatttgcataagagatgctcttatcacagtcaatataagatggccacagttttctcggatattgtgtactatttgctttcctcatttctgagtaaattgtaattattcaatataaacagttcttagatttatgctaaaaaggtaaaaatttttcatcatgtgttcagtttttatcacatttttctttctttcttttttttt

SEQ ID NO: 377195 - DNA, 531 bp, Homo sapiens
tgcaacctgtgtatctaacttttcatctcttttcttctccttacagtccagaccttttagccctcccattcattcttccagccctcctccaatagcacccttagcgcgggctgaaagcacttcttcaatatcgtcaaccaattccttgagcgcagccaccactcccacagttggtaaaaattctctcctctcttttaatccgtttgtggttttgactggctattttttatgatctgaaatccccaaggccctgtgtttctggttgaaattgttttgctgtgtgttttgctactattacctgactcttcttttaaaaccaccttctcagcaaaggaggcaaagtgctttacctaagcaaatgaacaaataaaagaacattaacacctgtgttttgcaggaattttcttatgctgttccatacagagctattcaaaaaataagtaagaaatcgccaaggaaggtcttgtaatttagatattatttcttaaaataaaaatagtctcctttgaggggaaatgtttgtttaaattc

SEQ ID NO: 377196 - DNA, 1010 bp, Homo sapiens
ttaacattttaatttcctctcatagaatcatcacaaaataagaaaacacttctttatatcgtaatcataattccagtgttttcagttttgtttcctttttccactaaaatcattcctgtgtttcaatcagtaaagtgggcttcttgatttcatttgggatttgtatttgtgtttttgttttccattcgtttatgtttctttggttcgtagtgtcagaagacgatgttttttatgacaaactgccctcgtttgaaaggcgctgtgaaacgcctgcaggtatggtgctagccaagtgatctctagagacctagattccaaaaatccaagccattatccatctgaatgctataaacttcatggacatgccctcacctcatgagtgtccagtgcctctcagatgcaccctgtatatttactgttcatcgtggaactcgtgccactgaaaatttttaagtgactatattcaaaaacagcaggttgcatgacagtttctcagtgaagaggttcaaaaaaggtgagatgctattgctttgtgaatttacaaaggaaagaataatttaactgctcagaattacatgtccggtcactgctttttaatttaaaaaataatagagcatcattagtaatcttgttttctctttgatacataggtaaagggtgttttgtgtctggatgcctaaggtgattccaggggaggggatggaagatatgtgacatcttccctgaaatttatattgatatgcaatgctttgtcatttaaaacctaagctaatgttttctacaatccataactctgagtttatctttttggaaacatagaaggggatgacattgaagatgaaatggatacagcaattgctgaatgacagtttgcccaaattagtgcagttaaaatatgctgacgcccctgcatggccaggaagacttctgctccatgcacacaagcaccaagtatcaagcgaccaccaacacattcccattcctttaggcctccatagctttgcttttgc

SEQ ID NO: 377197 - DNA, 482 bp, Homo sapiens
ggctaggcaggaaactccaaattctgtgatatctctaacccaagtagaaggagcactgacctactttcagatcacaatggaaagaccaactgatcaattgaagtttgtaacagacctgcacaaagagaaggcttcatcaatgctgtattttcctgctgcatgaaagagttatacttcttgttgattgaaaaaacgtacaaggaaggcctttggaatacggaagaaagaaaaggacactgattctacgtatgtactttaggagtttgcctcctcgaagaagctatttgcataagagatgctcttatcacagtcaatataagatggccacagttttctcggatattgtgtactatttgctttcctcatttctgagtaaattgtaattattcaatataaacagttcttagatttatgctaaaaaggtaaaaatttttcatcatgtgttcagtttttatcacatttttctttctttcttttttttt

SEQ ID NO: 377198 - DNA, 344 bp, Homo sapiens
gtagtgtatggaatatttttatatctatttcaggcgtggcgtacttgggaggacaacgcacaggttagcctttggaatacggaagaaagaaaaggacactgattctacgtatgtactttaggagtttgcctcctcgaagaagctatttgcataagagatgctcttatcacagtcaatataagatggccacagttttctcggatattgtgtactatttgctttcctcatttctgagtaaattgtaattattcaatataaacagttcttagatttatgctaaaaaggtaaaaatttttcatcatgtgttcagtttttatcacatttttctttctttcttttttttt

SEQ ID NO: 377199 - DNA, 4741 bp, Homo sapiens
cgaggcagcgcaggcggtgcagctcggccagcttgccgttcctctccctttctctcagcatcttcttggtagcctgcctgtaggtgaagaagcaccagcagcatccatggcctgtcttttggcttaacacttatctcctttggctttgacagcggacggaatagacctcagcagcggcgtggtgaggacttagctgggacctggaatcgtatcctcctgtgttttttcagactccttggaaattaaggaatgcaattctgccaccatgatggaaggattgaaaaaacgtacaaggaaggcctttggaatacggaagaaagaaaaggacactgattctacaggttcaccagatagagatggaattcagcccagcccacacgaaccaccctacaatagcaaagcagagtgtgcgcgtgaaggaggaaaaaaagtttcgaagaaaagcaatggggcaccaaatggattttatgcggaaattgattgggaaagatataactcacctgagctggatgaagaaggctacagcatcagacccgaggaacccggctctaccaaaggaaagcacttttattcttcaagtgaatcggaagaagaagaagaatcacataagaaatttaatatcaagattaaaccattgcaatctaaagacattcttaagaatgctgcaactgtagatgaattgaaggcatcaataggcaacatcgcactttccccatcaccagtgaggaaaagtccgaggcgcagcccgggtgcaattaaaaggaacttatccagtgaagaagtggcaagacccaggcgttccacaccaactccagaacttataagcaaaaagcctccagatgacactacggcccttgctcctctctttggcccaccactagaatcagcttttgatgaacagaagacagaagttcttttagatcagcctgagatatggggttcaggccaaccaattaatccaagcatggagtcgccaaagttaacaaggccttttcccactggaacacctccaccactgcctccaaaaaatgtaccagctaccccaccccgaacaggatcccccttaacaattggaccaggaaatgaccagtcagccacagaggtcaaaattgaaaaactaccatccatcaatgacttggacagcatttttgggccagtattgtcccccaagtctgttgctgttaatgctgaagaaaagtgggtccatttttctgatacatccccggaacatgttactccggagttgactccaagggaaaaagtggtgtccccaccagctacaccagacaacccagctgactccccagctccaggccctctcggccccccaggtcccacaggccccccagggcctcctgggcctcctcgcaatgtactatcgccgctcaatttagaagaagtccagaagaaagtcgctgagcagaccttcattaaagatgattacttagaaacaatctcatctcctaaagattttgggttgggacaaagagcaactccacctcccccaccaccacccacctacaggactgtggtttcgtcccccggacctggctcgggccctggtccggggaccaccagtggtgcatcatcccctgctcgaccagccactcctttggttccttgcagaagtaccactccacctccacctcctccccggcctccatcccggccaaagctacctccaggaaaacctggagttggagatgtgtccagaccttttagccctcccattcattcttccagccctcctccaatagcacccttagcgcgggctgaaagcacttcttcaatatcgtcaaccaattccttgagcgcagccaccactcccacagttgagaatgaacagccttccctcgtttggtttgacagaggaaagttttatttgacttttgaaggttcttccaggggacccagccccctaaccatgggagctcaggacactctccctgttgcagcagcatttacagaaacagtcaatgcctatttcaaaggagcagacccaagcaaatgtatcgttaagattaccggagaaatggtgttgtcatttcctgctggcatcaccagacactttgccaacaacccgtccccagctgctctgacttttcgggtgataaatttcagcaggttagaacacgtcctgccaaacccccaacttctctgctgtgataatacacaaaatgatgccaataccaaggaattctgggtaaacatgccaaatttgatgactcacctaaagaaagtgtctgaacaaaaaccccaggctacatattataacgttgacatgctcaaatatcaggtgtctgcccagggcattcagtccacacctctgaacctggcagtgaattggcgatgtgagccttcaagcactgacctgcgcatagattacaaatataatacagatgcaatgacgactgctgtggccctcaacaatgtgcagttcctggtccccatcgacggaggagtcaccaagctccaggcagtgctcccaccagcagtctggaatgctgaacaacagagaatattgtggaagattcctgatatctctcagaagtcagaaaatggaggggtgggttctttgttggcaagatttcagttatctgaaggcccaagcaaaccttctccattggttgtgcagttcacaagtgaaggaagcaccctttctggctgtgacattgaacttgttggagcagggtatcgattttcactcatcaagaaaaggtttgctgcaggaaaatacttggcagataactaatgaaatcttatgcaaggatttggaggattcatataatggagaactgatgtatgagaaacagattttaattttggtttgatgaaaacaaaccaatatctgcacttgggatatatcaggtggaaagtcaatgactttcatctgtgatttccctcacacactaccatgatgaccagtcctacagtatttacttctaggtgtaatattgttaatggttttaaaatgtaattattgtatttgtaaattgtactctcattccagtaaggcagttagacacttgagttttagcattttaccattcctgaaatggatgtaatttaaactgtggtatgtaaatttaatagtagtattgttgaatggcacaatgcttacagaggtagattgcattttgtcaatatataaaatttaaatataatattgatagctgtcataaagggggtgccacatattaaagaaacttaagtggaaccagaagaaaaagaaacaaacttacttttcttcaatgcttagtatgttttactctagtgctaaataaaaactctatcttcaaatgtttagtgggttaaattgagaaactatttcagaaaaaaattctaaggttacagcatattcaaagaaaagcattagttaccactttttaaaaagcttttttttcaaactgcaaatttcataaaaatgcaaactgtgtaaacagggcctcttatttttataacttgtgtaaaaagggaaagcaattcatatttaaagtttaagtatattaaattataatcaagagtaaagaagatgttgaagtcttaactacttgcccctctctacagtttcgcaaatgtggggattgctgaataatcagtcagactaaaaccaaaattgtgattttaagatttcaagactttccgtagttgaactggttaagaatttttgcttagttactctgaatagatgatcttactcatccagtatgggggaatgatacctcacgtcttcctctttacccacaggaatcaaaacgctgagactgagaattttagggaaaaaaaagtccactgtttagatccagaaggagagttttaatcattgtttatatcatttgagaatgaaaaaataagcttcataaatgaaattctattcacattactgtgtaataaatttccttttggatgattaggattcattgtataaaactgtaaatctttgccattcttggagaagcaaaaggagagttatcaaaaatgtatgtcgtttcatcgttgcaaggtataataaaaactgtaattattcaatctggccctgccatatgaacatttagaaagacaaacttcttcgggagtctcagttgtaaaaccttccctcattaatatctgaaaatgttagtcttcctttaagtcatagaacttatttaaacataaaccaatttctattacaggttatgctattaaatagctgtaattattaagttattatttttataattagttgttaaatttcattttacacccactcaaatttaacaaagaatctttagcccctttaaattttagaattaaattaaatttttaaagttttacttctaaaatgagattgtgactggcaattgtttatagtgaaactttttaaattaatctttgtactcctctatcagtgcttgctaccaagagaatgtccaaaatgatttgttttaccatgggaaaattcttactattcaacaaactctcagttggccccctacagcagtctggtgttgaagtttctttgaacgaactaaatatactcattttatgtaaaggtatccaatttgattttgaaaccaaaatagaaaatgcaaaattctaaattccatgaaacatggaatttatgacaccaaaatcaatggagagtaagcagcagcaaactgagaattatccagcatatgaatataacaatgtgtttttaagtaatcaattcatttaaaaaattgaatattaatacaaagcatattaaaaacatgtaaatatt

SEQ ID NO: 377200 - DNA, 4837 bp, Homo sapiens
agcggagtttgattccagagccccactcggcggacggaatagacctcagcagcggcgtggtgaggacttagctgggacctggaatcgtatcctcctgtgttttttcagactccttggaaattaaggaatgcaattctgccaccatgatggaaggattgaaaaaacgtacaaggaaggcctttggaatacggaagaaagaaaaggacactgattctacaggttcaccagatagagatggaattcaggggaaaaaaaagacccagaagactcagcttctcctcacctctttcttctggctcagagccctctcgttaactctgtctcagaagaaaagcaatggggcaccaaatggattttatgcggaaattgattgggaaagatataactcacctgagctggatgaagaaggctacagcatcagacccgaggaacccggctctaccaaaggaaagcacttttattcttcaagtgaatcggaagaagaagaagaatcacataagaaatttaatatcaagattaaaccattgcaatctaaagacattcttaagaatgctgcaactgtagatgaattgaaggcatcaataggcaacatcgcactttccccatcaccagtgaggaaaagtccgaggcgcagcccgggtgcaattaaaaggaacttatccagtgaagaagtggcaagacccaggcgttccacaccaactccagaacttataagcaaaaagcctccagatgacactacggcccttgctcctctctttggcccaccactagaatcagcttttgatgaacagaagacagaagttcttttagatcagcctgagatatggggttcaggccaaccaattaatccaagcatggagtcgccaaagttaacaaggccttttcccactggaacacctccaccactgcctccaaaaaatgtaccagctaccccaccccgaacaggatcccccttaacaattggaccaggtgcatcatcccctgctcgaccagccactcctttggttccttgcagaagtaccactccacctccacctcctccccggcctccatcccggccaaagctacctccaggaaaacctggagttggagatgtgtccagaccttttagccctcccattcattcttccagccctcctccaatagcacccttagcgcgggctgaaagcacttcttcaatatcgtcaaccaattccttgagcgcagccaccactcccacagttgtgtcagaagacgatgttttttatgacaaactgccctcgtttgaaaggcgctgtgaaacgcctgcagagaatgaacagccttccctcgtttggtttgacagaggaaagttttatttgacttttgaaggttcttccaggggacccagccccctaaccatgggagctcaggacactctccctgttgcagcagcatttacagaaacagtcaatgcctatttcaaaggagcagacccaagcaaatgtatcgttaagattaccggagaaatggtgttgtcatttcctgctggcatcaccagacactttgccaacaacccgtccccagctgctctgacttttcgggtgataaatttcagcaggttagaacacgtcctgccaaacccccaacttctctgctgtgataatacacaaaatgatgccaataccaaggaattctgggtaaacatgccaaatttgatgactcacctaaagaaagtgtctgaacaaaaaccccaggctacatattataacgttgacatgctcaaatatcaggtgtctgcccagggcattcagtccacacctctgaacctggcagtgaattggcgatgtgagccttcaagcactgacctgcgcatagattacaaatataatacagatgcaatgacgactgctgtggccctcaacaatgtgcagttcctggtccccatcgacggaggagtcaccaagctccaggcagtgctcccaccagcagtctggaatgctgaacaacagagaatattgtggaagattcctgatatctctcagaagtcagaaaatggaggggtgggttctttgttggcaagatttcagttatctgaaggcccaagcaaaccttctccattggttgtgcagttcacaagtgaaggaagcaccctttctggctgtgacattgaacttgttggagcagggtatcgattttcactcatcaagaaaaggtttgctgcaggaaaatacttggcagataactaatgaaatcttatgcaaggatttggaggattcatataatggagaactgatgtatgagaaacagattttaattttggtttgatgaaaacaaaccaatatctgcacttgggatatatcaggtggaaagtcaatgactttcatctgtgatttccctcacacactaccatgatgaccagtcctacagtatttacttctaggtgtaatattgttaatggttttaaaatgtaattattgtatttgtaaattgtactctcattccagtaaggcagttagacacttgagttttagcattttaccattcctgaaatggatgtaatttaaactgtggtatgtaaatttaatagtagtattgttgaatggcacaatgcttacagaggtagattgcattttgtcaatatataaaatttaaatataatattgatagctgtcataaagggggtgccacatattaaagaaacttaagtggaaccagaagaaaaagaaacaaacttacttttcttcaatgcttagtatgttttactctagtgctaaataaaaactctatcttcaaatgtttagtgggttaaattgagaaactatttcagaaaaaaattctaaggttacagcatattcaaagaaaagcattagttaccactttttaaaaagcttttttttcaaactgcaaatttcataaaaatgcaaactgtgtaaacagggcctcttatttttataacttgtgtaaaaagggaaagcaattcatatttaaagtttaagtatattaaattataatcaagagtaaagaagatgttgaagtcttaactacttgcccctctctacagtttcgcaaatgtggggattgctgaataatcagtcagactaaaaccaaaattgtgattttaagatttcaagactttccgtagttgaactggttaagaatttttgcttagttactctgaatagatgatcttactcatccagtatgggggaatgatacctcacgtcttcctctttacccacaggaatcaaaacgctgagactgagaattttagggaaaaaaaagtccactgtttagatccagaaggagagttttaatcattgtttatatcatttgagaatgaaaaaataagcttcataaatgaaattctattcacattactgtgtaataaatttccttttggatgattaggattcattgtataaaactgtaaatctttgccattcttggagaagcaaaaggagagttatcaaaaatgtatgtcgtttcatcgttgcaaggtataataaaaactgtaattattcaatctggccctgccatatgaacatttagaaagacaaacttcttcgggagtctcagttgtaaaaccttccctcattaatatctgaaaatgttagtcttcctttaagtcatagaacttatttaaacataaaccaatttctattacaggttatgctattaaatagctgtaattattaagttattatttttataattagttgttaaatttcattttacacccactcaaatttaacaaagaatctttagcccctttaaattttagaattaaattaaatttttaaagttttacttctaaaatgagattgtgactggcaattgtttatagtgaaactttttaaattaatctttgtactcctctatcagtgcttgctaccaagagaatgtccaaaatgatttgttttaccatgggaaaattcttactattcaacaaactctcagttggccccctacagcagtctggtgttgaagtttctttgaacgaactaaatatactcattttatgtaaaggtatccaatttgattttgaaaccaaaatagaaaatgcaaaattctaaattccatgaaacatggaatttatgacaccaaaatcaatggagagtaagcagcagcaaactgagaattatccagcatatgaatataacaatgtgtttttaagtaatcaattcatttaaaaaattgaatattaatacaaagcatattaaaaacatgtaaatattactggttctcatgtctttgtatttatattttattttgttttattttgtatagatctagaatgaattagtaattaaacacaagggtttttttcccaaaaaataattttactgatttttaaaaatttaattaaaaacatagattacagtaatctctaacattattcaaatctttctagggattaaattagaaactatgaagaaatcctataatctcttaactggtctttatggaacagaatgggagtcaacaatttcaaaatgattgaactatgagtaaccagaacctcaatagaaaatgtatcccttcacctttcagaaaagagatcaaataataacacaataagctggtatcagggatttgcattttgacattttgttgtttctttttaattttgtagattataatctcctgttacatctatatccacagtactgtagaataagaattcatgtcctgaaaatggtcccaggcaatgaaagagtctcagttatcaaagacattaagtcagattcatttattcattttattcccaagtcagaacaaaatgaactagtaggtaataaaactattttcagtactaggggttaaaacaaaaagaaattgttctagttaaccagaacaccatttcctgaacgttatg

SEQ ID NO: 377201 - DNA, 3688 bp, Homo sapiens
tttttcctgcacgctaatggcatgtagtgcctccacccttccctatagtgagattaatgacctgctctgtaactcacattgtgtccttctctctccctttccttaacccttcccatcccgcttcaactcctggccatacagagaatgaacagccttccctcgtttggtttgacagaggaaagttttatttgacttttgaaggttcttccaggggacccagccccctaaccatgggagctcaggacactctccctgttgcagcagcatttacagaaacagtcaatgcctatttcaaaggagcagacccaagcaaatgtatcgttaagattaccggagaaatggtgttgtcatttcctgctggcatcaccagacactttgccaacaacccgtccccagctgctctgacttttcgggtgataaatttcagcaggttagaacacgtcctgccaaacccccaacttctctgctgtgataatacacaaaatgatgccaataccaaggaattctgggtaaacatgccaaatttgatgactcacctaaagaaagtgtctgaacaaaaaccccaggctacatattataacgttgacatgctcaaatatcaggtgtctgcccagggcattcagtccacacctctgaacctggcagtgaattggcgatgtgagccttcaagcactgacctgcgcatagattacaaatataatacagatgcaatgacgactgctgtggccctcaacaatgtgcagttcctggtccccatcgacggaggagtcaccaagctccaggcagtgctcccaccagcagtctggaatgctgaacaacagagaatattgtggaagattcctgatatctctcagaagtcagaaaatggaggggtgggttctttgttggcaagatttcagttatctgaaggcccaagcaaaccttctccattggttgtgcagttcacaagtgaaggaagcaccctttctggctgtgacattgaacttgttggagcagggtatcgattttcactcatcaagaaaaggtttgctgcaggaaaatacttggcagataactaatgaaatcttatgcaaggatttggaggattcatataatggagaactgatgtatgagaaacagattttaattttggtttgatgaaaacaaaccaatatctgcacttgggatatatcaggtggaaagtcaatgactttcatctgtgatttccctcacacactaccatgatgaccagtcctacagtatttacttctaggtgtaatattgttaatggttttaaaatgtaattattgtatttgtaaattgtactctcattccagtaaggcagttagacacttgagttttagcattttaccattcctgaaatggatgtaatttaaactgtggtatgtaaatttaatagtagtattgttgaatggcacaatgcttacagaggtagattgcattttgtcaatatataaaatttaaatataatattgatagctgtcataaagggggtgccacatattaaagaaacttaagtggaaccagaagaaaaagaaacaaacttacttttcttcaatgcttagtatgttttactctagtgctaaataaaaactctatcttcaaatgtttagtgggttaaattgagaaactatttcagaaaaaaattctaaggttacagcatattcaaagaaaagcattagttaccactttttaaaaagcttttttttcaaactgcaaatttcataaaaatgcaaactgtgtaaacagggcctcttatttttataacttgtgtaaaaagggaaagcaattcatatttaaagtttaagtatattaaattataatcaagagtaaagaagatgttgaagtcttaactacttgcccctctctacagtttcgcaaatgtggggattgctgaataatcagtcagactaaaaccaaaattgtgattttaagatttcaagactttccgtagttgaactggttaagaatttttgcttagttactctgaatagatgatcttactcatccagtatgggggaatgatacctcacgtcttcctctttacccacaggaatcaaaacgctgagactgagaattttagggaaaaaaaagtccactgtttagatccagaaggagagttttaatcattgtttatatcatttgagaatgaaaaaataagcttcataaatgaaattctattcacattactgtgtaataaatttccttttggatgattaggattcattgtataaaactgtaaatctttgccattcttggagaagcaaaaggagagttatcaaaaatgtatgtcgtttcatcgttgcaaggtataataaaaactgtaattattcaatctggccctgccatatgaacatttagaaagacaaacttcttcgggagtctcagttgtaaaaccttccctcattaatatctgaaaatgttagtcttcctttaagtcatagaacttatttaaacataaaccaatttctattacaggttatgctattaaatagctgtaattattaagttattatttttataattagttgttaaatttcattttacacccactcaaatttaacaaagaatctttagcccctttaaattttagaattaaattaaatttttaaagttttacttctaaaatgagattgtgactggcaattgtttatagtgaaactttttaaattaatctttgtactcctctatcagtgcttgctaccaagagaatgtccaaaatgatttgttttaccatgggaaaattcttactattcaacaaactctcagttggccccctacagcagtctggtgttgaagtttctttgaacgaactaaatatactcattttatgtaaaggtatccaatttgattttgaaaccaaaatagaaaatgcaaaattctaaattccatgaaacatggaatttatgacaccaaaatcaatggagagtaagcagcagcaaactgagaattatccagcatatgaatataacaatgtgtttttaagtaatcaattcatttaaaaaattgaatattaatacaaagcatattaaaaacatgtaaatattactggttctcatgtctttgtatttatattttattttgttttattttgtatagatctagaatgaattagtaattaaacacaagggtttttttcccaaaaaataattttactgatttttaaaaatttaattaaaaacatagattacagtaatctctaacattattcaaatctttctagggattaaattagaaactatgaagaaatcctataatctcttaactggtctttatggaacagaatgggagtcaacaatttcaaaatgattgaactatgagtaaccagaacctcaatagaaaatgtatcccttcacctttcagaaaagagatcaaataataacacaataagctggtatcagggatttgcattttgacattttgttgtttctttttaattttgtagattataatctcctgttacatctatatccacagtactgtagaataagaattcatgtcctgaaaatggtcccaggcaatgaaagagtctcagttatcaaagacattaagtcagattcatttattcattttattcccaagtcagaacaaaatgaactagtaggtaataaaactattttcagtactaggggttaaaacaaaaagaaattgttctagttaaccagaacaccatttcctgaacgttatg

SEQ ID NO: 377202 - DNA, 2024 bp, Homo sapiens
agcggagtttgattccagagccccactcggcggacggaatagacctcagcagcggcgtggtgaggacttagctgggacctggaatcgtatcctcctgtgttttttcagactccttggaaattaaggaatgcaattctgccaccatgatggaaggattgaaaaaacgtacaaggaaggcctttggaatacggaagaaagaaaaggacactgattctacaggttcaccagatagagatggaattcaggggaaaaaaaagacccagaagactcagcttctcctcacctctttcttctggctcagagccctctcgttaactctgtctcagaagaaaagcaatggggcaccaaatggattttatgcggaaattgattgggaaagatataactcacctgagctggatgaagaaggctacagcatcagacccgaggaacccggctctaccaaaggaaagcacttttattcttcaagtgaatcggaagaagaagaagaatcacataagaaatttaatatcaagattaaaccattgcaatctaaagacattcttaagaatgctgcaactgtagatgaattgaaggcatcaataggcaacatcgcactttccccatcaccagtgaggaaaagtccgaggcgcagcccgggtgcaattaaaaggaacttatccagtgaagaagtggcaagacccaggcgttccacaccaactccagaacttataagcaaaaagcctccagatgacactacggcccttgctcctctctttggcccaccactagaatcagcttttgatgaacagaagacagaagttcttttagatcagcctgagatatggggttcaggccaaccaattaatccaagcatggagtcgccaaagttaacaaggccttttcccactggaacacctccaccactgcctccaaaaaatgtaccagctaccccaccccgaacaggatcccccttaacaattggaccaggtgcatcatcccctgctcgaccagccactcctttggttccttgcagaagtaccactccacctccacctcctccccggcctccatcccggccaaagctacctccaggaaaacctggagttggagatgtgtccagaccttttagccctcccattcattcttccagccctcctccaatagcacccttagcgcgggctgaaagcacttcttcaatatcgtcaaccaattccttgagcgcagccaccactcccacagttgtgtcagaagacgatgttttttatgacaaactgccctcgtttgaaaggcgctgtgaaacgcctgcaggtatggtgctagccaagtgatctctagagacctagattccaaaaatccaagccattatccatctgaatgctataaacttcatggacatgccctcacctcatgagtgtccagtgcctctcagatgcaccctgtatatttactgttcatcgtggaactcgtgccactgaaaatttttaagtgactatattcaaaaacagcaggttgcatgacagtttctcagtgaagaggttcaaaaaaggtgagatgctattgctttgtgaatttacaaaggaaagaataatttaactgctcagaattacatgtccggtcactgctttttaatttaaaaaataatagagcatcattagtaatcttgttttctctttgatacataggtaaagggtgttttgtgtctggatgcctaaggtgattccaggggaggggatggaagatatgtgacatcttccctgaaatttatattgatatgcaatgctttgtcatttaaaacctaagctaatgttttctacaatccataactctgagtttatctttttggaaacatagaaggggatgacattgaagatgaaatggatacagcaattgctgaatgacagtttgcccaaattagtgcagttaaaatatgctgacgcccctgcatggccaggaagacttctgctccatgcacacaagcaccaagtatcaagcgaccaccaacacattcccattcctttaggcctccatagctttgcttttgc

SEQ ID NO: 377203 - DNA, 1005 bp, Homo sapiens
cgaggcagcgcaggcggtgcagctcggccagcttgccgttcctctccctttctctcagcatcttcttggtagcctgcctgtaggtgaagaagcaccagcagcatccatggcctgtcttttggcttaacacttatctcctttggctttgacagcggacggaatagacctcagcagcggcgtggtgaggacttagctgggacctggaatcgtatcctcctgtgttttttcagactccttggaaattaaggaatgcaattctgccaccatgatggaaggattgaaaaaacgtacaaggaaggcctttggaatacggaagaaagaaaaggacactgattctacaggttcaccagatagagatggaattcagcccagcccacacgaaccaccctacaatagcaaagcagagtgtgcgcgtgaaggaggaaaaaaagtttcgaagaaaagcaatggggcaccaaatggattttatgcggaaattgattgggaaagatataactcacctgagctggatgaagaaggctacagcatcagacccgaggaacccggctctaccaaaggaaagcacttttattcttcaagtgaatcggaagaagaagaagaatcacataagaaatttaatatcaagattaaaccattgcaatctaaagacattcttaagaatgctgcaactgtagatgaattgaaggcatcaataggcaacatcgcactttccccatcaccagtggtgagtgttgtgtgtgtgtgtgttaagctttagtgagattgaacagggctatgttctgcctatatgcattaagtcaagtcagaaactccttaaattgaagcctgcatatggtcaccatatcatgaattctataaatctaagaagctcattctagcttgagaaaattgtacttattttatattgcagtccttgtgcttttcaaaaaggtgaaaaatatatggaaccacattttcttttgacttattttcctgcaagcattttaaaaagaaaaaaaaataaaa

SEQ ID NO: 377204 - DNA, 499 bp, Homo sapiens
aggtaaggggtttttcttcttcagaagacttacgatttaccctttcttcctctctataatctttgagtgaaataaaaaactgatttctgtgtgtgtatctacaatttcctacttaaatgcggttctgagaaaaagttcatttccctatctgcatttatttgagttcagtttaattgcaatgacagaaataatacatattgtacataacatatatgtggtcttaaaccttatagtgtctatttctaattctagggtgcaattaaaaggaacttatccagtaagtatatcttagctaccagaaatagtgtatgatttaaaagaaagaacagttccttggatcttggagtatatgtacatatgaattatacattcctgggcttaatttttaagacttacaatttttttacttttacagcaaagaattcttgtaatgatagagggcacttgtgggttctgagtgattaatgtttaagttctgaaaataaatatgtttttggaa

SEQ ID NO: 377205 - DNA, 4821 bp, Homo sapiens
cacagatgtgcacggaggccacagacactgacatttggaattccttcaggcggacggaatagacctcagcagcggcgtggtgaggacttagctgggacctggaatcgtatcctcctgtgttttttcagactccttggaaattaaggaatgcaattctgccaccatgatggaaggattgaaaaaacgtacaaggaaggcctttggaatacggaagaaagaaaaggacactgattctacaggttcaccagatagagatggaattcagcccagcccacacgaaccaccctacaatagcaaagcagagtgtgcgcgtgaaggaggaaaaaaagtttcgaagaaaagcaatggggcaccaaatggattttatgcggaaattgattgggaaagatataactcacctgagctggatgaagaaggctacagcatcagacccgaggaacccggctctaccaaaggaaagcacttttattcttcaagtgaatcggaagaagaagaagaatcacataagaaatttaatatcaagattaaaccattgcaatctaaagacattcttaagaatgctgcaactgtagatgaattgaaggcatcaataggcaacatcgcactttccccatcaccagtgggtgcaattaaaaggaacttatccagtgaagaagtggcaagacccaggcgttccacaccaactccagaacttataagcaaaaagcctccagatgacactacggcccttgctcctctctttggcccaccactagaatcagcttttgatgaacagaagacagaagttcttttagatcagcctgagatatggggttcaggccaaccaattaatccaagcatggagtcgccaaagttaacaaggccttttcccactggaacacctccaccactgcctccaaaaaatgtaccagctaccccaccccgaacaggatcccccttaacaattggaccaggtgcatcatcccctgctcgaccagccactcctttggttccttgcagaagtaccactccacctccacctcctccccggcctccatcccggccaaagctacctccaggaaaacctggagttggagatgtgtccagaccttttagccctcccattcattcttccagccctcctccaatagcacccttagcgcgggctgaaagcacttcttcaatatcgtcaaccaattccttgagcgcagccaccactcccacagttgtgtcagaagacgatgttttttatgacaaactgccctcgtttgaaaggcgctgtgaaacgcctgcagagaatgaacagccttccctcgtttggtttgacagaggaaagttttatttgacttttgaaggttcttccaggggacccagccccctaaccatgggagctcaggacactctccctgttgcagcagcatttacagaaacagtcaatgcctatttcaaaggagcagacccaagcaaatgtatcgttaagattaccggagaaatggtgttgtcatttcctgctggcatcaccagacactttgccaacaacccgtccccagctgctctgacttttcgggtgataaatttcagcaggttagaacacgtcctgccaaacccccaacttctctgctgtgataatacacaaaatgatgccaataccaaggaattctgggtaaacatgccaaatttgatgactcacctaaagaaagtgtctgaacaaaaaccccaggctacatattataacgttgacatgctcaaatatcaggtgtctgcccagggcattcagtccacacctctgaacctggcagtgaattggcgatgtgagccttcaagcactgacctgcgcatagattacaaatataatacagatgcaatgacgactgctgtggccctcaacaatgtgcagttcctggtccccatcgacggaggagtcaccaagctccaggcagtgctcccaccagcagtctggaatgctgaacaacagagaatattgtggaagattcctgatatctctcagaagtcagaaaatggaggggtgggttctttgttggcaagatttcagttatctgaaggcccaagcaaaccttctccattggttgtgcagttcacaagtgaaggaagcaccctttctggctgtgacattgaacttgttggagcagggtatcgattttcactcatcaagaaaaggtttgctgcaggaaaatacttggcagataactaatgaaatcttatgcaaggatttggaggattcatataatggagaactgatgtatgagaaacagattttaattttggtttgatgaaaacaaaccaatatctgcacttgggatatatcaggtggaaagtcaatgactttcatctgtgatttccctcacacactaccatgatgaccagtcctacagtatttacttctaggtgtaatattgttaatggttttaaaatgtaattattgtatttgtaaattgtactctcattccagtaaggcagttagacacttgagttttagcattttaccattcctgaaatggatgtaatttaaactgtggtatgtaaatttaatagtagtattgttgaatggcacaatgcttacagaggtagattgcattttgtcaatatataaaatttaaatataatattgatagctgtcataaagggggtgccacatattaaagaaacttaagtggaaccagaagaaaaagaaacaaacttacttttcttcaatgcttagtatgttttactctagtgctaaataaaaactctatcttcaaatgtttagtgggttaaattgagaaactatttcagaaaaaaattctaaggttacagcatattcaaagaaaagcattagttaccactttttaaaaagcttttttttcaaactgcaaatttcataaaaatgcaaactgtgtaaacagggcctcttatttttataacttgtgtaaaaagggaaagcaattcatatttaaagtttaagtatattaaattataatcaagagtaaagaagatgttgaagtcttaactacttgcccctctctacagtttcgcaaatgtggggattgctgaataatcagtcagactaaaaccaaaattgtgattttaagatttcaagactttccgtagttgaactggttaagaatttttgcttagttactctgaatagatgatcttactcatccagtatgggggaatgatacctcacgtcttcctctttacccacaggaatcaaaacgctgagactgagaattttagggaaaaaaaagtccactgtttagatccagaaggagagttttaatcattgtttatatcatttgagaatgaaaaaataagcttcataaatgaaattctattcacattactgtgtaataaatttccttttggatgattaggattcattgtataaaactgtaaatctttgccattcttggagaagcaaaaggagagttatcaaaaatgtatgtcgtttcatcgttgcaaggtataataaaaactgtaattattcaatctggccctgccatatgaacatttagaaagacaaacttcttcgggagtctcagttgtaaaaccttccctcattaatatctgaaaatgttagtcttcctttaagtcatagaacttatttaaacataaaccaatttctattacaggttatgctattaaatagctgtaattattaagttattatttttataattagttgttaaatttcattttacacccactcaaatttaacaaagaatctttagcccctttaaattttagaattaaattaaatttttaaagttttacttctaaaatgagattgtgactggcaattgtttatagtgaaactttttaaattaatctttgtactcctctatcagtgcttgctaccaagagaatgtccaaaatgatttgttttaccatgggaaaattcttactattcaacaaactctcagttggccccctacagcagtctggtgttgaagtttctttgaacgaactaaatatactcattttatgtaaaggtatccaatttgattttgaaaccaaaatagaaaatgcaaaattctaaattccatgaaacatggaatttatgacaccaaaatcaatggagagtaagcagcagcaaactgagaattatccagcatatgaatataacaatgtgtttttaagtaatcaattcatttaaaaaattgaatattaatacaaagcatattaaaaacatgtaaatattactggttctcatgtctttgtatttatattttattttgttttattttgtatagatctagaatgaattagtaattaaacacaagggtttttttcccaaaaaataattttactgatttttaaaaatttaattaaaaacatagattacagtaatctctaacattattcaaatctttctagggattaaattagaaactatgaagaaatcctataatctcttaactggtctttatggaacagaatgggagtcaacaatttcaaaatgattgaactatgagtaaccagaacctcaatagaaaatgtatcccttcacctttcagaaaagagatcaaataataacacaataagctggtatcagggatttgcattttgacattttgttgtttctttttaattttgtagattataatctcctgttacatctatatccacagtactgtagaataagaattcatgtcctgaaaatggtcccaggcaatgaaagagtctcagttatcaaagacattaagtcagattcatttattcattttattcccaagtcagaacaaaatgaactagtaggtaataaaactattttcagtactaggggttaaaacaaaaagaaattgttctagttaaccagaacaccatttcctgaacgttatg

SEQ ID NO: 377206 - DNA, 1582 bp, Homo sapiens
agcggagtttgattccagagccccactcggcggacggaatagacctcagcagcggcgtggtgaggacttagctgggacctggaatcgtatcctcctgtgttttttcagactccttggaaattaaggaatgcaattctgccaccatgatggaaggattgaaaaaacgtacaaggaaggcctttggaatacggaagaaagaaaaggacactgattctacaggttcaccagatagagatggaattcaggggaaaaaaaagacccagaagactcagcttctcctcacctctttcttctggctcagagccctctcgttaactctgtctcagaagaaaagcaatggggcaccaaatggattttatgcggaaattgattgggaaagatataactcacctgagctggatgaagaaggctacagcatcagacccgaggaacccggctctaccaaaggaaagcacttttattcttcaagtgaatcggaagaagaagaagaatcacataagaaatttaatatcaagattaaaccattgcaatctaaagacattcttaagaatgctgcaactgtagatgaattgaaggcatcaataggcaacatcgcactttccccatcaccagtgaggaaaagtccgaggcgcagcccgggtgcaattaaaaggaacttatccagtgaagaagtggcaagacccaggcgttccacaccaactccagaacttataagcaaaaagcctccagatgacactacggcccttgctcctctctttggcccaccactagaatcagcttttgatgaacagaagacagaagttcttttagatcagcctgagatatggggttcaggccaaccaattaatccaagcatggagtcgccaaagttaacaaggccttttcccactggaacacctccaccactgcctccaaaaaatgtaccagctaccccaccccgaacaggatcccccttaacaattggaccaggtgcatcatcccctgctcgaccagccactcctttggttccttgcagaagtaccactccacctccacctcctccccggcctccatcccggccaaagctacctccaggaaaacctggagttggagatgtgtccagaccttttagccctcccattcattcttccagccctcctccaatagcacccttagcgcgggctgaaagcacttcttcaatatcgtcaaccaattccttgagcgcagccaccactcccacagttggtaaaaattctctcctctcttttaatccgtttgtggttttgactggctattttttatgatctgaaatccccaaggccctgtgtttctggttgaaattgttttgctgtgtgttttgctactattacctgactcttcttttaaaaccaccttctcagcaaaggaggcaaagtgctttacctaagcaaatgaacaaataaaagaacattaacacctgtgttttgcaggaattttcttatgctgttccatacagagctattcaaaaaataagtaagaaatcgccaaggaaggtcttgtaatttagatattatttcttaaaataaaaatagtctcctttgaggggaaatgtttgtttaaattc

SEQ ID NO: 377207 - DNA, 400 bp, Homo sapiens
cgcccagggcctgcacagttggcgcccaccggcatcagcgtgaagggagctcctcgctggctgccgacggggctgcagggctcgctagccgctcacctgcgtgtgagcgcggagcccgcagtacccgccgtccgggctcagaggacgtgactccccgaccctgcgcccggcagtccccgggggccgtgcgcccggcccaggctcggaggtccagcccagcggcggctcaggctgcgcgcctggctcccagcctcagtttccccattggtaaagcattgacggtggttgcggacggcttctgcggacagagccttgggctccgacgtctgcgcgggtaccggcagcacccccaccccgaagggagggcgggacctggatctcgcgaccgctgccccaggtc

SEQ ID NO: 377208 - DNA, 1530 bp, Homo sapiens
  misc_feature (1466)..(1466): n is a, c, g, or t
  misc_feature (1469)..(1469): n is a, c, g, or t
ggcaggccccgccccccgcccacgaggaagtggctgctgctccggcgcggagcccagagccggttcggcgcgtcgactgcccagagtccgcggccggggcgcgggaggagccaagccgccatggcctaccacagcttcctggtggagcccatcagctgccacgcctggaacaaggaccgcacccagattgccatctgccccaacaaccatgaggtgcatatctatgaaaagagcggtgccaaatggaccaaggtgcacgagctcaaggagcacaacgggcaggtgacaggcatcgactgggcccccgagagtaaccgtattgtgacctgcggcacagaccgcaacgcctacgtgtggacgctgaagggccgcacatggaagcccacgctggtcatcctgcggatcaaccgggctgcccgctgcgtgcgctgggcccccaacgagaacaagtttgctgtgggcagcggctctcgtgtgatctccatctgttatttcgagcaggagaatgactggtgggtttgcaagcacatcaagaagcccatccgctccaccgtcctcagcctggactggcaccccaacaatgtgctgctggctgccggctcctgtgacttcaagtgtcggatcttttcagcctacatcaaggaggtggaggaacggccggcacccaccccgtggggctccaagatgccctttggggaactgatgttcgaatccagcagtagctgcggctgggtacatggcgtctgtttctcagccagcgggagccgcgtggcctgggtaagccacgacagcaccgtctgcctggctgatgccgacaagaagatggccgtcgcgactctggcctctgaaacactaccactgctggcgctgaccttcatcacagacaacagcctggtggcagcgggccacgactgcttcccggtgctgttcacctatgacgccgccgcggggatgctgagcttcggcgggcggctggacgttcctaagcagagctcgcagcgtggcttgacggcccgcgagcgcttccagaacctggacaagaaggcgagctccgagggtggcacggctgcgggcgcgggcctagactcgctgcacaagaacagcgtcagccagatctcggtgctcagcggcggcaaggccaagtgctcgcagttctgcaccactggcatggatggcggcatgagtatctgggatgtgaagagcttggagtcagccttgaaggacctcaagatcaaatgacctgtgaggaatatgttgccttcatcctagctgctggggaagcggggagaggggtcagggaggctaatggttgctttgctgaatgtttctggggtaccaatacgagttcccataggggctgctccctcaaaaagggaggggacagatggggagcttttcttacctattcaaggaatacgtgcctttttcttaaatgctttcatttattgaattgcacacacaaacanaanaaaaaaaccgcgcgtttttgggggggcggaaaagggttgaaggcctggcatgttcccgccc

SEQ ID NO: 377209 - DNA, 2321 bp, Homo sapiens
  misc_feature (2134)..(2134): n is a, c, g, or t
gttactcggactaccccgatgcatacaccaaatgaatgagcctacagatgataggatgtttccggcgcgtcgactgcccagagtccgcggccggggcgcgggaggagccaagccgccatggcctaccacagcttcctggtggagcccatcagctgccacgcctggaacaaggaccgcacccagattgccatctgccccaacaaccatgaggtgcatatctatgaaaagagcggtgccaaatggaccaaggtgcacgagctcaaggagcacaacgggcaggtgacaggcatcgactgggcccccgagagtaaccgtattgtgacctgcggcacagaccgcaacgcctacgtgtggacgctgaagggccgcacatggaagcccacgctggtcatcctgcggatcaaccgggctgcccgctgcgtgcgctgggcccccaacgagaacaagtttgctgtgggcagcggctctcgtgtgatctccatctgttatttcgagcaggagaatgactggtgggtttgcaagcacatcaagaagcccatccgctccaccgtcctcagcctggactggcaccccaacaatgtgctgctggctgccggctcctgtgacttcaagtgtcggatcttttcagcctacatcaaggaggtggaggaacggccggcacccaccccgtggggctccaagatgccctttggggaactgatgttcgaatccagcagtagctgcggctgggtacatggcgtctgtttctcagccagcgggagccgcgtggcctgggtaagccacgacagcaccgtctgcctggctgatgccgacaagaagatggccgtcgcgactctggcctctgaaacactaccactgctggcgctgaccttcatcacagacaacagcctggtggcagcgggccacgactgcttcccggtgctgttcacctatgacgccgccgcggggatgctgagcttcggcgggcggctggacgttcctaagcagagctcgcagcgtggcttgacggcccgcgagcgcttccagaacctggacaagaaggcgagctccgagggtggcacggctgcgggcgcgggcctagactcgctgcacaagaacagcgtcagccagatctcggtgctcagcggcggcaaggccaagtgctcgcagttctgcaccactggcatggatggcggcatgagtatctgggatgtgaagagcttggagtcagccttgaaggacctcaagatcaaatgacctgtgaggaatatgttgccttcatcctagctgctggggaagcggggagaggggtcagggaggctaatggttgctttgctgaatgtttctggggtaccaatacgagttcccataggggctgctccctcaaaaagggaggggacagatggggagcttttcttacctattcaaggaatacgtgcctttttcttaaatgctttcatttattgaaaaaaaaaaaatgcccccaaagcactatgctggtcatgaactgcttcaaaatgtggaggtaataaaatgcaactgtgtgtaaaaaacaaaaaaaaaaaaaaagtaattatggacatgcttgcctatgtggaaggagaggttttttgttatttccttggggtcttgctaagttttccaggctgcactagaactcgtgggagcaatccttctgcctcagcctcccaagtagctgggactccagggagagattggtgtttgcacggccataggtagatagcttatttttactgcttgccaacaaaattgatcctgaagcccaacggccttatgccaaatggttccctccccactgctgtccatcctgggctgccactcccaaaactgccagtaccaggtgtcactgattgactagtcaaattcctggacaaaggggctacacactccaggctggttgtggaacttttgttttgagatggagttttgctcgtcacccaggctggagtgcagttgtgcgttctcagctcactgccacctctgccttcctgggatcaagcgattctcctgcctcagcctcccaagtagctgggattacaggcatacaccaccaagcctggttaatttacctctactttgcctatcccggtaggatcttttcagcctacatcaaggaggtggaggaacggccggnacccaccccgtggggctccaagatgccctttggggaactaatgttcgaatccagcagtagctgcggctgggtacatggcgtctgtttctcagccagcgggagccgcgtggcctgggtaagccacgacagcaccgtctacctggctgatgccgacaagaagatggcgtgagtcgaggccatccccagg

SEQ ID NO: 377210 - DNA, 2300 bp, Homo sapiens
  misc_feature (9)..(10): n is a, c, g, or t
  misc_feature (2113)..(2113): n is a, c, g, or t
tccaggggnncacaactataggctaggtacgaggctgggtggtgggcgcgtcgactgcccagagtccgcggccggggcgcggggagccaagccgccatggcctaccacagcttcctggtggagcccatcagctgccacgcctggaacaaggaccgcacccagattgccatctgccccaacaaccatgaggtgcatatctatgaaaagagcggtgccaaatggaccaaggtgcacgagctcaaggagcacaacgggcaggtgacaggcatcgactgggcccccgagagtaaccgtattgtgacctgcggcacagaccgcaacgcctacgtgtggacgctgaagggccgcacatggaagcccacgctggtcatcctgcggatcaaccgggctgcccgctgcgtgcgctgggcccccaacgagaacaagtttgctgtgggcagcggctctcgtgtgatctccatctgttatttcgagcaggagaatgactggtgggtttgcaagcacatcaagaagcccatccgctccaccgtcctcagcctggactggcaccccaacaatgtgctgctggctgccggctcctgtgacttcaagtgtcggatcttttcagcctacatcaaggaggtggaggaacggccggcacccaccccgtggggctccaagatgccctttggggaactgatgttcgaatccagcagtagctgcggctgggtacatggcgtctgtttctcagccagcgggagccgcgtggcctgggtaagccacgacagcaccgtctgcctggctgatgccgacaagaagatggccgtcgcgactctggcctctgaaacactaccactgctggcgctgaccttcatcacagacaacagcctggtggcagcgggccacgactgcttcccggtgctgttcacctatgacgccgccgcggggatgctgagcttcggcgggcggctggacgttcctaagcagagctcgcagcgtggcttgacggcccgcgagcgcttccagaacctggacaagaaggcgagctccgagggtggcacggctgcgggcgcgggcctagactcgctgcacaagaacagcgtcagccagatctcggtgctcagcggcggcaaggccaagtgctcgcagttctgcaccactggcatggatggcggcatgagtatctgggatgtgaagagcttggagtcagccttgaaggacctcaagatcaaatgacctgtgaggaatatgttgccttcatcctagctgctggggaagcggggagaggggtcagggaggctaatggttgctttgctgaatgtttctggggtaccaatacgagttcccataggggctgctccctcaaaaagggaggggacagatggggagcttttcttacctattcaaggaatacgtgcctttttcttaaatgctttcatttattgaaaaaaaaaaaatgcccccaaagcactatgctggtcatgaactgcttcaaaatgtggaggtaataaaatgcaactgtgtgtaaaaaacaaaaaaaaaaaaaaagtaattatggacatgcttgcctatgtggaaggagaggttttttgttatttccttggggtcttgctaagttttccaggctgcactagaactcgtgggagcaatccttctgcctcagcctcccaagtagctgggactccagggagagattggtgtttgcacggccataggtagatagcttatttttactgcttgccaacaaaattgatcctgaagcccaacggccttatgccaaatggttccctccccactgctgtccatcctgggctgccactcccaaaactgccagtaccaggtgtcactgattgactagtcaaattcctggacaaaggggctacacactccaggctggttgtggaacttttgttttgagatggagttttgctcgtcacccaggctggagtgcagttgtgcgttctcagctcactgccacctctgccttcctgggatcaagcgattctcctgcctcagcctcccaagtagctgggattacaggcatacaccaccaagcctggttaatttacctctactttgcctatcccggtaggatcttttcagcctacatcaaggaggtggaggaacggccggnacccaccccgtggggctccaagatgccctttggggaactaatgttcgaatccagcagtagctgcggctgggtacatggcgtctgtttctcagccagcgggagccgcgtggcctgggtaagccacgacagcaccgtctacctggctgatgccgacaagaagatggcgtgagtcgaggccatccccagg

SEQ ID NO: 377211 - DNA, 2442 bp, Homo sapiens
  misc_feature (2255)..(2255): n is a, c, g, or t
ggcaggccccgccccccgcccacgaggaagtggctgctgctccggcgcggagcccagagccggttcggcgcgtcgactgcccagagtccgcggccggggcgcgggagtgtcttgttctgttgcccaggctggagtgtggtgacactaccttgactcactgcagcatctgcctcccgggttccagtgattctcctgcctcagcctctcaggtagctgggattacaggagccaagccgccatggcctaccacagcttcctggtggagcccatcagctgccacgcctggaacaaggaccgcacccagattgccatctgccccaacaaccatgaggtgcatatctatgaaaagagcggtgccaaatggaccaaggtgcacgagctcaaggagcacaacgggcaggtgacaggcatcgactgggcccccgagagtaaccgtattgtgacctgcggcacagaccgcaacgcctacgtgtggacgctgaagggccgcacatggaagcccacgctggtcatcctgcggatcaaccgggctgcccgctgcgtgcgctgggcccccaacgagaacaagtttgctgtgggcagcggctctcgtgtgatctccatctgttatttcgagcaggagaatgactggtgggtttgcaagcacatcaagaagcccatccgctccaccgtcctcagcctggactggcaccccaacaatgtgctgctggctgccggctcctgtgacttcaagtgtcggatcttttcagcctacatcaaggaggtggaggaacggccggcacccaccccgtggggctccaagatgccctttggggaactgatgttcgaatccagcagtagctgcggctgggtacatggcgtctgtttctcagccagcgggagccgcgtggcctgggtaagccacgacagcaccgtctgcctggctgatgccgacaagaagatggccgtcgcgactctggcctctgaaacactaccactgctggcgctgaccttcatcacagacaacagcctggtggcagcgggccacgactgcttcccggtgctgttcacctatgacgccgccgcggggatgctgagcttcggcgggcggctggacgttcctaagcagagctcgcagcgtggcttgacggcccgcgagcgcttccagaacctggacaagaaggcgagctccgagggtggcacggctgcgggcgcgggcctagactcgctgcacaagaacagcgtcagccagatctcggtgctcagcggcggcaaggccaagtgctcgcagttctgcaccactggcatggatggcggcatgagtatctgggatgtgaagagcttggagtcagccttgaaggacctcaagatcaaatgacctgtgaggaatatgttgccttcatcctagctgctggggaagcggggagaggggtcagggaggctaatggttgctttgctgaatgtttctggggtaccaatacgagttcccataggggctgctccctcaaaaagggaggggacagatggggagcttttcttacctattcaaggaatacgtgcctttttcttaaatgctttcatttattgaaaaaaaaaaaatgcccccaaagcactatgctggtcatgaactgcttcaaaatgtggaggtaataaaatgcaactgtgtgtaaaaaacaaaaaaaaaaaaaaagtaattatggacatgcttgcctatgtggaaggagaggttttttgttatttccttggggtcttgctaagttttccaggctgcactagaactcgtgggagcaatccttctgcctcagcctcccaagtagctgggactccagggagagattggtgtttgcacggccataggtagatagcttatttttactgcttgccaacaaaattgatcctgaagcccaacggccttatgccaaatggttccctccccactgctgtccatcctgggctgccactcccaaaactgccagtaccaggtgtcactgattgactagtcaaattcctggacaaaggggctacacactccaggctggttgtggaacttttgttttgagatggagttttgctcgtcacccaggctggagtgcagttgtgcgttctcagctcactgccacctctgccttcctgggatcaagcgattctcctgcctcagcctcccaagtagctgggattacaggcatacaccaccaagcctggttaatttacctctactttgcctatcccggtaggatcttttcagcctacatcaaggaggtggaggaacggccggnacccaccccgtggggctccaagatgccctttggggaactaatgttcgaatccagcagtagctgcggctgggtacatggcgtctgtttctcagccagcgggagccgcgtggcctgggtaagccacgacagcaccgtctacctggctgatgccgacaagaagatggcgtgagtcgaggccatccccagg

SEQ ID NO: 377212 - DNA, 2250 bp, Homo sapiens
  misc_feature (20)..(20): n is a, c, g, or t
  misc_feature (2063)..(2063): n is a, c, g, or t
acccttttttgaagcccatngccggggcgcggggagccaagccgccatggcctaccacagcttcctggtggagcccatcagctgccacgcctggaacaaggaccgcacccagattgccatctgccccaacaaccatgaggtgcatatctatgaaaagagcggtgccaaatggaccaaggtgcacgagctcaaggagcacaacgggcaggtgacaggcatcgactgggcccccgagagtaaccgtattgtgacctgcggcacagaccgcaacgcctacgtgtggacgctgaagggccgcacatggaagcccacgctggtcatcctgcggatcaaccgggctgcccgctgcgtgcgctgggcccccaacgagaacaagtttgctgtgggcagcggctctcgtgtgatctccatctgttatttcgagcaggagaatgactggtgggtttgcaagcacatcaagaagcccatccgctccaccgtcctcagcctggactggcaccccaacaatgtgctgctggctgccggctcctgtgacttcaagtgtcggatcttttcagcctacatcaaggaggtggaggaacggccggcacccaccccgtggggctccaagatgccctttggggaactgatgttcgaatccagcagtagctgcggctgggtacatggcgtctgtttctcagccagcgggagccgcgtggcctgggtaagccacgacagcaccgtctgcctggctgatgccgacaagaagatggccgtcgcgactctggcctctgaaacactaccactgctggcgctgaccttcatcacagacaacagcctggtggcagcgggccacgactgcttcccggtgctgttcacctatgacgccgccgcggggatgctgagcttcggcgggcggctggacgttcctaagcagagctcgcagcgtggcttgacggcccgcgagcgcttccagaacctggacaagaaggcgagctccgagggtggcacggctgcgggcgcgggcctagactcgctgcacaagaacagcgtcagccagatctcggtgctcagcggcggcaaggccaagtgctcgcagttctgcaccactggcatggatggcggcatgagtatctgggatgtgaagagcttggagtcagccttgaaggacctcaagatcaaatgacctgtgaggaatatgttgccttcatcctagctgctggggaagcggggagaggggtcagggaggctaatggttgctttgctgaatgtttctggggtaccaatacgagttcccataggggctgctccctcaaaaagggaggggacagatggggagcttttcttacctattcaaggaatacgtgcctttttcttaaatgctttcatttattgaaaaaaaaaaaatgcccccaaagcactatgctggtcatgaactgcttcaaaatgtggaggtaataaaatgcaactgtgtgtaaaaaacaaaaaaaaaaaaaaagtaattatggacatgcttgcctatgtggaaggagaggttttttgttatttccttggggtcttgctaagttttccaggctgcactagaactcgtgggagcaatccttctgcctcagcctcccaagtagctgggactccagggagagattggtgtttgcacggccataggtagatagcttatttttactgcttgccaacaaaattgatcctgaagcccaacggccttatgccaaatggttccctccccactgctgtccatcctgggctgccactcccaaaactgccagtaccaggtgtcactgattgactagtcaaattcctggacaaaggggctacacactccaggctggttgtggaacttttgttttgagatggagttttgctcgtcacccaggctggagtgcagttgtgcgttctcagctcactgccacctctgccttcctgggatcaagcgattctcctgcctcagcctcccaagtagctgggattacaggcatacaccaccaagcctggttaatttacctctactttgcctatcccggtaggatcttttcagcctacatcaaggaggtggaggaacggccggnacccaccccgtggggctccaagatgccctttggggaactaatgttcgaatccagcagtagctgcggctgggtacatggcgtctgtttctcagccagcgggagccgcgtggcctgggtaagccacgacagcaccgtctacctggctgatgccgacaagaagatggcgtgagtcgaggccatccccagg

SEQ ID NO: 377213 - DNA, 2551 bp, Homo sapiens
  misc_feature (2364)..(2364): n is a, c, g, or t
cgcccagggcctgcacagttggcgcccaccggcatcagcgtgaagggagctcctcgctggctgccgacggggctgcagggctcgctagccgctcacctgcgtgtgagcgcggagcccgcagtacccgccgtccgggctcagaggacgtgactccccgaccctgcgcccggcagtccccgggggccgtgcgcccggcccaggctcggaggtccagcccagcggcggctcaggctgcgcgcctggctcccagcctcagtttccccattggtaaagcattgacggtggttgcggacggcttctgcggacagagccttgggctccgacgtctgcgcgggagccaagccgccatggcctaccacagcttcctggtggagcccatcagctgccacgcctggaacaaggaccgcacccagattgccatctgccccaacaaccatgaggtgcatatctatgaaaagagcggtgccaaatggaccaaggtgcacgagctcaaggagcacaacgggcaggtgacaggcatcgactgggcccccgagagtaaccgtattgtgacctgcggcacagaccgcaacgcctacgtgtggacgctgaagggccgcacatggaagcccacgctggtcatcctgcggatcaaccgggctgcccgctgcgtgcgctgggcccccaacgagaacaagtttgctgtgggcagcggctctcgtgtgatctccatctgttatttcgagcaggagaatgactggtgggtttgcaagcacatcaagaagcccatccgctccaccgtcctcagcctggactggcaccccaacaatgtgctgctggctgccggctcctgtgacttcaagtgtcggatcttttcagcctacatcaaggaggtggaggaacggccggcacccaccccgtggggctccaagatgccctttggggaactgatgttcgaatccagcagtagctgcggctgggtacatggcgtctgtttctcagccagcgggagccgcgtggcctgggtaagccacgacagcaccgtctgcctggctgatgccgacaagaagatggccgtcgcgactctggcctctgaaacactaccactgctggcgctgaccttcatcacagacaacagcctggtggcagcgggccacgactgcttcccggtgctgttcacctatgacgccgccgcggggatgctgagcttcggcgggcggctggacgttcctaagcagagctcgcagcgtggcttgacggcccgcgagcgcttccagaacctggacaagaaggcgagctccgagggtggcacggctgcgggcgcgggcctagactcgctgcacaagaacagcgtcagccagatctcggtgctcagcggcggcaaggccaagtgctcgcagttctgcaccactggcatggatggcggcatgagtatctgggatgtgaagagcttggagtcagccttgaaggacctcaagatcaaatgacctgtgaggaatatgttgccttcatcctagctgctggggaagcggggagaggggtcagggaggctaatggttgctttgctgaatgtttctggggtaccaatacgagttcccataggggctgctccctcaaaaagggaggggacagatggggagcttttcttacctattcaaggaatacgtgcctttttcttaaatgctttcatttattgaaaaaaaaaaaatgcccccaaagcactatgctggtcatgaactgcttcaaaatgtggaggtaataaaatgcaactgtgtgtaaaaaacaaaaaaaaaaaaaaagtaattatggacatgcttgcctatgtggaaggagaggttttttgttatttccttggggtcttgctaagttttccaggctgcactagaactcgtgggagcaatccttctgcctcagcctcccaagtagctgggactccagggagagattggtgtttgcacggccataggtagatagcttatttttactgcttgccaacaaaattgatcctgaagcccaacggccttatgccaaatggttccctccccactgctgtccatcctgggctgccactcccaaaactgccagtaccaggtgtcactgattgactagtcaaattcctggacaaaggggctacacactccaggctggttgtggaacttttgttttgagatggagttttgctcgtcacccaggctggagtgcagttgtgcgttctcagctcactgccacctctgccttcctgggatcaagcgattctcctgcctcagcctcccaagtagctgggattacaggcatacaccaccaagcctggttaatttacctctactttgcctatcccggtaggatcttttcagcctacatcaaggaggtggaggaacggccggnacccaccccgtggggctccaagatgccctttggggaactaatgttcgaatccagcagtagctgcggctgggtacatggcgtctgtttctcagccagcgggagccgcgtggcctgggtaagccacgacagcaccgtctacctggctgatgccgacaagaagatggcgtgagtcgaggccatccccagg

SEQ ID NO: 377214 - DNA, 2292 bp, Homo sapiens
  misc_feature (25)..(25): n is a, c, g, or t
  misc_feature (30)..(30): n is a, c, g, or t
  misc_feature (37)..(37): n is a, c, g, or t
  misc_feature (39)..(39): n is a, c, g, or t
  misc_feature (397)..(397): n is a, c, g, or t
  misc_feature (2105)..(2105): n is a, c, g, or t
tttttttaagaaaaaggccaggttnaatcngccaaananacaagttgaatttgtggagcatgttttgcctgggtgccacacagtaaacagaggtttcttgaaatgatcaatgggtagggctgaaaatgggcactggccctagccaggtgagtaggaaccgggcagggaagggcagagaggtgaggccctgaggtcagtcagacaggactgaccagggacaagccatgaccctcgaggacccaggggcacaggctcccagatgatagcccctctctgaatgagcacccaggcaacacagtccggggctgtgtgtagcaaacctgtcagcagctgcctcctgggacaaccacccccttacatgctatctatctaccagacaaatgaaagctcttctcgnacgcgtgggtcgacccacgcgtcgactgtgggcagcggctctcgtgtgatctccatctgttatttcgagcaggagaatgactggtgggtttgcaagcacatcaagaagcccatccgctccaccgtcctcagcctggactggcaccccaacaatgtgctgctggctgccggctcctgtgacttcaagtgtcggatcttttcagcctacatcaaggaggtggaggaacggccggcacccaccccgtggggctccaagatgccctttggggaactgatgttcgaatccagcagtagctgcggctgggtacatggcgtctgtttctcagccagcgggagccgcgtggcctgggtaagccacgacagcaccgtctgcctggctgatgccgacaagaagatggccgtcgcgactctggcctctgaaacactaccactgctggcgctgaccttcatcacagacaacagcctggtggcagcgggccacgactgcttcccggtgctgttcacctatgacgccgccgcggggatgctgagcttcggcgggcggctggacgttcctaagcagagctcgcagcgtggcttgacggcccgcgagcgcttccagaacctggacaagaaggcgagctccgagggtggcacggctgcgggcgcgggcctagactcgctgcacaagaacagcgtcagccagatctcggtgctcagcggcggcaaggccaagtgctcgcagttctgcaccactggcatggatggcggcatgagtatctgggatgtgaagagcttggagtcagccttgaaggacctcaagatcaaatgacctgtgaggaatatgttgccttcatcctagctgctggggaagcggggagaggggtcagggaggctaatggttgctttgctgaatgtttctggggtaccaatacgagttcccataggggctgctccctcaaaaagggaggggacagatggggagcttttcttacctattcaaggaatacgtgcctttttcttaaatgctttcatttattgaaaaaaaaaaaatgcccccaaagcactatgctggtcatgaactgcttcaaaatgtggaggtaataaaatgcaactgtgtgtaaaaaacaaaaaaaaaaaaaaagtaattatggacatgcttgcctatgtggaaggagaggttttttgttatttccttggggtcttgctaagttttccaggctgcactagaactcgtgggagcaatccttctgcctcagcctcccaagtagctgggactccagggagagattggtgtttgcacggccataggtagatagcttatttttactgcttgccaacaaaattgatcctgaagcccaacggccttatgccaaatggttccctccccactgctgtccatcctgggctgccactcccaaaactgccagtaccaggtgtcactgattgactagtcaaattcctggacaaaggggctacacactccaggctggttgtggaacttttgttttgagatggagttttgctcgtcacccaggctggagtgcagttgtgcgttctcagctcactgccacctctgccttcctgggatcaagcgattctcctgcctcagcctcccaagtagctgggattacaggcatacaccaccaagcctggttaatttacctctactttgcctatcccggtaggatcttttcagcctacatcaaggaggtggaggaacggccggnacccaccccgtggggctccaagatgccctttggggaactaatgttcgaatccagcagtagctgcggctgggtacatggcgtctgtttctcagccagcgggagccgcgtggcctgggtaagccacgacagcaccgtctacctggctgatgccgacaagaagatggcgtgagtcgaggccatccccagg

SEQ ID NO: 377215 - DNA, 2513 bp, Homo sapiens
  misc_feature (2326)..(2326): n is a, c, g, or t
ggcaggccccgccccccgcccacgaggaagtggctgctgctccggcgcggagcccagagccggttcggcgcgtcgactgcccagagtccgcggccggggcgcgggaggagccaagccgccatggcctaccacagcttcctggtggagcccatcagctgccacgcctggaacaaggaccgcacccagattgccatctgccccaacaaccatgaggtgcatatctatgaaaagagcggtgccaaatggaccaaggtgcacgagctcaaggagcacaacgggcaggtgacaggcatcgactgggcccccgagagtaaccgtattgtgacctgcggcacagaccgcaacgcctacgtgtggacgctgaagggccgcacatggaagcccacgctggtcatcctgcggatcaaccgggctgcccgctgcgtgcgctgggcccccaacgagaacaagtttgctgtgggcagcggctctcgtgtgatctccatctgttatttcgagcaggagaatgactgatggagtctcactctgtcacccaggctggagtgcagtggcacgatcttggctcacggcagcctctgcctgccgggttcgagcagttctctgcctcagcctcccaagtagctgggattacaggcacctgctaccatgcccggataatttttatatttttagtagagatggggtttcaccatcttggccaggtgggtttgcaagcacatcaagaagcccatccgctccaccgtcctcagcctggactggcaccccaacaatgtgctgctggctgccggctcctgtgacttcaagtgtcggatcttttcagcctacatcaaggaggtggaggaacggccggcacccaccccgtggggctccaagatgccctttggggaactgatgttcgaatccagcagtagctgcggctgggtacatggcgtctgtttctcagccagcgggagccgcgtggcctgggtaagccacgacagcaccgtctgcctggctgatgccgacaagaagatggccgtcgcgactctggcctctgaaacactaccactgctggcgctgaccttcatcacagacaacagcctggtggcagcgggccacgactgcttcccggtgctgttcacctatgacgccgccgcggggatgctgagcttcggcgggcggctggacgttcctaagcagagctcgcagcgtggcttgacggcccgcgagcgcttccagaacctggacaagaaggcgagctccgagggtggcacggctgcgggcgcgggcctagactcgctgcacaagaacagcgtcagccagatctcggtgctcagcggcggcaaggccaagtgctcgcagttctgcaccactggcatggatggcggcatgagtatctgggatgtgaagagcttggagtcagccttgaaggacctcaagatcaaatgacctgtgaggaatatgttgccttcatcctagctgctggggaagcggggagaggggtcagggaggctaatggttgctttgctgaatgtttctggggtaccaatacgagttcccataggggctgctccctcaaaaagggaggggacagatggggagcttttcttacctattcaaggaatacgtgcctttttcttaaatgctttcatttattgaaaaaaaaaaaatgcccccaaagcactatgctggtcatgaactgcttcaaaatgtggaggtaataaaatgcaactgtgtgtaaaaaacaaaaaaaaaaaaaaagtaattatggacatgcttgcctatgtggaaggagaggttttttgttatttccttggggtcttgctaagttttccaggctgcactagaactcgtgggagcaatccttctgcctcagcctcccaagtagctgggactccagggagagattggtgtttgcacggccataggtagatagcttatttttactgcttgccaacaaaattgatcctgaagcccaacggccttatgccaaatggttccctccccactgctgtccatcctgggctgccactcccaaaactgccagtaccaggtgtcactgattgactagtcaaattcctggacaaaggggctacacactccaggctggttgtggaacttttgttttgagatggagttttgctcgtcacccaggctggagtgcagttgtgcgttctcagctcactgccacctctgccttcctgggatcaagcgattctcctgcctcagcctcccaagtagctgggattacaggcatacaccaccaagcctggttaatttacctctactttgcctatcccggtaggatcttttcagcctacatcaaggaggtggaggaacggccggnacccaccccgtggggctccaagatgccctttggggaactaatgttcgaatccagcagtagctgcggctgggtacatggcgtctgtttctcagccagcgggagccgcgtggcctgggtaagccacgacagcaccgtctacctggctgatgccgacaagaagatggcgtgagtcgaggccatccccagg

SEQ ID NO: 377216 - DNA, 1698 bp, Homo sapiens
  misc_feature (9)..(9): n is a, c, g, or t
  misc_feature (19)..(19): n is a, c, g, or t
  misc_feature (1511)..(1511): n is a, c, g, or t
aaaacatangcagtagagnctgggttaggagccggcacccaccccgtggggctccaagatgccctttggggaactgatgttcgaatccagcagtagctgcggctgggtacatggcgtctgtttctcagccagcgggagccgcgtggcctgggtaagccacgacagcaccgtctgcctggctgatgccgacaagaagatggccgtcgcgactctggcctctgaaacactaccactgctggcgctgaccttcatcacagacaacagcctggtggcagcgggccacgactgcttcccggtgctgttcacctatgacgccgccgcggggatgctgagcttcggcgggcggctggacgttcctaagcagagctcgcagcgtggcttgacggcccgcgagcgcttccagaacctggacaagaaggcgagctccgagggtggcacggctgcgggcgcgggcctagactcgctgcacaagaacagcgtcagccagatctcggtgctcagcggcggcaaggccaagtgctcgcagttctgcaccactggcatggatggcggcatgagtatctgggatgtgaagagcttggagtcagccttgaaggacctcaagatcaaatgacctgtgaggaatatgttgccttcatcctagctgctggggaagcggggagaggggtcagggaggctaatggttgctttgctgaatgtttctggggtaccaatacgagttcccataggggctgctccctcaaaaagggaggggacagatggggagcttttcttacctattcaaggaatacgtgcctttttcttaaatgctttcatttattgaaaaaaaaaaaatgcccccaaagcactatgctggtcatgaactgcttcaaaatgtggaggtaataaaatgcaactgtgtgtaaaaaacaaaaaaaaaaaaaaagtaattatggacatgcttgcctatgtggaaggagaggttttttgttatttccttggggtcttgctaagttttccaggctgcactagaactcgtgggagcaatccttctgcctcagcctcccaagtagctgggactccagggagagattggtgtttgcacggccataggtagatagcttatttttactgcttgccaacaaaattgatcctgaagcccaacggccttatgccaaatggttccctccccactgctgtccatcctgggctgccactcccaaaactgccagtaccaggtgtcactgattgactagtcaaattcctggacaaaggggctacacactccaggctggttgtggaacttttgttttgagatggagttttgctcgtcacccaggctggagtgcagttgtgcgttctcagctcactgccacctctgccttcctgggatcaagcgattctcctgcctcagcctcccaagtagctgggattacaggcatacaccaccaagcctggttaatttacctctactttgcctatcccggtaggatcttttcagcctacatcaaggaggtggaggaacggccggnacccaccccgtggggctccaagatgccctttggggaactaatgttcgaatccagcagtagctgcggctgggtacatggcgtctgtttctcagccagcgggagccgcgtggcctgggtaagccacgacagcaccgtctacctggctgatgccgacaagaagatggcgtgagtcgaggccatccccagg

SEQ ID NO: 377217 - DNA, 2190 bp, Homo sapiens
  misc_feature (2003)..(2003): n is a, c, g, or t
ggcaggccccgccccccgcccacgaggaagtggctgctgctccggcgcggagcccagagccggttcggcgcgtcgactgcccagagtccgcggccggggcgcgggaggagccaagccgccatggcctaccacagcttcctggtggagcccatcagctgccacgcctggaacaaggaccgcacccagattgccatctgccccaacaaccatgaggtgcatatctatgaaaagagcggtgccaaatggaccaaggtgcacgagctcaaggagcacaacgggcaggtgacaggcatcgactgggcccccgagagtaaccgtattgtgacctgcggcacagaccgcaacgcctacgtgtggacgctgaagggccgcacatggaagcccacgctggtcatcctgcggatcaaccgggctgcccgctgcgtgcgctgggcccccaacgagaacaagtttgctgtgggcagcggctctcgtgtgatctccatctgttatttcgagcaggagaatgactggtgggtttgcaagcacatcaagaagcccatccgctccaccgtcctcagcctggactggcaccccaacaatgtgctgctggctgccggctcctgtgacttcaagtgtcgccagcgggagccgcgtggcctgggtaagccacgacagcaccgtctgcctggctgatgccgacaagaagatggccgtcgcgactctggcctctgaaacactaccactgctggcgctgaccttcatcacagacaacagcctggtggcagcgggccacgactgcttcccggtgctgttcacctatgacgccgccgcggggatgctgagcttcggcgggcggctggacgttcctaagcagagctcgcagcgtggcttgacggcccgcgagcgcttccagaacctggacaagaaggcgagctccgagggtggcacggctgcgggcgcgggcctagactcgctgcacaagaacagcgtcagccagatctcggtgctcagcggcggcaaggccaagtgctcgcagttctgcaccactggcatggatggcggcatgagtatctgggatgtgaagagcttggagtcagccttgaaggacctcaagatcaaatgacctgtgaggaatatgttgccttcatcctagctgctggggaagcggggagaggggtcagggaggctaatggttgctttgctgaatgtttctggggtaccaatacgagttcccataggggctgctccctcaaaaagggaggggacagatggggagcttttcttacctattcaaggaatacgtgcctttttcttaaatgctttcatttattgaaaaaaaaaaaatgcccccaaagcactatgctggtcatgaactgcttcaaaatgtggaggtaataaaatgcaactgtgtgtaaaaaacaaaaaaaaaaaaaaagtaattatggacatgcttgcctatgtggaaggagaggttttttgttatttccttggggtcttgctaagttttccaggctgcactagaactcgtgggagcaatccttctgcctcagcctcccaagtagctgggactccagggagagattggtgtttgcacggccataggtagatagcttatttttactgcttgccaacaaaattgatcctgaagcccaacggccttatgccaaatggttccctccccactgctgtccatcctgggctgccactcccaaaactgccagtaccaggtgtcactgattgactagtcaaattcctggacaaaggggctacacactccaggctggttgtggaacttttgttttgagatggagttttgctcgtcacccaggctggagtgcagttgtgcgttctcagctcactgccacctctgccttcctgggatcaagcgattctcctgcctcagcctcccaagtagctgggattacaggcatacaccaccaagcctggttaatttacctctactttgcctatcccggtaggatcttttcagcctacatcaaggaggtggaggaacggccggnacccaccccgtggggctccaagatgccctttggggaactaatgttcgaatccagcagtagctgcggctgggtacatggcgtctgtttctcagccagcgggagccgcgtggcctgggtaagccacgacagcaccgtctacctggctgatgccgacaagaagatggcgtgagtcgaggccatccccagg

SEQ ID NO: 377218 - DNA, 972 bp, Homo sapiens
ggcaggccccgccccccgcccacgaggaagtggctgctgctccggcgcggagcccagagccggttcggcgcgtcgactgcccagagtccgcggccggggcgcgggaggagccaagccgccatggcctaccacagcttcctggtggagcccatcagctgccacgcctggaacaaggaccgcacccagattgccatctgccccaacaaccatgaggtgcatatctatgaaaagagcggtgccaaatggaccaaggtgcacgagctcaaggagcacaacgggcaggtgacaggcatcgactgggcccccgagagtaaccgtattgtgacctgcggcacagaccgcaacgcctacgtgtggacgctgaagggccgcacatggaagcccacgctggtcatcctgcggatcaaccgggctgcccgctgcgtgcgctgggcccccaacgagaacaagtttgctgtgggcagcggctctcgtgtgatctccatctgttatttcgagcaggagaatgactggtgggtttgcaagcacatcaagaagcccatccgctccaccgtcctcagcctggactggcaccccaacaatgtgctgctggctgccggctcctgtgacttcaagtgtcggatcttttcagcctacatcaaggaggtggaggaacggccggcacccaccccgtggggctccaagatgccctttggggaactgatgttcgaatccagcagtagctgcggctgggtacatggcgtctgtttctcagccagcgggagccgcgtggcctgggtaagccacgacagcaccgtctgcctggctgatgccgacaagaagatggccgtcgcgactctggccctcttgaaacattaccactgctggccccgtcccaaagcacagttgtgcttggggacggcggcaagggtaaagaaaaagtactgggaggattgtcagctgccgaaggtcggtctcgtagctcaggtgaac

SEQ ID NO: 377219 - DNA, 2111 bp, Homo sapiens
  misc_feature (1924)..(1924): n is a, c, g, or t
gcagaagttgcagtgagccaagggtgagccaccgagactccatctcaaaaacagaaaaaaaaagatatttacttcttgctcacattttatgtccagtgtgggtgttgtgaggtgctctgatggaagctgtccccagcatgctgtcccagatgccacgagggagccggaacctgcggaatcatgccctgggtcttaacatttctgcccacattttattggcaggtgcaatggcaaggccacgcctaatgcaaagggcgagagttcggggtgtgcggttcctccaggtgtccaggaagggcactgctctccctcccctccgcccacatctgtcaagtcccttttcacccctctgcaaacataatgggggtgccagggccaggtcaggcttgctttttgcctagaaaagcaaacagctgcaggggtctcccctagagcaggtgtaactggctgggcaggacagaaggcgcctgagctcccagggagtcccaacgctggccttgctgggggaggtggcagcccccagcatcacccccggttttgatacacctgcaattcgggcctccctcgctgtggcccgtctgtatccttgagctggcatctgcctcccgggcggccagacgcccgcctggccttccctccggcctcggtttcccctccgcggcgctccaatggcccccgccctccgcgcagggccacgactgcttcccggtgctgttcacctatgacgccgccgcggggatgctgagcttcggcgggcggctggacgttcctaagcagagctcgcagcgtggcttgacggcccgcgagcgcttccagaacctggacaagaaggcgagctccgagggtggcacggctgcgggcgcgggcctagactcgctgcacaagaacagcgtcagccagatctcggtgctcagcggcggcaaggccaagtgctcgcagttctgcaccactggcatggatggcggcatgagtatctgggatgtgaagagcttggagtcagccttgaaggacctcaagatcaaatgacctgtgaggaatatgttgccttcatcctagctgctggggaagcggggagaggggtcagggaggctaatggttgctttgctgaatgtttctggggtaccaatacgagttcccataggggctgctccctcaaaaagggaggggacagatggggagcttttcttacctattcaaggaatacgtgcctttttcttaaatgctttcatttattgaaaaaaaaaaaatgcccccaaagcactatgctggtcatgaactgcttcaaaatgtggaggtaataaaatgcaactgtgtgtaaaaaacaaaaaaaaaaaaaaagtaattatggacatgcttgcctatgtggaaggagaggttttttgttatttccttggggtcttgctaagttttccaggctgcactagaactcgtgggagcaatccttctgcctcagcctcccaagtagctgggactccagggagagattggtgtttgcacggccataggtagatagcttatttttactgcttgccaacaaaattgatcctgaagcccaacggccttatgccaaatggttccctccccactgctgtccatcctgggctgccactcccaaaactgccagtaccaggtgtcactgattgactagtcaaattcctggacaaaggggctacacactccaggctggttgtggaacttttgttttgagatggagttttgctcgtcacccaggctggagtgcagttgtgcgttctcagctcactgccacctctgccttcctgggatcaagcgattctcctgcctcagcctcccaagtagctgggattacaggcatacaccaccaagcctggttaatttacctctactttgcctatcccggtaggatcttttcagcctacatcaaggaggtggaggaacggccggnacccaccccgtggggctccaagatgccctttggggaactaatgttcgaatccagcagtagctgcggctgggtacatggcgtctgtttctcagccagcgggagccgcgtggcctgggtaagccacgacagcaccgtctacctggctgatgccgacaagaagatggcgtgagtcgaggccatccccagg

SEQ ID NO: 377220 - DNA, 1119 bp, Homo sapiens
ggcaggccccgccccccgcccacgaggaagtggctgctgctccggcgcggagcccagagccggttcggcgcgtcgactgcccagagtccgcggccggggcgcgggaggctggagtgtggtgacactaccttgactcactgcagcatctgcctcccgggttccagtgattctcctgcctcagcctctcaggtagctgggattacaggagccaagccgccatggcctaccacagcttcctggtggagcccatcagctgccacgcctggaacaaggaccgcacccagattgccatctgccccaacaaccatgaggtgcatatctatgaaaagagcggtgccaaatggaccaaggtgcacgagctcaaggagcacaacgggcaggtgacaggcatcgactgggcccccgagagtaaccgtattgtgacctgcggcacagaccgcaacgcctacgtgtggacgctgaagggccgcacatggaagcccacgctggtcatcctgcggatcaaccgggctgcccgctgcgtgcgctgggcccccaacgagaacaagtttgctgtgggcagcggctctcgtgtgatctccatctgttatttcgagcaggagaatgactggtgggtttgcaagcacatcaagaagcccatccgctccaccgtcctcagcctggactggcaccccaacaatgtgctgctggctgccggctcctgtgacttcaagtgtcggatcttttcagcctacatcaaggaggtggaggaacggccggcacccaccccgtggggctccaagatgccctttggggaactgatgttcgaatccagcagtagctgcggctgggtacatggcgtctgtttctcagccagcgggagccgcgtggcctgggtaagccacgacagcaccgtctgcctggctgatgccgacaagaagatggccgtcgcgactctggcctctgaaacactaccactgctggcgctgaccttcatcacagacaacagcctggtggcagcggccccgatgcttccggggctgtcacctatgaagcgcgcggggatgtgaagttcggggggaggggggaggtcctaacagagctcgaagtggttgaagggcgcgaggcttcagaactggg

SEQ ID NO: 377221 - DNA, 1442 bp, Homo sapiens
  misc_feature (25)..(25): n is a, c, g, or t
  misc_feature (30)..(30): n is a, c, g, or t
  misc_feature (37)..(37): n is a, c, g, or t
  misc_feature (39)..(39): n is a, c, g, or t
  misc_feature (397)..(397): n is a, c, g, or t
  misc_feature (1264)..(1264): n is a, c, g, or t
tttttttaagaaaaaggccaggttnaatcngccaaananacaagttgaatttgtggagcatgttttgcctgggtgccacacagtaaacagaggtttcttgaaatgatcaatgggtagggctgaaaatgggcactggccctagccaggtgagtaggaaccgggcagggaagggcagagaggtgaggccctgaggtcagtcagacaggactgaccagggacaagccatgaccctcgaggacccaggggcacaggctcccagatgatagcccctctctgaatgagcacccaggcaacacagtccggggctgtgtgtagcaaacctgtcagcagctgcctcctgggacaaccacccccttacatgctatctatctaccagacaaatgaaagctcttctcgnacgcgtgggtcgacccacgcgtcgacgcccagagtccgcggccggggcgcggggagccaagccgccatggcctaccacagcttcctggtggagcccatcagctgccacgcctggaacaaggaccgcacccagattgccatctgccccaacaaccatgaggtgcatatctatgaaaagagcggtgccaaatggaccaaggtgcacgagctcaaggagcacaacgggcaggtgacaggcatcgactgggcccccgagagtaaccgtattgtgacctgcggcacagaccgcaacgcctacgtgtggacgctgaagggccgcacatggaagcccacgctggtcatcctgcggatcaaccgggctgcccgctgcgtgcgctgggcccccaacgagaacaagtttgctgtgggcagcggctctcgtgtgatctccatctgttatttcgagcaggagaatgactggtgggtttgcaagcacatcaagaagcccatccgctccaccgtcctcagcctggactggcaccccaacaatgtgctgctggctgccggctcctgtgacttcaagtgtcggatcttttcagcctacatcaaggaggtggaggaacggccggcacccaccccgtggggctccaagatgccctttggggaactgatgttcgaatccagcagtagctgcggctgggtacatggcgtctgtttctcagccagcgggagccgcgtggcctgggtaagccacgacagcaccgtctgcctggctgatgccgacaagaagatggccgtcgcgactctggcctctgaaacactaccactgctggcgctgaccttcatcacagacaacagcctggtggcagcgggcccgactgtcccgtgntgtcctattacgcgcgcgggatgtgagcttcgcggcggtgacgtcctaggactccagtggttgcccggcttccactggaaaggccccgtggcgcggggcggcgcactcaaaagcatcggtcggggcgcctcccgtgtggggttgggggccccccattctcggggggggctgtggtttc

SEQ ID NO: 377222 - DNA, 1314 bp, Homo sapiens
  misc_feature (1127)..(1127): n is a, c, g, or t
tggtaaatcaagcagtcgtgcgttcctcggagctcgccttcttgtccaggttctggaagcgctcgcgggctagactcgctgcacaagaacagtgtcagcccagatctcggtgctcagcggcggcaaggccaagtgctcgcagttctgcaccactggcatggatggcggcatgagtatctgggatgtgaagagcttggagtcagccttgaaggacctcaagatcaaatgacctgtgaggaatatgttgccttcatcctagctgctggggaagcggggagaggggtcagggaggctaatggttgctttgctgaatgtttctggggtaccaatacgagttcccataggggctgctccctcaaaaagggaggggacagatggggagcttttcttacctattcaaggaatacgtgcctttttcttaaatgctttcatttattgaaaaaaaaaaaatgcccccaaagcactatgctggtcatgaactgcttcaaaatgtggaggtaataaaatgcaactgtgtgtaaaaaacaaaaaaaaaaaaaaagtaattatggacatgcttgcctatgtggaaggagaggttttttgttatttccttggggtcttgctaagttttccaggctgcactagaactcgtgggagcaatccttctgcctcagcctcccaagtagctgggactccagggagagattggtgtttgcacggccataggtagatagcttatttttactgcttgccaacaaaattgatcctgaagcccaacggccttatgccaaatggttccctccccactgctgtccatcctgggctgccactcccaaaactgccagtaccaggtgtcactgattgactagtcaaattcctggacaaaggggctacacactccaggctggttgtggaacttttgttttgagatggagttttgctcgtcacccaggctggagtgcagttgtgcgttctcagctcactgccacctctgccttcctgggatcaagcgattctcctgcctcagcctcccaagtagctgggattacaggcatacaccaccaagcctggttaatttacctctactttgcctatcccggtaggatcttttcagcctacatcaaggaggtggaggaacggccggnacccaccccgtggggctccaagatgccctttggggaactaatgttcgaatccagcagtagctgcggctgggtacatggcgtctgtttctcagccagcgggagccgcgtggcctgggtaagccacgacagcaccgtctacctggctgatgccgacaagaagatggcgtgagtcgaggccatccccagg

SEQ ID NO: 377223 - DNA, 1323 bp, Homo sapiens
  misc_feature (1136)..(1136): n is a, c, g, or t
cggccccttgacatctgggccttggtgctcactggggcacccgtcttcagggccgggattccaacccagctgacagactccaaaactgcaggttctctgccctctgctgtgctggggctgagatgggtgatcaggtccctgggagtggggtgcctgcaggacagctgagaaccagcctgtccgttctgcctccctgcagagcttggagtcagccttgaaggacctcaagatcaaatgacctgtgaggaatatgttgccttcatcctagctgctggggaagcggggagaggggtcagggaggctaatggttgctttgctgaatgtttctggggtaccaatacgagttcccataggggctgctccctcaaaaagggaggggacagatggggagcttttcttacctattcaaggaatacgtgcctttttcttaaatgctttcatttattgaaaaaaaaaaaatgcccccaaagcactatgctggtcatgaactgcttcaaaatgtggaggtaataaaatgcaactgtgtgtaaaaaacaaaaaaaaaaaaaaagtaattatggacatgcttgcctatgtggaaggagaggttttttgttatttccttggggtcttgctaagttttccaggctgcactagaactcgtgggagcaatccttctgcctcagcctcccaagtagctgggactccagggagagattggtgtttgcacggccataggtagatagcttatttttactgcttgccaacaaaattgatcctgaagcccaacggccttatgccaaatggttccctccccactgctgtccatcctgggctgccactcccaaaactgccagtaccaggtgtcactgattgactagtcaaattcctggacaaaggggctacacactccaggctggttgtggaacttttgttttgagatggagttttgctcgtcacccaggctggagtgcagttgtgcgttctcagctcactgccacctctgccttcctgggatcaagcgattctcctgcctcagcctcccaagtagctgggattacaggcatacaccaccaagcctggttaatttacctctactttgcctatcccggtaggatcttttcagcctacatcaaggaggtggaggaacggccggnacccaccccgtggggctccaagatgccctttggggaactaatgttcgaatccagcagtagctgcggctgggtacatggcgtctgtttctcagccagcgggagccgcgtggcctgggtaagccacgacagcaccgtctacctggctgatgccgacaagaagatggcgtgagtcgaggccatccccagg

SEQ ID NO: 377224 - DNA, 1042 bp, Homo sapiens
  misc_feature (855)..(855): n is a, c, g, or t
gcggccgctccaacatcagaatggtaactcgtattggtaccccagaaacattcagcaaagcaaccattagcctccctgatccctcaaaaagggaggggacagatggggagcttttcttacctattcaaggaatacgtgcctttttcttaaatgctttcatttattgaaaaaaaaaaaatgcccccaaagcactatgctggtcatgaactgcttcaaaatgtggaggtaataaaatgcaactgtgtgtaaaaaacaaaaaaaaaaaaaaagtaattatggacatgcttgcctatgtggaaggagaggttttttgttatttccttggggtcttgctaagttttccaggctgcactagaactcgtgggagcaatccttctgcctcagcctcccaagtagctgggactccagggagagattggtgtttgcacggccataggtagatagcttatttttactgcttgccaacaaaattgatcctgaagcccaacggccttatgccaaatggttccctccccactgctgtccatcctgggctgccactcccaaaactgccagtaccaggtgtcactgattgactagtcaaattcctggacaaaggggctacacactccaggctggttgtggaacttttgttttgagatggagttttgctcgtcacccaggctggagtgcagttgtgcgttctcagctcactgccacctctgccttcctgggatcaagcgattctcctgcctcagcctcccaagtagctgggattacaggcatacaccaccaagcctggttaatttacctctactttgcctatcccggtaggatcttttcagcctacatcaaggaggtggaggaacggccggnacccaccccgtggggctccaagatgccctttggggaactaatgttcgaatccagcagtagctgcggctgggtacatggcgtctgtttctcagccagcgggagccgcgtggcctgggtaagccacgacagcaccgtctacctggctgatgccgacaagaagatggcgtgagtcgaggccatccccagg

SEQ ID NO: 377225 - DNA, 904 bp, Homo sapiens
  misc_feature (9)..(9): n is a, c, g, or t
  misc_feature (19)..(19): n is a, c, g, or t
  misc_feature (840)..(840): n is a, c, g, or t
  misc_feature (843)..(843): n is a, c, g, or t
aaaacatangcagtagagnctgggttaggagccggcacccaccccgtggggctccaagatgccctttggggaactgatgttcgaatccagcagtagctgcggctgggtacatggcgtctgtttctcagccagcgggagccgcgtggcctgggtaagccacgacagcaccgtctgcctggctgatgccgacaagaagatggccgtcgcgactctggcctctgaaacactaccactgctggcgctgaccttcatcacagacaacagcctggtggcagcgggccacgactgcttcccggtgctgttcacctatgacgccgccgcggggatgctgagcttcggcgggcggctggacgttcctaagcagagctcgcagcgtggcttgacggcccgcgagcgcttccagaacctggacaagaaggcgagctccgagggtggcacggctgcgggcgcgggcctagactcgctgcacaagaacagcgtcagccagatctcggtgctcagcggcggcaaggccaagtgctcgcagttctgcaccactggcatggatggcggcatgagtatctgggatgtgaagagcttggagtcagccttgaaggacctcaagatcaaatgacctgtgaggaatatgttgccttcatcctagctgctggggaagcggggagaggggtcagggaggctaatggttgctttgctgaatgtttctggggtaccaatacgagttcccataggggctgctccctcaaaaagggaggggacagatggggagcttttcttacctattcaaggaatacgtgcctttttcttaaatgctttcatttattgaattgcacacacaaacanaanaaaaaaaccgcgcgtttttgggggggcggaaaagggttgaaggcctggcatgttcccgccc

SEQ ID NO: 377226 - DNA, 2324 bp, Homo sapiens
  misc_feature (2137)..(2137): n is a, c, g, or t
ggcaggccccgccccccgcccacgaggaagtggctgctgctccggcgcggagcccagagccggttcggcgcgtcgactgcccagagtccgcggccggggcgcgggaggagccaagccgccatggcctaccacagcttcctggtggagcccatcagctgccacgcctggaacaaggaccgcacccagattgccatctgccccaacaaccatgaggtgcatatctatgaaaagagcggtgccaaatggaccaaggtgcacgagctcaaggagcacaacgggcaggtgacaggcatcgactgggcccccgagagtaaccgtattgtgacctgcggcacagaccgcaacgcctacgtgtggacgctgaagggccgcacatggaagcccacgctggtcatcctgcggatcaaccgggctgcccgctgcgtgcgctgggcccccaacgagaacaagtttgctgtgggcagcggctctcgtgtgatctccatctgttatttcgagcaggagaatgactggtgggtttgcaagcacatcaagaagcccatccgctccaccgtcctcagcctggactggcaccccaacaatgtgctgctggctgccggctcctgtgacttcaagtgtcggatcttttcagcctacatcaaggaggtggaggaacggccggcacccaccccgtggggctccaagatgccctttggggaactgatgttcgaatccagcagtagctgcggctgggtacatggcgtctgtttctcagccagcgggagccgcgtggcctgggtaagccacgacagcaccgtctgcctggctgatgccgacaagaagatggccgtcgcgactctggcctctgaaacactaccactgctggcgctgaccttcatcacagacaacagcctggtggcagcgggccacgactgcttcccggtgctgttcacctatgacgccgccgcggggatgctgagcttcggcgggcggctggacgttcctaagcagagctcgcagcgtggcttgacggcccgcgagcgcttccagaacctggacaagaaggcgagctccgagggtggcacggctgcgggcgcgggcctagactcgctgcacaagaacagcgtcagccagatctcggtgctcagcggcggcaaggccaagtgctcgcagttctgcaccactggcatggatggcggcatgagtatctgggatgtgaagagcttggagtcagccttgaaggacctcaagatcaaatgacctgtgaggaatatgttgccttcatcctagctgctggggaagcggggagaggggtcagggaggctaatggttgctttgctgaatgtttctggggtaccaatacgagttcccataggggctgctccctcaaaaagggaggggacagatggggagcttttcttacctattcaaggaatacgtgcctttttcttaaatgctttcatttattgaaaaaaaaaaaatgcccccaaagcactatgctggtcatgaactgcttcaaaatgtggaggtaataaaatgcaactgtgtgtaaaaaacaaaaaaaaaaaaaaagtaattatggacatgcttgcctatgtggaaggagaggttttttgttatttccttggggtcttgctaagttttccaggctgcactagaactcgtgggagcaatccttctgcctcagcctcccaagtagctgggactccagggagagattggtgtttgcacggccataggtagatagcttatttttactgcttgccaacaaaattgatcctgaagcccaacggccttatgccaaatggttccctccccactgctgtccatcctgggctgccactcccaaaactgccagtaccaggtgtcactgattgactagtcaaattcctggacaaaggggctacacactccaggctggttgtggaacttttgttttgagatggagttttgctcgtcacccaggctggagtgcagttgtgcgttctcagctcactgccacctctgccttcctgggatcaagcgattctcctgcctcagcctcccaagtagctgggattacaggcatacaccaccaagcctggttaatttacctctactttgcctatcccggtaggatcttttcagcctacatcaaggaggtggaggaacggccggnacccaccccgtggggctccaagatgccctttggggaactaatgttcgaatccagcagtagctgcggctgggtacatggcgtctgtttctcagccagcgggagccgcgtggcctgggtaagccacgacagcaccgtctacctggctgatgccgacaagaagatggcgtgagtcgaggccatccccagg

SEQ ID NO: 377227 - DNA, 1329 bp, Homo sapiens
ggcaggccccgccccccgcccacgaggaagtggctgctgctccggcgcggagcccagagccggttcggcgcgtcgactgcccagagtccgcggccggggcgcgggaggagccaagccgccatggcctaccacagcttcctggtggagcccatcagctgccacgcctggaacaaggaccgcacccagattgccatctgccccaacaaccatgaggtgcatatctatgaaaagagcggtgccaaatggaccaaggtgcacgagctcaaggagcacaacgggcaggtgacaggcatcgactgggcccccgagagtaaccgtattgtgacctgcggcacagaccgcaacgcctacgtgtggacgctgaagggccgcacatggaagcccacgctggtcatcctgcggatcaaccgggctgcccgctgcgtgcgctgggcccccaacgagaacaagtttgctgtgggcagcggctctcgtgtgatctccatctgttatttcgagcaggagaatgactggtgggtttgcaagcacatcaagaagcccatccgctccaccgtcctcagcctggactggcaccccaacaatgtgctgctggctgccggctcctgtgacttcaagtgtcggatcttttcagcctacatcaaggaggtggaggaacggccggcacccaccccgtggggctccaagatgccctttggggaactgatgttcgaatccagcagtagctgcggctgggtacatggcgtctgtttctcagccagcgggagccgcgtggcctgggtaagccacgacagcaccgtctgcctggctgatgccgacaagaagatggccgtcgcgactctggcctctgaaacactaccactgctggcgctgaccttcatcacagacaacagcctggtggcagcgggccacgactgcttcccggtgctgttcacctatgacgccgccgcggggatgctgagcttcggcgggcggctggacgttcctaagcagagctcgcagcgtggcttgacggcccgcgagcgcttccagaacctggacaagaaggcgagctccgagggtggcacggctgcgggcgcgggcctagactcgctgcacaagaacagcgtcagccagatctcggtgctcagcggcggcaaggccaagtgctcgcagttctgcaccactggcatggatggcggcatgagtatctgggatgtgaaggtgaggcttgcccctcctggcttcccgccatgcctcccaggtcaaccctttccccccatccccactccctggagatgacccccatccttcactcctgcagagatggcactgcatggggatgaggggtgg

SEQ ID NO: 377228 - DNA, 2422 bp, Homo sapiens
  misc_feature (2235)..(2235): n is a, c, g, or t
ggcaggccccgccccccgcccacgaggaagtggctgctgctccggcgcggagcccagagccggttcggcgcgtcgactgcccagagtccgcggccggggcgcgggaggctggagtgtggtgacactaccttgactcactgcagcatctgcctcccgggttccagtgattctcctgcctcagcctctcaggtagctgggattacaggagccaagccgccatggcctaccacagcttcctggtggagcccatcagctgccacgcctggaacaaggaccgcacccagattgccatctgccccaacaaccatgaggtgcatatctatgaaaagagcggtgccaaatggaccaaggtgcacgagctcaaggagcacaacgggcaggtgacaggcatcgactgggcccccgagagtaaccgtattgtgacctgcggcacagaccgcaacgcctacgtgtggacgctgaagggccgcacatggaagcccacgctggtcatcctgcggatcaaccgggctgcccgctgcgtgcgctgggcccccaacgagaacaagtttgctgtgggcagcggctctcgtgtgatctccatctgttatttcgagcaggagaatgactggtgggtttgcaagcacatcaagaagcccatccgctccaccgtcctcagcctggactggcaccccaacaatgtgctgctggctgccggctcctgtgacttcaagtgtcggatcttttcagcctacatcaaggaggtggaggaacggccggcacccaccccgtggggctccaagatgccctttggggaactgatgttcgaatccagcagtagctgcggctgggtacatggcgtctgtttctcagccagcgggagccgcgtggcctgggtaagccacgacagcaccgtctgcctggctgatgccgacaagaagatggccgtcgcgactctggcctctgaaacactaccactgctggcgctgaccttcatcacagacaacagcctggtggcagcgggccacgactgcttcccggtgctgttcacctatgacgccgccgcggggatgctgagcttcggcgggcggctggacgttcctaagcagagctcgcagcgtggcttgacggcccgcgagcgcttccagaacctggacaagaaggcgagctccgagggtggcacggctgcgggcgcgggcctagactcgctgcacaagaacagcgtcagccagatctcggtgctcagcggcggcaaggccaagtgctcgcagttctgcaccactggcatggatggcggcatgagtatctgggatgtgaagagcttggagtcagccttgaaggacctcaagatcaaatgacctgtgaggaatatgttgccttcatcctagctgctggggaagcggggagaggggtcagggaggctaatggttgctttgctgaatgtttctggggtaccaatacgagttcccataggggctgctccctcaaaaagggaggggacagatggggagcttttcttacctattcaaggaatacgtgcctttttcttaaatgctttcatttattgaaaaaaaaaaaatgcccccaaagcactatgctggtcatgaactgcttcaaaatgtggaggtaataaaatgcaactgtgtgtaaaaaacaaaaaaaaaaaaaaagtaattatggacatgcttgcctatgtggaaggagaggttttttgttatttccttggggtcttgctaagttttccaggctgcactagaactcgtgggagcaatccttctgcctcagcctcccaagtagctgggactccagggagagattggtgtttgcacggccataggtagatagcttatttttactgcttgccaacaaaattgatcctgaagcccaacggccttatgccaaatggttccctccccactgctgtccatcctgggctgccactcccaaaactgccagtaccaggtgtcactgattgactagtcaaattcctggacaaaggggctacacactccaggctggttgtggaacttttgttttgagatggagttttgctcgtcacccaggctggagtgcagttgtgcgttctcagctcactgccacctctgccttcctgggatcaagcgattctcctgcctcagcctcccaagtagctgggattacaggcatacaccaccaagcctggttaatttacctctactttgcctatcccggtaggatcttttcagcctacatcaaggaggtggaggaacggccggnacccaccccgtggggctccaagatgccctttggggaactaatgttcgaatccagcagtagctgcggctgggtacatggcgtctgtttctcagccagcgggagccgcgtggcctgggtaagccacgacagcaccgtctacctggctgatgccgacaagaagatggcgtgagtcgaggccatccccagg

SEQ ID NO: 377229 - DNA, 2667 bp, Homo sapiens
  misc_feature (25)..(25): n is a, c, g, or t
  misc_feature (30)..(30): n is a, c, g, or t
  misc_feature (37)..(37): n is a, c, g, or t
  misc_feature (39)..(39): n is a, c, g, or t
  misc_feature (397)..(397): n is a, c, g, or t
  misc_feature (2480)..(2480): n is a, c, g, or t
tttttttaagaaaaaggccaggttnaatcngccaaananacaagttgaatttgtggagcatgttttgcctgggtgccacacagtaaacagaggtttcttgaaatgatcaatgggtagggctgaaaatgggcactggccctagccaggtgagtaggaaccgggcagggaagggcagagaggtgaggccctgaggtcagtcagacaggactgaccagggacaagccatgaccctcgaggacccaggggcacaggctcccagatgatagcccctctctgaatgagcacccaggcaacacagtccggggctgtgtgtagcaaacctgtcagcagctgcctcctgggacaaccacccccttacatgctatctatctaccagacaaatgaaagctcttctcgnacgcgtgggtcgacccacgcgtcgacgcccagagtccgcggccggggcgcggggagccaagccgccatggcctaccacagcttcctggtggagcccatcagctgccacgcctggaacaaggaccgcacccagattgccatctgccccaacaaccatgaggtgcatatctatgaaaagagcggtgccaaatggaccaaggtgcacgagctcaaggagcacaacgggcaggtgacaggcatcgactgggcccccgagagtaaccgtattgtgacctgcggcacagaccgcaacgcctacgtgtggacgctgaagggccgcacatggaagcccacgctggtcatcctgcggatcaaccgggctgcccgctgcgtgcgctgggcccccaacgagaacaagtttgctgtgggcagcggctctcgtgtgatctccatctgttatttcgagcaggagaatgactggtgggtttgcaagcacatcaagaagcccatccgctccaccgtcctcagcctggactggcaccccaacaatgtgctgctggctgccggctcctgtgacttcaagtgtcggatcttttcagcctacatcaaggaggtggaggaacggccggcacccaccccgtggggctccaagatgccctttggggaactgatgttcgaatccagcagtagctgcggctgggtacatggcgtctgtttctcagccagcgggagccgcgtggcctgggtaagccacgacagcaccgtctgcctggctgatgccgacaagaagatggccgtcgcgactctggcctctgaaacactaccactgctggcgctgaccttcatcacagacaacagcctggtggcagcgggccacgactgcttcccggtgctgttcacctatgacgccgccgcggggatgctgagcttcggcgggcggctggacgttcctaagcagagctcgcagcgtggcttgacggcccgcgagcgcttccagaacctggacaagaaggcgagctccgagggtggcacggctgcgggcgcgggcctagactcgctgcacaagaacagcgtcagccagatctcggtgctcagcggcggcaaggccaagtgctcgcagttctgcaccactggcatggatggcggcatgagtatctgggatgtgaagagcttggagtcagccttgaaggacctcaagatcaaatgacctgtgaggaatatgttgccttcatcctagctgctggggaagcggggagaggggtcagggaggctaatggttgctttgctgaatgtttctggggtaccaatacgagttcccataggggctgctccctcaaaaagggaggggacagatggggagcttttcttacctattcaaggaatacgtgcctttttcttaaatgctttcatttattgaaaaaaaaaaaatgcccccaaagcactatgctggtcatgaactgcttcaaaatgtggaggtaataaaatgcaactgtgtgtaaaaaacaaaaaaaaaaaaaaagtaattatggacatgcttgcctatgtggaaggagaggttttttgttatttccttggggtcttgctaagttttccaggctgcactagaactcgtgggagcaatccttctgcctcagcctcccaagtagctgggactccagggagagattggtgtttgcacggccataggtagatagcttatttttactgcttgccaacaaaattgatcctgaagcccaacggccttatgccaaatggttccctccccactgctgtccatcctgggctgccactcccaaaactgccagtaccaggtgtcactgattgactagtcaaattcctggacaaaggggctacacactccaggctggttgtggaacttttgttttgagatggagttttgctcgtcacccaggctggagtgcagttgtgcgttctcagctcactgccacctctgccttcctgggatcaagcgattctcctgcctcagcctcccaagtagctgggattacaggcatacaccaccaagcctggttaatttacctctactttgcctatcccggtaggatcttttcagcctacatcaaggaggtggaggaacggccggnacccaccccgtggggctccaagatgccctttggggaactaatgttcgaatccagcagtagctgcggctgggtacatggcgtctgtttctcagccagcgggagccgcgtggcctgggtaagccacgacagcaccgtctacctggctgatgccgacaagaagatggcgtgagtcgaggccatccccagg

SEQ ID NO: 377230 - DNA, 2311 bp, Homo sapiens
  misc_feature (2124)..(2124): n is a, c, g, or t
aatatattgataggtggcgggctggtgtgtcgatttacagtcgacgggggtcggcgtgtccattagtaccgggtgggggtgggcgaggatcaaagagccaagccgccatggcctaccacagcttcctggtggagcccatcagctgccacgcctggaacaaggaccgcacccagattgccatctgccccaacaaccatgaggtgcatatctatgaaaagagcggtgccaaatggaccaaggtgcacgagctcaaggagcacaacgggcaggtgacaggcatcgactgggcccccgagagtaaccgtattgtgacctgcggcacagaccgcaacgcctacgtgtggacgctgaagggccgcacatggaagcccacgctggtcatcctgcggatcaaccgggctgcccgctgcgtgcgctgggcccccaacgagaacaagtttgctgtgggcagcggctctcgtgtgatctccatctgttatttcgagcaggagaatgactggtgggtttgcaagcacatcaagaagcccatccgctccaccgtcctcagcctggactggcaccccaacaatgtgctgctggctgccggctcctgtgacttcaagtgtcggatcttttcagcctacatcaaggaggtggaggaacggccggcacccaccccgtggggctccaagatgccctttggggaactgatgttcgaatccagcagtagctgcggctgggtacatggcgtctgtttctcagccagcgggagccgcgtggcctgggtaagccacgacagcaccgtctgcctggctgatgccgacaagaagatggccgtcgcgactctggcctctgaaacactaccactgctggcgctgaccttcatcacagacaacagcctggtggcagcgggccacgactgcttcccggtgctgttcacctatgacgccgccgcggggatgctgagcttcggcgggcggctggacgttcctaagcagagctcgcagcgtggcttgacggcccgcgagcgcttccagaacctggacaagaaggcgagctccgagggtggcacggctgcgggcgcgggcctagactcgctgcacaagaacagcgtcagccagatctcggtgctcagcggcggcaaggccaagtgctcgcagttctgcaccactggcatggatggcggcatgagtatctgggatgtgaagagcttggagtcagccttgaaggacctcaagatcaaatgacctgtgaggaatatgttgccttcatcctagctgctggggaagcggggagaggggtcagggaggctaatggttgctttgctgaatgtttctggggtaccaatacgagttcccataggggctgctccctcaaaaagggaggggacagatggggagcttttcttacctattcaaggaatacgtgcctttttcttaaatgctttcatttattgaaaaaaaaaaaatgcccccaaagcactatgctggtcatgaactgcttcaaaatgtggaggtaataaaatgcaactgtgtgtaaaaaacaaaaaaaaaaaaaaagtaattatggacatgcttgcctatgtggaaggagaggttttttgttatttccttggggtcttgctaagttttccaggctgcactagaactcgtgggagcaatccttctgcctcagcctcccaagtagctgggactccagggagagattggtgtttgcacggccataggtagatagcttatttttactgcttgccaacaaaattgatcctgaagcccaacggccttatgccaaatggttccctccccactgctgtccatcctgggctgccactcccaaaactgccagtaccaggtgtcactgattgactagtcaaattcctggacaaaggggctacacactccaggctggttgtggaacttttgttttgagatggagttttgctcgtcacccaggctggagtgcagttgtgcgttctcagctcactgccacctctgccttcctgggatcaagcgattctcctgcctcagcctcccaagtagctgggattacaggcatacaccaccaagcctggttaatttacctctactttgcctatcccggtaggatcttttcagcctacatcaaggaggtggaggaacggccggnacccaccccgtggggctccaagatgccctttggggaactaatgttcgaatccagcagtagctgcggctgggtacatggcgtctgtttctcagccagcgggagccgcgtggcctgggtaagccacgacagcaccgtctacctggctgatgccgacaagaagatggcgtgagtcgaggccatccccagg

SEQ ID NO: 377231 - DNA, 2280 bp, Homo sapiens
  misc_feature (2093)..(2093): n is a, c, g, or t
ggcaggccccgccccccgcccacgaggaagtggctgctgctccggcgcggagcccagagccggttcggcgcgtcgactgcccagagtccgcggccggggcgcgggaggagccaagccgccatggcctaccacagcttcctggtggagcccatcagctgccacgcctggaacaaggaccgcacccagattgccatctgccccaacaaccatgaggtgcatatctatgaaaagagcggtgccaaatggaccaaggtgcacgagctcaaggagcacaacgggcaggtgacaggcatcgactgggcccccgagagtaaccgtattgtgacctgcggcacagaccgcaacgcctacgtgtggacgctgaagggccgcacatggaagcccacgctggtcatcctgcggatcaaccgggctgcccgctgcgtgcgctgggcccccaacgagaacaagtttgctgtgggcagcggctctcgtgtgatctccatctgttatttcgagcaggagaatgactggtgggtttgcaagcacatcaagaagcccatccgctccaccgtcctcagcctggactggcaccccaacaatgtgctgctggctgccggctcctgtgacttcaagtgtcggatcttttcagcctacatcaaggaggtggaggaacggccggcacccaccccgtggggctccaagatgccctttggggaactgatgttcgaatccagcagtagctgcggctgggtacatggcgtctgtttctcagccagcgggagccgcgtggcctgggtaagccgtcgcgactctggcctctgaaacactaccactgctggcgctgaccttcatcacagacaacagcctggtggcagcgggccacgactgcttcccggtgctgttcacctatgacgccgccgcggggatgctgagcttcggcgggcggctggacgttcctaagcagagctcgcagcgtggcttgacggcccgcgagcgcttccagaacctggacaagaaggcgagctccgagggtggcacggctgcgggcgcgggcctagactcgctgcacaagaacagcgtcagccagatctcggtgctcagcggcggcaaggccaagtgctcgcagttctgcaccactggcatggatggcggcatgagtatctgggatgtgaagagcttggagtcagccttgaaggacctcaagatcaaatgacctgtgaggaatatgttgccttcatcctagctgctggggaagcggggagaggggtcagggaggctaatggttgctttgctgaatgtttctggggtaccaatacgagttcccataggggctgctccctcaaaaagggaggggacagatggggagcttttcttacctattcaaggaatacgtgcctttttcttaaatgctttcatttattgaaaaaaaaaaaatgcccccaaagcactatgctggtcatgaactgcttcaaaatgtggaggtaataaaatgcaactgtgtgtaaaaaacaaaaaaaaaaaaaaagtaattatggacatgcttgcctatgtggaaggagaggttttttgttatttccttggggtcttgctaagttttccaggctgcactagaactcgtgggagcaatccttctgcctcagcctcccaagtagctgggactccagggagagattggtgtttgcacggccataggtagatagcttatttttactgcttgccaacaaaattgatcctgaagcccaacggccttatgccaaatggttccctccccactgctgtccatcctgggctgccactcccaaaactgccagtaccaggtgtcactgattgactagtcaaattcctggacaaaggggctacacactccaggctggttgtggaacttttgttttgagatggagttttgctcgtcacccaggctggagtgcagttgtgcgttctcagctcactgccacctctgccttcctgggatcaagcgattctcctgcctcagcctcccaagtagctgggattacaggcatacaccaccaagcctggttaatttacctctactttgcctatcccggtaggatcttttcagcctacatcaaggaggtggaggaacggccggnacccaccccgtggggctccaagatgccctttggggaactaatgttcgaatccagcagtagctgcggctgggtacatggcgtctgtttctcagccagcgggagccgcgtggcctgggtaagccacgacagcaccgtctacctggctgatgccgacaagaagatggcgtgagtcgaggccatccccagg

SEQ ID NO: 377232 - DNA, 1099 bp, Homo sapiens
  misc_feature (921)..(921): n is a, c, g, or t
ggcaggccccgccccccgcccacgaggaagtggctgctgctccggcgcggagcccagagccggttcggcgcgtcgactgcccagagtccgcggccggggcgcgggaggagccaagccgccatggcctaccacagcttcctggtggagcccatcagctgccacgcctggaacaaggaccgcacccagattgccatctgccccaacaaccatgaggtgcatatctatgaaaagagcggtgccaaatggaccaaggtgcacgagctcaaggagcacaacgggcaggtgacaggcatcgactgggcccccgagagtaaccgtattgtgacctgcggcacagaccgcaacgcctacgtgtggacgctgaagggccgcacatggaagcccacgctggtcatcctgcggatcaaccgggctgcccgctgcgtgcgctgggcccccaacgagaacaagtttgctgtgggcagcggctctcgtgtgatctccatctgttatttcgagcaggagaatgactggtgggtttgcaagcacatcaagaagcccatccgctccaccgtcctcagcctggactggcaccccaacaatgtgctgctggctgccggctcctgtgacttcaagtgtcggatcttttcagcctacatcaaggaggtggaggaacggccggcacccaccccgtggggctccaagatgccctttggggaactgatgttcgaatccagcagtagctgcggctgggtacatggcgtctgtttctcagccagcgggagccgcgtggcctgggtaagccacgacagcaccgtctgcctggctgatgccgacaagaagatggccgtcgcgactctggcctctgaaacactaccactgctggcgctgaccttcatcacagacaacagcctggtggcagcgggcccgactgtcccgtgntgtcctattacgcgcgcgggatgtgagcttcgcggcggtgacgtcctaggactccagtggttgcccggcttccactggaaaggccccgtggcgcggggcggcgcactcaaaagcatcggtcggggcgcctcccgtgtggggttgggggccccccattctcggggggggctgtggtttc

SEQ ID NO: 377233 - DNA, 1667 bp, Homo sapiens
  misc_feature (1480)..(1480): n is a, c, g, or t
cttggattcgaacatcagttccccaaagggcatcttggggaactgatgttcgaatccagcagtagctgcggctgggtacatggcgtctgtttctcagccagcgggagccgcgtggcctgggtaagccacgacagcaccgtctgcctggctgatgccgacaagaagatggccgtcgcgactctggcctctgaaacactaccactgctggcgctgaccttcatcacagacaacagcctggtggcagcgggccacgactgcttcccggtgctgttcacctatgacgccgccgcggggatgctgagcttcggcgggcggctggacgttcctaagcagagctcgcagcgtggcttgacggcccgcgagcgcttccagaacctggacaagaaggcgagctccgagggtggcacggctgcgggcgcgggcctagactcgctgcacaagaacagcgtcagccagatctcggtgctcagcggcggcaaggccaagtgctcgcagttctgcaccactggcatggatggcggcatgagtatctgggatgtgaagagcttggagtcagccttgaaggacctcaagatcaaatgacctgtgaggaatatgttgccttcatcctagctgctggggaagcggggagaggggtcagggaggctaatggttgctttgctgaatgtttctggggtaccaatacgagttcccataggggctgctccctcaaaaagggaggggacagatggggagcttttcttacctattcaaggaatacgtgcctttttcttaaatgctttcatttattgaaaaaaaaaaaatgcccccaaagcactatgctggtcatgaactgcttcaaaatgtggaggtaataaaatgcaactgtgtgtaaaaaacaaaaaaaaaaaaaaagtaattatggacatgcttgcctatgtggaaggagaggttttttgttatttccttggggtcttgctaagttttccaggctgcactagaactcgtgggagcaatccttctgcctcagcctcccaagtagctgggactccagggagagattggtgtttgcacggccataggtagatagcttatttttactgcttgccaacaaaattgatcctgaagcccaacggccttatgccaaatggttccctccccactgctgtccatcctgggctgccactcccaaaactgccagtaccaggtgtcactgattgactagtcaaattcctggacaaaggggctacacactccaggctggttgtggaacttttgttttgagatggagttttgctcgtcacccaggctggagtgcagttgtgcgttctcagctcactgccacctctgccttcctgggatcaagcgattctcctgcctcagcctcccaagtagctgggattacaggcatacaccaccaagcctggttaatttacctctactttgcctatcccggtaggatcttttcagcctacatcaaggaggtggaggaacggccggnacccaccccgtggggctccaagatgccctttggggaactaatgttcgaatccagcagtagctgcggctgggtacatggcgtctgtttctcagccagcgggagccgcgtggcctgggtaagccacgacagcaccgtctacctggctgatgccgacaagaagatggcgtgagtcgaggccatccccagg

SEQ ID NO: 377234 - DNA, 863 bp, Homo sapiens
  misc_feature (834)..(834): n is a, c, g, or t
  misc_feature (837)..(837): n is a, c, g, or t
ggcaggccccgccccccgcccacgaggaagtggctgctgctccggcgcggagcccagagccggttcggcgcgtcgactgcccagagtccgcggccggggcgcgggaggagccaagccgccatggcctaccacagcttcctggtggagcccatcagctgccacgcctggaacaaggaccgcacccagattgccatctgccccaacaaccatgaggtgcatatctatgaaaagagcggtgccaaatggaccaaggtgcacgagctcaaggagcacaacgggcaggtgacaggcatcgactgggcccccgagagtaaccgtattgtgacctgcggcacagaccgcaacgcctacgtgtggacgctgaagggccgcacatggaagcccacgctggtcatcctgcggatcaaccgggctgcccgctgcgtgcgctgggcccccaacgagaacaagtttgctgtgggcagcggctctcgtgtgatctccatctgttatttcgagcaggagaatgactggtgggtttgcaagcacatcaagaagcccatccgctccaccgtcctcagcctggactggcaccccaacaatgtgctgctggctgccggctcctgtgacttcaagtgtcggatcttttcagcctacatcaaggaggtggaggaacggccggcacccaccccgtggggctccaagatgccctttggggaactgatgttcgaatccagcagtagctgcggctgggtacatggcgtctgtttctcagccagcgggagccgcgtggcctgggtaagccacgacagcaccgtctgcctggctgatgccgacaagaagatggcaacgcanctncctgacgaagaaacgcaacctccctg

SEQ ID NO: 377235 - DNA, 1445 bp, Homo sapiens
  misc_feature (1258)..(1258): n is a, c, g, or t
tttcattcatccaacaaactgttggagcagcggccacggctcctcgcgtggttgtccataaaaccccccggggataatatatttttcgggcggctggacgttcctaagcagagctcgcagcgtggcttgacggcccgcgagcgcttccagaacctggacaagaaggcgagctccgagggtggcacggctgcgggcgcgggcctagactcgctgcacaagaacagcgtcagccagatctcggtgctcagcggcggcaaggccaagtgctcgcagttctgcaccactggcatggatggcggcatgagtatctgggatgtgaagagcttggagtcagccttgaaggacctcaagatcaaatgacctgtgaggaatatgttgccttcatcctagctgctggggaagcggggagaggggtcagggaggctaatggttgctttgctgaatgtttctggggtaccaatacgagttcccataggggctgctccctcaaaaagggaggggacagatggggagcttttcttacctattcaaggaatacgtgcctttttcttaaatgctttcatttattgaaaaaaaaaaaatgcccccaaagcactatgctggtcatgaactgcttcaaaatgtggaggtaataaaatgcaactgtgtgtaaaaaacaaaaaaaaaaaaaaagtaattatggacatgcttgcctatgtggaaggagaggttttttgttatttccttggggtcttgctaagttttccaggctgcactagaactcgtgggagcaatccttctgcctcagcctcccaagtagctgggactccagggagagattggtgtttgcacggccataggtagatagcttatttttactgcttgccaacaaaattgatcctgaagcccaacggccttatgccaaatggttccctccccactgctgtccatcctgggctgccactcccaaaactgccagtaccaggtgtcactgattgactagtcaaattcctggacaaaggggctacacactccaggctggttgtggaacttttgttttgagatggagttttgctcgtcacccaggctggagtgcagttgtgcgttctcagctcactgccacctctgccttcctgggatcaagcgattctcctgcctcagcctcccaagtagctgggattacaggcatacaccaccaagcctggttaatttacctctactttgcctatcccggtaggatcttttcagcctacatcaaggaggtggaggaacggccggnacccaccccgtggggctccaagatgccctttggggaactaatgttcgaatccagcagtagctgcggctgggtacatggcgtctgtttctcagccagcgggagccgcgtggcctgggtaagccacgacagcaccgtctacctggctgatgccgacaagaagatggcgtgagtcgaggccatccccagg

SEQ ID NO: 377236 - DNA, 1009 bp, Homo sapiens
  misc_feature (947)..(947): n is a, c, g, or t
ggcaggccccgccccccgcccacgaggaagtggctgctgctccggcgcggagcccagagccggttcggcgcgtcgactgcccagagtccgcggccggggcgcgggagtgtcttgttctgttgcccaggctggagtgtggtgacactaccttgactcactgcagcatctgcctcccgggttccagtgattctcctgcctcagcctctcaggtagctgggattacaggagccaagccgccatggcctaccacagcttcctggtggagcccatcagctgccacgcctggaacaaggaccgcacccagattgccatctgccccaacaaccatgaggtgcatatctatgaaaagagcggtgccaaatggaccaaggtgcacgagctcaaggagcacaacgggcaggtgacaggcatcgactgggcccccgagagtaaccgtattgtgacctgcggcacagaccgcaacgcctacgtgtggacgctgaagggccgcacatggaagcccacgctggtcatcctgcggatcaaccgggctgcccgctgcgtgcgctgggcccccaacgagaacaagtttgctgtgggcagcggctctcgtgtgatctccatctgttatttcgagcaggagaatgactggtgggtttgcaagcacatcaagaagcccatccgctccaccgtcctcagcctggactggcaccccaacaatgtgctgctggctgccggctcctgtgacttcaagtgtcggatcttttcagcctacatcaaggaggtggaggaacggccggcacccaccccgtggggctccaagatgccctttggggaactgatgttcgaatccagcagtagctgcggctgggtacatggcgtctgtttctcagccagcgggagccgcgtggcctgggtaagccacgacagcaccgtctgcctggctgatgccgacaagaagatggcgngatctggcctgaaactaccacggtggctacctctcccaaaacgcctgggccggccccactgg

SEQ ID NO: 377237 - DNA, 742 bp, Homo sapiens
  misc_feature (661)..(661): n is a, c, g, or t
ggcaggccccgccccccgcccacgaggaagtggctgctgctccggcgcggagcccagagccggttcggcgcgtcgactgcccagagtccgcggccggggcgcgggaggagccaagccgccatggcctaccacagcttcctggtggagcccatcagctgccacgcctggaacaaggaccgcacccagattgccatctgccccaacaaccatgaggtgcatatctatgaaaagagcggtgccaaatggaccaaggtgcacgagctcaaggagcacaacgggcaggtgacaggcatcgactgggcccccgagagtaaccgtattgtgacctgcggcacagaccgcaacgcctacgtgtggacgctgaagggccgcacatggaagcccacgctggtcatcctgcggatcaaccgggctgcccgctgcgtgcgctgggcccccaacgagaacaagtttgctgtgggcagcggctctcgtgtgatctccatctgttatttcgagcaggagaatgactggtgggtttgcaagcacatcaagaagcccatccgctccaccgtcctcagcctggactggcaccccaacaatgtgctgctggctgccggctcctgtgacttcaagtgtcgatcttttcagcctacatcaaggaggtggaggaacggccggnacccacccccgttggggggctccccaaagaatgcccccttttgtgggggggaaaaactttggaattggttttccgggaaat

SEQ ID NO: 377238 - DNA, 489 bp, Homo sapiens
cgagtaagcgcccgaagaaacagctccactttcatgccagttaagctgtgtggcgacatggagccaaaatcctcatgcagaggcatttacccccaccccagccagccccagaccgcccccaacactggctggcgtcctcactgcttcccaagtcagctctgcccagggtcgtgccaaggcagctgtgatgggatgcgctcagccagagccggttgggacaggagtggtgccaagtgctccacgtgtggccacccaccgtcccctgcatccaccctaggaggcactgtgccattttattttattttattactttttttttttttttttgagacagagtatcgctctgtcccccaggctggagtgcagtggtgcgatctcggctcactgcaacctctgcctcctgggttcaagcgattctgctacctcagcctccagagcagctgggattataggctggagtacagtggcacgatctcggctcactgcaac

SEQ ID NO: 377239 - DNA, 531 bp, Homo sapiens
aatattcataatctactgtagaaataatttctttaaaatagaaccatttgatcacttagatcatgtatttacaaaataaagaatacattaaatacctttattctttattacttatattgcatagatatctacatatatataattctattagtcagaatgcagttttatatatctataaaaaaattaaactggtcatttatttccagctatgactaccattcaaaattaagacaataactgcatgatttaaaattgagggaatagtttggctgatttttacatactgcagtcacagcacaattctacattctagcaagaaaaacaaatattaaagaaaactgagaagttcttcagagtctctaatagtacagtagttaaccggcccactcattagtcagttgtttttactgtttctctccagtgttgtttcaaataaactttctaaatgtaaaatgatttcattaatcaactttaaaagtaaaatgaattgcacagaccaatgtctgaaatctgagtacacagcaaaaagca

SEQ ID NO: 377240 - DNA, 443 bp, Homo sapiens
ttcaaagcagcctccttgatattcatataagtaacagctcttcttctttgcctttgtgttttattctttacttacaaatacaaatgagccaacattaacatattaaataccagttggctgaacagaacacagtgaacaggaggtatacagagttggctaacaactatgagtcagcagtacatttgattctccgtatttgtgttttacaggggaaaatggagagctttcggtaatctaagtatgagtaaatggaggtcagtcaagggttgacctgcaggggctgcagaaagctgcctgaagataccatgattcagcccattcttaatggagacagagatgttgatggaagaacagtgagcacaggaggaagttgataaactagtctgaaaatgctgctatttcaaatctgtgtctgcagttaaacatccaaaaatttggttgca

SEQ ID NO: 377241 - DNA, 546 bp, Homo sapiens
gtctcaaaaaaaaaaaaatagaaagaaaatgaaatttgttttgagtaataaaaattaaaagtcatggctggacgcagtggctcatacctgtaatcccagcacttttggaggctgaggcaggaggattgcttgcggccaggagttggagaccagcctggccaacatggtgaaacccgatctctactaaaaatacaaaattagccaggtgtagtggtacatgcctgtaatcccagctacttgggaggctgaggcaggagaatcacttgaacacagaatgtggaggttgcattgagccaagatcaagccactgcagtccagcctgggcaacagagtgagactccatctcaataaataaataagtaataaagtaaaaaataaaaaaccttgattctttaagatgaaaaagttcttgagattggttgcacaacaatgtgagtatacttggctgggtgtggtgacacatacctataatcccagcactttgggaggctgaggcaggtggactgttgagcccaggagttcgaaaccagcctgggcaacatggca

SEQ ID NO: 377242 - DNA, 1576 bp, Homo sapiens
  misc_feature (1575)..(1576): n is a, c, g, or t
gcctgagttcgccagtggtccaggagccgcttttttccactcgggaagacttcagagaagtctcacaaaggactcggctggctgcttttctcagtgccgaagccgcgccatgctcgttctcagaagcggcctgaccaaggcgcttgcctcacggacgctcgcgcctcaggtgtgttcatcttttgctacgggccctagacaatacgatggaacgttctatgaatttcgtacttattaccttaaaccttcaaatatgaatgcgttcatggaaaatcttaagaaaaacattcatcttcggacctcttactctgaattggttggattctggagtgtagaatttggaggcagaacgaataaagtgtttcatatttggaagtatgataattttgctcatcgagctgaagttcggaaagccttagccaactgtaaggaatggcaagaacaatctatcattccaaatttggctcgcattgataaacaagagacggaaattacttacctgataccatggtccaaattagaaaagcctccaaaagaaggagtctatgaactagctgtttttcagatgaaacctggtgggccagctctgtggggtgatgcatttgaaagagcaattaatgcccatgtcaatttaggctacacaaaagtagttggtgttttccacacagaatatggagaactcaacagagttcatgttctttggtggaatgagagtgcagatagtcgtgcagctgggagacataagtcccatgaggatcccagagttgtggcggctgttcgggaaagtgtcaactacctagtttctcagcagaatatgcttctgattcctgcatcattttcaccattgaaatagttttctactgaaatacaaaacatttcattaactgctctaagatgtgtctgctaatggtgcttaaattctcccaagaggttctcgcttttatttgaaggaggtggtaagttaattagttaatttgctgtgcttcttgcatttttgaaagttacatattctccactgctttaagaaataattcagttcactttcaccttggcatttcagtatctgttacacattagaagtagttgtcactatttcatcatcttggtttttcatttgttttagaatacctcttctgtattttgataactcattgctttatagcattttcttttactcaaataaggattttacatttccttttcctgagattttaaaaaaatttgcttagtaaaggttattttgtgatataaaatgggatttataaaaatattagattgtttatttctttactgtggaaaagtagaatgtcatctgtattaattattgcttttacattcattgattattagtcattctaacttggaaaataatgcaattgggtcacagtgttaaaaatctagaaaagacttgttggtttatatgctgaaattgttcatttataattaattttactaatttctccttagtttggatcactaacagagatcttgggacatttatttgttttaaagaaatatttatggttatggaaacgcttgccctaataaaaatcctgcatattcattgtttttttnn

SEQ ID NO: 377243 - DNA, 1599 bp, Homo sapiens
gcctgagttcgccagtggtccaggagccgcttttttccactcgggaagacttcagagaagtctcacaaaggactcggctggctgcttttctcagtgccgaagccgcgccatgctcgttctcagaagcggcctgaccaaggcgcttgcctcacggacgctcgcgcctcaggtgtgttcatcttttgctacgggccctagacaatacgatggaacgttctatgaatttcgtacttattaccttaaaccttcaaatatgaatgcgttcatggaaaatcttaagaaaaacattcatcttcggacctcttactctgaattggttggattctggagtgtagaatttggaggcagaacgaataaagtgtttcatatttggaagtatgataattttgctcatcgagctgaagttcggaaagccttagccaactgtaaggaatggcaagaacaatctatcattccaaatttggctcgcattgataaacaagagacggaaattacttacctgataccatggtccaaattagaaaagcctccaaaagaaggagtctatgaactagctgtttttcagatgaaacctggtgggccagctctgtggggtgatgcatttgaaagagcaattaatgcccatgtcaatttaggctacacaaaagtagttggtgttttccacacagaatatggagaactcaacagagttcatgttctttggtggaatgagagtgcagatagtcgtgcagctgggagacataagtcccatgaggatcccagagttgtggcggctgttcgggaaagtgtcaactacctagtttctcagcagaatatgcttctgattcctgcatcattttcaccattgaaatagttttctactgaaatacaaaacatttcattaactgctctaagatgtgtctgctaatggtgcttaaattctcccaagaggttctcgcttttatttgaaggaggtggaagagaaacagatatgcaaccaatctgatttggttccacaccctgccacagaagtcccaaaggagaagcaaatgccacttgtagactcaaactctggacttcattctcagcaccatctcttaacctactgagtaaatcctatgaacctgactagggtggcaactgaagttgtagtactttctgtcttcaaaggagggtgaacctggagtatgttggaagaagtgttaggttcattagagacacctctttcataactgctgtcacctagaatgtctattctctaagcaccttcttgaaagaagcacattcccccaggaggaggaaatggtttgttttctttagtgacagttggcccaggatcctaaggtaaaggagtatgggcactagacaaaatgagttttataatagtcgattggaaggaatggaagtttttgaatcacaggcttctgccttgaaagggcaagtccgtggtggtcatgaaccacccagagtgtgtacaaggctcctgccagaagaaatgcctgtaggattaaaagcaaaacagcagaatcaaaaaggaagggcacgatgatgcccaggtgcagcctatattattaacagacaaggaaagaatccaaataaaagttctgtaaaccaaatgtt

SEQ ID NO: 377244 - DNA, 1050 bp, Homo sapiens
taatgttttacttatatatgatttgttaatgtatgtcttttcccactagaaaccgaattctatgacagcaagggtttttgttttcattattgtcatattacctgtgcctggcatgtgataagccctaagtacttgttgactgaattaacatatgagatctgtgagtctgaaaaaagaagtacatcattccttcacatgtcattttgagccactgttaacagattacataactgttattggaagtgcctcactactccatttggaaagtattcctggaatacacgatgaatgactcagtagaagttctggctatgggggagtgccatcaataaataaaaataataccattgtctgttggttataagttgctgtcacagactatgaaggtatttgaattgtattttcaggaagagaaacagatatgcaaccaatctgatttggttccacaccctgccacagaagtcccaaaggagaagcaaatgccacttgtagactcaaactctggacttcattctcagcaccatctcttaacctactgagtaaatcctatgaacctgactagggtggcaactgaagttgtagtactttctgtcttcaaaggagggtgaacctggagtatgttggaagaagtgttaggttcattagagacacctctttcataactgctgtcacctagaatgtctattctctaagcaccttcttgaaagaagcacattcccccaggaggaggaaatggtttgttttctttagtgacagttggcccaggatcctaaggtaaaggagtatgggcactagacaaaatgagttttataatagtcgattggaaggaatggaagtttttgaatcacaggcttctgccttgaaagggcaagtccgtggtggtcatgaaccacccagagtgtgtacaaggctcctgccagaagaaatgcctgtaggattaaaagcaaaacagcagaatcaaaaaggaagggcacgatgatgcccaggtgcagcctatattattaacagacaaggaaagaatccaaataaaagttctgtaaaccaaatgtt

SEQ ID NO: 377245 - DNA, 1471 bp, Homo sapiens
gcctgagttcgccagtggtccaggagccgcttttttccactcgggaagacttcagagaagtctcacaaaggactcggctggctgcttttctcagtgccgaagccgcgccatgctcgttctcagaagcggcctgaccaaggcgcttgcctcacggacgctcgcgcctcagataattttgctcatcgagctgaagttcggaaagccttagccaactgtaaggaatggcaagaacaatctatcattccaaatttggctcgcattgataaacaagagacggaaattacttacctgataccatggtccaaattagaaaagcctccaaaagaaggagtctatgaactagctgtttttcagatgaaacctggtgggccagctctgtggggtgatgcatttgaaagagcaattaatgcccatgtcaatttaggctacacaaaagtagttggtgttttccacacagaatatggagaactcaacagaggttcacggggtacatgtgaagatttgttacttaggtaaacccatgtcatgggggtttgttgtacagattatttaatcactcagttcatgttctttggtggaatgagagtgcagatagtcgtgcagctgggagacataagtcccatgaggatcccagagttgtggcggctgttcgggaaagtgtcaactacctagtttctcagcagaatatgcttctgattcctgcatcattttcaccattgaaatagttttctactgaaatacaaaacatttcattaactgctctaagatgtgtctgctaatggtgcttaaattctcccaagaggttctcgcttttatttgaaggaggtggaagagaaacagatatgcaaccaatctgatttggttccacaccctgccacagaagtcccaaaggagaagcaaatgccacttgtagactcaaactctggacttcattctcagcaccatctcttaacctactgagtaaatcctatgaacctgactagggtggcaactgaagttgtagtactttctgtcttcaaaggagggtgaacctggagtatgttggaagaagtgttaggttcattagagacacctctttcataactgctgtcacctagaatgtctattctctaagcaccttcttgaaagaagcacattcccccaggaggaggaaatggtttgttttctttagtgacagttggcccaggatcctaaggtaaaggagtatgggcactagacaaaatgagttttataatagtcgattggaaggaatggaagtttttgaatcacaggcttctgccttgaaagggcaagtccgtggtggtcatgaaccacccagagtgtgtacaaggctcctgccagaagaaatgcctgtaggattaaaagcaaaacagcagaatcaaaaaggaagggcacgatgatgcccaggtgcagcctatattattaacagacaaggaaagaatccaaataaaagttctgtaaaccaaatgtt

SEQ ID NO: 377246 - DNA, 1650 bp, Homo sapiens
ttctgattcctacatcgttttcaccactgaaatagttttctactgaaatacaaaacatttcattaactgctataggatctgtctgctaatggtgcttaaattctcccaagaggttctcacttttatttgaaggaggtgtgtgttcatcttttgctacgggccctagacaatacgatggaacgttctatgaatttcgtacttattaccttaaaccttcaaatatgaatgcgttcatggaaaatcttaagaaaaacattcatcttcggacctcttactctgaattggttggattctggagtgtagaatttggaggcagaacgaataaagtgtttcatatttggaagtatgataattttgctcatcgagctgaagttcggaaagccttagccaactgtaaggaatggcaagaacaatctatcattccaaatttggctcgcattgataaacaagagacggaaattacttacctgataccatggtccaaattagaaaagcctccaaaagaaggagtctatgaactagctgtttttcagatgaaacctggtgggccagctctgtggggtgatgcatttgaaagagcaattaatgcccatgtcaatttaggctacacaaaagtagttggtgttttccacacagaatatggagaactcaacagaggttcacggggtacatgtgaagatttgttacttaggtaaacccatgtcatgggggtttgttgtacagattatttaatcactcagttcatgttctttggtggaatgagagtgcagatagtcgtgcagctgggagacataagtcccatgaggatcccagagttgtggcggctgttcgggaaagtgtcaactacctagtttctcagcagaatatgcttctgattcctgcatcattttcaccattgaaatagttttctactgaaatacaaaacatttcattaactgctctaagatgtgtctgctaatggtgcttaaattctcccaagaggttctcgcttttatttgaaggaggtggaagagaaacagatatgcaaccaatctgatttggttccacaccctgccacagaagtcccaaaggagaagcaaatgccacttgtagactcaaactctggacttcattctcagcaccatctcttaacctactgagtaaatcctatgaacctgactagggtggcaactgaagttgtagtactttctgtcttcaaaggagggtgaacctggagtatgttggaagaagtgttaggttcattagagacacctctttcataactgctgtcacctagaatgtctattctctaagcaccttcttgaaagaagcacattcccccaggaggaggaaatggtttgttttctttagtgacagttggcccaggatcctaaggtaaaggagtatgggcactagacaaaatgagttttataatagtcgattggaaggaatggaagtttttgaatcacaggcttctgccttgaaagggcaagtccgtggtggtcatgaaccacccagagtgtgtacaaggctcctgccagaagaaatgcctgtaggattaaaagcaaaacagcagaatcaaaaaggaagggcacgatgatgcccaggtgcagcctatattattaacagacaaggaaagaatccaaataaaagttctgtaaaccaaatgtt

SEQ ID NO: 377247 - DNA, 738 bp, Homo sapiens
catcttaatttcatttatgttaactttgattcaaagtgtaccttgacctaatcacccaccaccaaggaaaaatagtctttctctataaatcaaatgcttccattgataagaatcgttaacatatactgagtactaactaaggtgccaaacaccattctaagctcttttcatgtactaattcatttaatcctcacaacaacactggaggtagatgttatactattttcttcacagaataagaaactgaggcacagaaagattgaataacgaacctaattcacacaacttcctaagaaagtcttagagcctataaagcccattctatgtcaattaagttagttttttacatttcaactccccttttagaccatgagtaacttgagagcagttgtcacatatatttatgttggcatctccagcgacataataacatggggttcccatatggccttgcacgtttgctgaactgagtaaaattcaagtaaaaatatgggcgattttaaataaaaaaacattttcttaactattttcctcccatagataattttgctcatcgagctgaagttcggaaagccttagccaactgtaaggaatggcaagaacaatctatcattccaaatttggctcgcattgataaacaagagacggaaattacttacctgataccatggtccaaattagaaaagcctccaaaagaagaaggtgagttcttccctcttagactatgagttttaatga

SEQ ID NO: 377248 - DNA, 1635 bp, Homo sapiens
  misc_feature (1634)..(1635): n is a, c, g, or t
gcctgagttcgccagtggtccaggagccgcttttttccactcgggaagacttcagagaagtctcacaaaggactcggctggctgcttttctcagtgccgaagccgcgccatgctcgttctcagaagcggcctgaccaaggcgcttgcctcacggacgctcgcgcctcaggtgtgttcatcttttgctacgggccctagacaatacgatggaacgttctatgaatttcgtacttattaccttaaaccttcaaatatgaatgcgttcatggaaaatcttaagaaaaacattcatcttcggacctcttactctgaattggttggattctggagtgtagaatttggaggcagaacgaataaagtgtttcatatttggaagtatgataattttgctcatcgagctgaagttcggaaagccttagccaactgtaaggaatggcaagaacaatctatcattccaaatttggctcgcattgataaacaagagacggaaattacttacctgataccatggtccaaattagaaaagcctccaaaagaaggagtctatgaactagctgtttttcagatgaaacctggtgggccagctctgtggggtgatgcatttgaaagagcaattaatgcccatgtcaatttaggctacacaaaagtagttggtgttttccacacagaatatggagaactcaacagagttcatgttctttggtggaatgagagtgcagatagtcgtgcagctgggagacataagtcccatgaggatcccagagttgtggcggctgttcgggaaagtgtcaactacctagtttctcagcagaatatgcttctgattcctgcatcattttcaccattgaaatagttttctactgaaatacaaaacatttcattaactgctctaagatgtgtctgctaatggtgcttaaattctcccaagaggttctcgcttttatttgaaggaggtggtaagttaattagttaatttgctgtgcttcttgcatttttgaaagttacatattctccactgctttaagaaataattcagttcactttcaccttggcatttcagtatctgttacacattagaagtagttgtcactatttcatcatcttggtttttcatttgttttagaatacctcttctgtattttgataactcattgctttatagcattttcttttactcaaataaggattttacatttccttgcctgacagtatttttgaattatttatataaaatatctatcttttcatcatgtctatagttcctgagattttaaaaaaatttgcttagtaaaggttattttgtgatataaaatgggatttataaaaatattagattgtttatttctttactgtggaaaagtagaatgtcatctgtattaattattgcttttacattcattgattattagtcattctaacttggaaaataatgcaattgggtcacagtgttaaaaatctagaaaagacttgttggtttatatgctgaaattgttcatttataattaattttactaatttctccttagtttggatcactaacagagatcttgggacatttatttgttttaaagaaatatttatggttatggaaacgcttgccctaataaaaatcctgcatattcattgtttttttnn

SEQ ID NO: 377249 - DNA, 1628 bp, Homo sapiens
gcctgagttcgccagtggtccaggagccgcttttttccactcgggaagacttcagagaagtctcacaaaggactcggctggctgcttttctcagtgccgaagccgcgccatgctcgttctcagaagcggcctgaccaaggcgcttgcctcacggacgctcgcgcctcaggtgtgttcatcttttgctacgggccctagacaatacgatggaacgttctatgaatttcgtacttattaccttaaaccttcaaatatgaatgcgttcatggaaaatcttaagaaatttggaggcagaacgaataaagtgtttcatatttggaagtatgataattttgctcatcgagctgaagttcggaaagccttagccaactgtaaggaatggcaagaacaatctatcattccaaatttggctcgcattgataaacaagagacggaaattacttacctgataccatggtccaaattagaaaagcctccaaaagaaggagtctatgaactagctgtttttcagatgaaacctggtgggccagctctgtggggtgatgcatttgaaagagcaattaatgcccatgtcaatttaggctacacaaaagtagttggtgttttccacacagaatatggagaactcaacagaggttcacggggtacatgtgaagatttgttacttaggtaaacccatgtcatgggggtttgttgtacagattatttaatcactcagttcatgttctttggtggaatgagagtgcagatagtcgtgcagctgggagacataagtcccatgaggatcccagagttgtggcggctgttcgggaaagtgtcaactacctagtttctcagcagaatatgcttctgattcctgcatcattttcaccattgaaatagttttctactgaaatacaaaacatttcattaactgctctaagatgtgtctgctaatggtgcttaaattctcccaagaggttctcgcttttatttgaaggaggtggaagagaaacagatatgcaaccaatctgatttggttccacaccctgccacagaagtcccaaaggagaagcaaatgccacttgtagactcaaactctggacttcattctcagcaccatctcttaacctactgagtaaatcctatgaacctgactagggtggcaactgaagttgtagtactttctgtcttcaaaggagggtgaacctggagtatgttggaagaagtgttaggttcattagagacacctctttcataactgctgtcacctagaatgtctattctctaagcaccttcttgaaagaagcacattcccccaggaggaggaaatggtttgttttctttagtgacagttggcccaggatcctaaggtaaaggagtatgggcactagacaaaatgagttttataatagtcgattggaaggaatggaagtttttgaatcacaggcttctgccttgaaagggcaagtccgtggtggtcatgaaccacccagagtgtgtacaaggctcctgccagaagaaatgcctgtaggattaaaagcaaaacagcagaatcaaaaaggaagggcacgatgatgcccaggtgcagcctatattattaacagacaaggaaagaatccaaataaaagttctgtaaaccaaatgtt

SEQ ID NO: 377250 - DNA, 1554 bp, Homo sapiens
gcctgagttcgccagtggtccaggagccgcttttttccactcgggaagacttcagagaagtctcacaaaggactcggctggctgcttttctcagtgccgaagccgcgccatgctcgttctcagaagcggcctgaccaaggcgcttgcctcacggacgctcgcgcctcaggtgtgttcatcttttgctacgggccctagacaatacgatggaacgttctatgaatttcgtacttattaccttaaaccttcaaatatgaatgcgttcatggaaaatcttaagaaaaacattcatcttcggacctcttactctgaattggttggattctggagtgtagaatttggaggcagaacgaataaagtgtttcatatttggaagtatgataattttgctcatcgagctgaagttcggaaagccttagccaactgtaaggaatggcaagaacaatctatcattccaaatttggctcgcattgataaacaagagacggaaattacttacctgataccatggtccaaattagaaaagcctccaaaagaagctctgtggggtgatgcatttgaaagagcaattaatgcccatgtcaatttaggctacacaaaagtagttggtgttttccacacagaatatggagaactcaacagagttcatgttctttggtggaatgagagtgcagatagtcgtgcagctgggagacataagtcccatgaggatcccagagttgtggcggctgttcgggaaagtgtcaactacctagtttctcagcagaatatgcttctgattcctgcatcattttcaccattgaaatagttttctactgaaatacaaaacatttcattaactgctctaagatgtgtctgctaatggtgcttaaattctcccaagaggttctcgcttttatttgaaggaggtggaagagaaacagatatgcaaccaatctgatttggttccacaccctgccacagaagtcccaaaggagaagcaaatgccacttgtagactcaaactctggacttcattctcagcaccatctcttaacctactgagtaaatcctatgaacctgactagggtggcaactgaagttgtagtactttctgtcttcaaaggagggtgaacctggagtatgttggaagaagtgttaggttcattagagacacctctttcataactgctgtcacctagaatgtctattctctaagcaccttcttgaaagaagcacattcccccaggaggaggaaatggtttgttttctttagtgacagttggcccaggatcctaaggtaaaggagtatgggcactagacaaaatgagttttataatagtcgattggaaggaatggaagtttttgaatcacaggcttctgccttgaaagggcaagtccgtggtggtcatgaaccacccagagtgtgtacaaggctcctgccagaagaaatgcctgtaggattaaaagcaaaacagcagaatcaaaaaggaagggcacgatgatgcccaggtgcagcctatattattaacagacaaggaaagaatccaaataaaagttctgtaaaccaaatgtt

SEQ ID NO: 377251 - DNA, 2581 bp, Homo sapiens
tcctaaaagccatgggcagcagtttccgagggcctgcatgatccacctgctgcacgatcctatgagggcttcctgtggcacacagccctctgggtgcttgggaactagcttcaggcacagcctgattctggtgatccagtgatctatggaagtcgtgtcttactccaggtgaagggggaaaaaaaaagcctatactttggcaggttatgaactttgaatgtgatgaaatgacacgtttggctgcatttggatggtgtcttagaaccctcattgctcagacctgaaggctacttctaggagcatgaagtttgagttttgtgtttttccaaaggatacttccttggccctttttctttattgactagaccaccagaggaggatgtgtgggattgtaggcaaacccacctgtggcatcactgaaaataaatttgatcatacctaagaggttaggaaatggtgccattcccaccttagagtgctacataggtgcttgggcgtatgtaacattagtgtccttccttgaagccacaagctagttttcttagttttaaaatcctgttgtatgaatggcatttgtatattaaaacacttttttaaaggacagttgaaaagggcaagaggaaaccagggcagttctagaggagtgctggtgactggatagcagttttaagtggcgttcacctagtcaacacgaccgcgtgtgttgcccctgccctgggctccccgccatgacatcttcaccttgcagcttgtgctgagactgacccaagtgcagctagcactgggacacagatccttgtcttcagcaccttccaaggagccaacttttattccctttcctctctcccctccccacctcgcttcttcccaatttagtaacttagatgcttccagcacatacgtaggtagctaccccagccggtttggattacaggcctgtgctggaacatcatctcagttggccaccttcctggcaggctgtagacctgacattttgagacaagcctagagtcaggagcagggactttgactcttaggaagagcacacatgagggcaaggctgctggcagacgtctccattgtccttatgttgtctgtgttgtatttttttttttttattgaccatggtgattatttttttaaaccatcgttaatatactgaagtgagctatagcacatatcatgtgcttagtttgtttatttttctccatctccccttggcttcctagagtttggacatattccaggctaaatgcttttactcaagactacagaaaggtttgaagtagtgtgtgcatggcatgcacgtatgtaagtaatctggggaagaagcaaagatctgtttcattcttagcctcaggcctcatgagggtctccacagggccggagctcaggttacaccactccttcgtccttacaggagatgtagggagaagaatctgcaggctgcttgtaggactgttcaccaagggggataccagcagcaagagagtgcacccgtttagccctggaccctgtttcttactgtgtgacttggctagagttgggagttcccccaaaataaacgtgtccccattttaccagaaccaaacctcaacacagcgaagctgtactgtctttgtgtggcaaagatgttcccttgtaggcccctttcaggtaaccgtcttcacaatgtattttcatcacagtttaaggagcatcagccgcttctcaagtgggtagggaaagcagaaaaacgtacgcaagaggacatggatccaaaatgatgatgaagcatctcccatggggaggtgatggtggggagatgatgggctaaacaggcaacttttcaaaaacacagctatcatagaaaagaaacttgcctcatgtaaactggattgagaaattctcagtgattctgcaatggatttttttttaatgcagaagtaatgtatactctagtattctggtgtttttatatttatgtaataatttcttaaaaccattcagacagataactatttaattttttttaagaaagttggaaaggtctctcctcccaaggacagtggctggaagagttggggcacagccagttctgaatgttggtggagggtgtagtggctttttggctcagcatccagaaacaccaaaccaggctggctaaacaagtggccgcgtgtaaaaacagacagctctgagtcaaatctgggcccttccacaagggtcctctgaaccaagccccactcccttgctaggggtgaaagcattacagagagatggagccatctatccaagaagccttcactcaccttcactgctgctgttgcaactcggctgttctggactctgatgtgtgtggagggatggggaatagaacattgactgtgttgattaccttcactattcggccagcctgaccttttaataactttgtaaaaagcatgtatgtatttatagtgttttagatttttctaacttttatatcttaaaagcagagcacctgtttaagcattgtacccctattgttaaagatttgtgtcctctcattccctctcttcctcttgtaagtgcccttctaataaacttttcatggaaaagc

SEQ ID NO: 377252 - DNA, 2635 bp, Homo sapiens
tcctaaaagccatgggcagcagtttccgagggcctgcatgatccacctgctgcacgatcctatgagggcttcctgtggcacacagccctctgggtgcttgggaactagcttcaggcacagcctgattctggtgatccagtgatctatggaagtcgtgtcttactccaggtgaagggggaaaaaaaaagcctatactttggcaggttatgaactttgaatgtgatgaaatgacacgtttggctgcatttggatggtgtcttagaaccctcattgctcagacctgaaggctacttctaggagcatgaagtttgagttttgtgtttttccaaaggatacttccttggccctttttctttattgactagaccaccagaggaggatgtgtgggattgtaggcaaacccacctgtggcatcactgaaaataaatttgatcatacctaagaggttaggaaatggtgccattcccaccttagagtgctacataggtgcttgggcgtatgtaacattagtgtccttccttgaagccacaagctagttttcttagttttaaaatcctgttgtatgaatggcatttgtatattaaaacacttttttaaaggacagttgaaaagggcaagaggaaaccagggcagttctagaggagtgctggtgactggatagcagttttaagtggcgttcacctagtcaacacgaccgcgtgtgttgcccctgccctgggctccccgccatgacatcttcaccttgcagcttgtgctgagactgacccaagtgcagctagcactgggacacagatccttgtcttcagcaccttccaaggagccaacttttattccctttcctctctcccctccccacctcgcttcttcccaatttagtaacttagatgcttccagcacatacgtaggtagctaccccagccggtttggattacaggcctgtgctggaacatcatctcagttggccaccttcctggcaggctgtagacctgacattttgagacaagcctagagtcaggagcagggactttgactcttaggaagagcacacatgagggcaaggctgctggcagacgtctccattgtccttatgttgtctgtgttgtatttttttttttttattgaccatggtgattatttttttaaaccatcgttaatatactgaagtgagctatagcacatatcatgtgcttagtttgtttatttttctccatctccccttggcttcctagagtttggacatattccaggctaaatgcttttactcaagactacagaaaggtttgaagtagtgtgtgcatggcatgcacgtatgtaagtaatctggggaagaagcaaagatctgtttcattcttagcctcaggcctcatgagggtctccacagggccggagctcaggttacaccactccttcgtccttacaggagatgtagggagaagaatctgcaggctgcttgtaggactgttcaccaagggggataccagcagcaagagagtgcacccgtttagccctggaccctgtttcttactgtgtgacttggctagagttgggagttcccccaaaataaacgtgtccccattttaccagaaccaaacctcaacacagcgaagctgtactgtctttgtgtggcaaagatgttcccttgtaggcccctttcaggtaaccgtcttcacaatgtattttcatcacagtttaaggagcatcagccgcttctcaagtgggtagggaaagcagaaaaacgtacgcaagaggacatggatccaaaatgatgatgaagcatctcccatggggaggtgatggtggggagatgatgggctaaacaggcaacttttcaaaaacacagctatcatagaaaagaaacttgcctcatgtaaactggattgagaaattctcagtgattctgcaatggatttttttttaatgcagaagtaatgtatactctagtattctggtgtttttatatttatgtaataatttcttaaaaccattcagacagataactatttaattttttttaagaaagttggaaaggtctctcctcccaaggacagtggctggaagagttggggcacagccagttctgaatgttggtggagggtgtagtggctttttggctcagcatccagaaacaccaaaccaggctggctaaacaagtggccgcgtgtaaaaacagacagctctgagtcaaatctgggcccttccacaagggtcctctgaaccaagccccactcccttgctaggggtgaaagcattacagagagatggagccatctatccaagaagccttcactcaccttcactgctgctgttgcaactcggctgttctggactctgatgtgtgtggagggatggggaatagaacattgactgtgttgattaccttcactattcggccagcctgaccttttaataactttgtaaaaagcatgtatgtatttatagtgttttagatttttctaacttttatatcttaaaagcagagcacctgtttaagcattgtacccctattgttaaagatttgtgtcctctcattccctctcttcctcttgtaagtgcccttctaataaacttttcatggaaaagcaaaaaccaatatattaggtccacccggccgccaatttagtagtaattgtcgacc

SEQ ID NO: 377253 - DNA, 2602 bp, Homo sapiens
tcctaaaagccatgggcagcagtttccgagggcctgcatgatccacctgctgcacgatcctatgagggcttcctgtggcacacagccctctgggtgcttgggaactagcttcaggcacagcctgattctggtgatccagtgatctatggaagtcgtgtcttactccaggtgaagggggaaaaaaaaagcctatactttggcaggttatgaactttgaatgtgatgaaatgacacgtttggctgcatttggatggtgtcttagaaccctcattgctcagacctgaaggctacttctaggagcatgaagtttgagttttgtgtttttccaaaggatacttccttggccctttttctttattgactagaccaccagaggaggatgtgtgggattgtaggcaaacccacctgtggcatcactgaaaataaatttgatcatacctaagaggttaggaaatggtgccattcccaccttagagtgctacataggtgcttgggcgtatgtaacattagtgtccttccttgaagccacaagctagttttcttagttttaaaatcctgttgtatgaatggcatttgtatattaaaacacttttttaaaggacagttgaaaagggcaagaggaaaccagggcagttctagaggagtgctggtgactggatagcagttttaagtggcgttcacctagtcaacacgaccgcgtgtgttgcccctgccctgggctccccgccatgacatcttcaccttgcagcttgtgctgagactgacccaagtgcagctagcactgggacacagatccttgtcttcagcaccttccaaggagccaacttttattccctttcctctctcccctccccacctcgcttcttcccaatttagtaacttagatgcttccagcacatacgtaggtagctaccccagccggtttggattacaggcctgtgctggaacatcatctcagttggccaccttcctggcaggctgtagacctgacattttgagacaagcctagagtcaggagcagggactttgactcttaggaagagcacacatgagggcaaggctgctggcagacgtctccattgtccttatgttgtctgtgttgtatttttttttttttattgaccatggtgattatttttttaaaccatcgttaatatactgaagtgagctatagcacatatcatgtgcttagtttgtttatttttctccatctccccttggcttcctagagtttggacatattccaggctaaatgcttttactcaagactacagaaaggtttgaagtagtgtgtgcatggcatgcacgtatgtaagtaatctggggaagaagcaaagatctgtttcattcttagcctcaggcctcatgagggtctccacagggccggagctcaggttacaccactccttcgtccttacaggagatgtagggagaagaatctgcaggctgcttgtaggactgttcaccaagggggataccagcagcaagagagtgcacccgtttagccctggaccctgtttcttactgtgtgacttggctagagttgggagttcccccaaaataaacgtgtccccattttaccagaaccaaacctcaacacagcgaagctgtactgtctttgtgtggcaaagatgttcccttgtaggcccctttcaggtaaccgtcttcacaatgtattttcatcacagtttaaggagcatcagccgcttctcaagtgggtagggaaagcagaaaaacgtacgcaagaggacatggatccaaaatgatgatgaagcatctcccatggggaggtgatggtggggagatgatgggctaaacaggcaacttttcaaaaacacagctatcatagaaaagaaacttgcctcatgtaaactggattgagaaattctcagtgattctgcaatggatttttttttaatgcagaagtaatgtatactctagtattctggtgtttttatatttatgtaataatttcttaaaaccattcagacagataactatttaattttttttaagaaagttggaaaggtctctcctcccaaggacagtggctggaagagttggggcacagccagttctgaatgttggtggagggtgtagtggctttttggctcagcatccagaaacaccaaaccaggctggctaaacaagtggccgcgtgtaaaaacagacagctctgagtcaaatctgggcccttccacaagggtcctctgaaccaagccccactcccttgctaggggtgaaagcattacagagagatggagccatctatccaagaagccttcactcaccttcactgctgctgttgcaactcggctgttctggactctgatgtgtgtggagggatggggaatagaacattgactgtgttgattaccttcactattcggccagcctgaccttttaataactttgtaaaaagcatgtatgtatttatagtgttctaattactaccttttattctaatgtgaaccctggccctgaaagctgataaccagcttggctgagccgagggacatgcacccggttgatttctgactggcccggacatccaagcgctgtctgcatgagtgctgatccctcccttaccttttaatctcgc

SEQ ID NO: 377254 - DNA, 1798 bp, Homo sapiens
tcctaaaagccatgggcagcagtttccgagggcctgcatgatccacctgctgcacgatcctatgagggcttcctgtggcacacagccctctgggtgcttgggaactagcttcaggcacagcctgattctggtgatccagtgatctatggaagtcgtgtcttactccaggtgaagggggaaaaaaaaagcctatactttggcaggttatgaactttgaatgtgatgaaatgacacgtttggctgcatttggatggtgtcttagaaccctcattgctcagacctgaaggctacttctaggagcatgaagtttgagttttgtgtttttccaaaggatacttccttggccctttttctttattgactagaccaccagaggaggatgtgtgggattgtaggcaaacccacctgtggcatcactgaaaataaatttgatcatacctaagaggttaggaaatggtgccattcccaccttagagtgctacataggtgcttgggcgtatgtaacattagtgtccttccttgaagccacaagctagttttcttagttttaaaatcctgttgtatgaatggcatttgtatattaaaacacttttttaaaggacagttgaaaagggcaagaggaaaccagggcagttctagaggagtgctggtgactggatagcagttttaagtggcgttcacctagtcaacacgaccgcgtgtgttgcccctgccctgggctccccgccatgacatcttcaccttgcagcttgtgctgagactgacccaagtgcagctagcactgggacacagatccttgtcttcagcaccttccaaggagccaacttttattccctttcctctctcccctccccacctcgcttcttcccaatttagtaacttagatgcttccagcacatacgtaggtagctaccccagccggtttggattacaggcctgtgctggaacatcatctcagttggccaccttcctggcaggctgtagacctgacattttgagacaagcctagagtcaggagcagggactttgactcttaggaagagcacacatgagggcaaggctgctggcagacgtctccattgtccttatgttgtctgtgttgtatttttttttttttattgaccatggtgattatttttttaaaccatcgttaatatactgaagtgagctatagcacatatcatgtgcttagtttgtttatttttctccatctccccttggcttcctagagtttggacatattccaggctaaatgcttttactcaagactacagaaaggtttgaagtagtgtgtgcatggcatgcacgtatgtaagtaatctggggaagaagcaaagatctgtttcattcttagcctcaggcctcatgagggtctccacagggccggagctcaggttacaccactccttcgtccttacaggagatgtagggagaagaatctgcaggctgcttgtaggactgttcaccaagggggataccagcagcaagagagtgcacccgtttagccctggaccctgtttcttactgtgtgacttggctagagttgggagttcccccaaaataaacgtgtccccattttaccagaaccaaacctcaacacagcgaagctgtactgtctttgtgtggcaaagatgttcccttgtaggcccctttcaggtaaccgtcttcacaatgtattttcatcacagtttaaggagcatcagccgcttctcaagtgggtagtggcgctgccctatactccctctacatatttaccacaacacaatgaggctagtgacgggatgaggctagtgcgctg

SEQ ID NO: 377255 - DNA, 2605 bp, Homo sapiens
tcctaaaagccatgggcagcagtttccgagggcctgcatgatccacctgctgcacgatcctatgagggcttcctgtggcacacagccctctgggtgcttgggaactagcttcaggcacagcctgattctggtgatccagtgatctatggaagtcgtgtcttactccaggtgaagggggaaaaaaaaagcctatactttggcaggttatgaactttgaatgtgatgaaatgacacgtttggctgcatttggatggtgtcttagaaccctcattgctcagacctgaaggctacttctaggagcatgaagtttgagttttgtgtttttccaaaggatacttccttggccctttttctttattgactagaccaccagaggaggatgtgtgggattgtaggcaaacccacctgtggcatcactgaaaataaatttgatcatacctaagaggttaggaaatggtgccattcccaccttagagtgctacataggtgcttgggcgtatgtaacattagtgtccttccttgaagccacaagctagttttcttagttttaaaatcctgttgtatgaatggcatttgtatattaaaacacttttttaaaggacagttgaaaagggcaagaggaaaccagggcagttctagaggagtgctggtgactggatagcagttttaagtggcgttcacctagtcaacacgaccgcgtgtgttgcccctgccctgggctccccgccatgacatcttcaccttgcagcttgtgctgagactgacccaagtgcagctagcactgggacacagatccttgtcttcagcaccttccaaggagccaacttttattccctttcctctctcccctccccacctcgcttcttcccaatttagtaacttagatgcttccagcacatacgtaggtagctaccccagccggtttggattacaggcctgtgctggaacatcatctcagttggccaccttcctggcaggctgtagacctgacattttgagacaagcctagagtcaggagcagggactttgactcttaggaagagcacacatgagggcaaggctgctggcagacgtctccattgtccttatgttgtctgtgttgtatttttttttttttattgaccatggtgattatttttttaaaccatcgttaatatactgaagtgagctatagcacatatcatgtgcttagtttgtttatttttctccatctccccttggcttcctagagtttggacatattccaggctaaatgcttttactcaagactacagaaaggtttgaagtagtgtgtgcatggcatgcacgtatgtaagtaatctggggaagaagcaaagatctgtttcattcttagcctcaggcctcatgagggtctccacagggccggagctcaggttacaccactccttcgtccttacaggagatgtagggagaagaatctgcaggctgcttgtaggactgttcaccaagggggataccagcagcaagagagtgcacccgtttagccctggaccctgtttcttactgtgtgacttggctagagttgggagttcccccaaaataaacgtgtccccattttaccagaaccaaacctcaacacagcgaagctgtactgtctttgtgtggcaaagatgttcccttgtaggcccctttcaggtaaccgtcttcacaatgtattttcatcacagtttaaggagcatcagccgcttctcaagtgggtagggaaagcagaaaaacgtacgcaagaggacatggatccaaaatgatgatgaagcatctcccatggggaggtgatggtggggagatgatgggctaaacaggcaacttttcaaaaacacagctatcatagaaaagaaacttgcctcatgtaaactggattgagaaattctcagtgattctgcaatggatttttttttaatgcagaagtaatgtatactctagtattctggtgtttttatatttatgtaataatttcttaaaaccattcagacagataactatttaattttttttaagaaagttggaaaggtctctcctcccaaggacagtggctggaagagttggggcacagccagttctgaatgttggtggagggtgtagtggctttttggctcagcatccagaaacaccaaaccaggctggctaaacaagtggccgcgtgtaaaaacagacagctctgagtcaaatctgggcccttccacaagggtcctctgaaccaagccccactcccttgctaggggtgaaagcattacagagagatggagccatctatccaagaagccttcactcaccttcactgctgctgttgcaactcggctgttctggactctgatgtgtgtggagggatggggaatagaacattgactgtgttgattaccttcactattcggccagcctgaccttttaataactttgtaaaaagcatgtatgtatttatagtgttttagatttttctaacttttatatcttaaaagcagagcacctgtttaagcattgtacccctattgttaaagatttgtgtcctctcattccctctcttcctcttgtaagtgcccttctaataaacttttcatggaaaagctcctgtgccaggagctcagtctga

SEQ ID NO: 377256 - DNA, 412 bp, Homo sapiens
gctatggtaagacgtgcttgcttcccctttgccatctgccatgaatataagtttcccgaggcctcctagtcatgctttctattaagcctgcagaactgtgagtcaattaaacctctttttgtcataaattgcccagtctcaggtagttttttatagcagtgtgaaaacagactaatacattggaattataggtctgtgccaccacacctggctaatattttggtatttttttgtagagatagggtctcactatgttgcccaggctggtataattgaatttttaacattaatcttgtatttgcaattttgtaaaaaccacttatgagttctaacagcttttcttgtggattttgctagattttctatatattcaggatttgttatctatgaataaagacagttttacttcctt

SEQ ID NO: 377257 - DNA, 348 bp, Homo sapiens
ctcccgggtctcagattccccccttctcaattagagatggttcttccctcccagccatgcagaattgctgtgcacacaaaggatgagtaagtatgtcaaaggctttgcaaagtatgcaaaactaaagaatcgtaaggtgttcctaacatggagaaactgcaaccacttgactcagcatttgctcttgcagggtctcctgacaaactggcagagatccaaaacaagaatgagtgagaaggccccatgaggttattcgactccttatacttgagcttggcagcttctggcactaagacgcctgcgcatttcttcctgggtacatttcctctagttggtccagatgagagg

SEQ ID NO: 377258 - DNA, 214 bp, Homo sapiens
caactctgcctcccctactgcacagtgggcttctcaagcaccatgaccttgtctttttctacttaagttcccggtaccccaacagtgccaggtttatgataaattttcagtgaatatcaatacgttgaatgaaccaagttttctttttcttactgccctgggtcatatacagagatacacacagaaaaatgtgtttttgaaaagaaaaagcaca

SEQ ID NO: 377259 - DNA, 1544 bp, Homo sapiens
ccgggaagccggagtctagagctccgggcgcggggaggcgcggccatggcagctccggagccgctgtccccggcgggcggtgcgggcgaggaggcgccggaggaggacgaggacgaagcggaggccgaggaccctgagcggccgaatgcgggagcgggcggtggacgcagtggcggcggcggcagtagcgtcagcggaggaggcggcggcggcggggccggggcggggggctgcggcgggcccgggggcgcgctcaccaggcgcgcggtcacactgcgggtgctcctcaaagacgcgctgctggagcctggcgccggggtgctgtccatctactacctggggaagaagttcctgggcgacctgcagccagacggaaggatcatgtggcaggagaccgggcagaccttcaactcacccagcgcctgggccacccactgcaagaagctggtgaaccctgccaagaagtcgggctgtggctgggcctctgtcaagtacaaaggccagaaactggacaagtacaaggccacctggctccggctgcaccagctgcacacgcctgccacggctgctgatgagagcccagccagtgaaggggaggaggaggagttgctgatggaagaggaggaggaggacgttctggcgggggtctcagcagaggacaagagtcggagaccactggggaagagcccttcagagcctgcccacccggaggccacaaccccagggaagcgggtggacagcaagatccgggttccggtccgctactgcatgctgggcagccgcgacttggccaggaacccccacaccctggtggaagtaacatcctttgcagccatcaacaagttccagccgttcaacgtggctgtttctagcaacgtgctgttcctgctgatctaccagagcctgttcctgcggggcctgtccctggtgggctggtaccacagccacccacacagcccggcgctgccatctctgcaggacatcgacgcacagatggactaccagctgcggctgcagggctccagcaatggcttccagccctgcctcgccctgctctgctccccttactattctggcaacccaggccccgagtccaagatctcgcctttctgggtgatgcctcctcccgagcaaaggcccagtgactatggcatccccatggatgtggagatggcctacgtccaggacagcttcctgaccaatgacatccttcacgagatgatgctgctggtggagttctacaagggttcccctgacctcgtgaggctccaggaaccctggagccaggagcacacctacctcgacaagcttaagatctccttggccagcaggacgcccaaggaccagagcctgtgtcacgtcctggaacaggtgtgcggcgtcctcaagcaggggagctgagccttccagggcagggtgggctccagttgtcttgagggtccggatgggctcaggtaataaagaaacggaagcagcagccagccacgctggtctccccaaggctggggtgagggtggctgggtgcccaggctggtaccatcacc

SEQ ID NO: 377260 - DNA, 1627 bp, Homo sapiens
ccgggaagccggagtctagagctccgggcgcggggaggcgcggccatggcagctccggagccgctgtccccggcgggcggtgcgggcgaggaggcgccggaggaggacgaggacgaagcggaggccgaggaccctgagcggccgaatgcgggagcgggcggtggacgcagtggcggcggcggcagtagcgtcagcggaggaggcggcggcggcggggccggggcggggggctgcggcgggcccgggggcgcgctcaccaggcgcgcggtcacactgcgggtgctcctcaaagacgcgctgctggagcctggcgccggggtgctgtccatctactacctggggaagaagttcctgggcgacctgcagccagacggaaggatcatgtggcaggagaccgggcagaccttcaactcacccagcgcctgggccacccactgcaagaagctggtgaaccctgccaagaagtcgggctgtggctgggcctctgtcaagtacaaaggccagaaactggacaagtacaaggccacctggctccggctgcaccagctgcacacgcctgccacggctgctgatgagagcccagccagtgaaggggaggaggaggagttgctgatggaagaggaggaggaggacgttctggcgggggtctcagcagaggacaagagtcggagaccactggggaagagcccttcagagcctgcccacccggaggccacaaccccagggaagcgggtggacagcaagatccgggttccggtccgctactgcatgctgggcagccgcgacttggccaggaacccccacaccctggtggaagtaacatcctttgcagccatcaacaagttccagccgttcaacgtggctgtttctagcaacgtgctgttcctgctggacttccacagtcacctgacacggagtgaggtcgtgggttacctggggggccgctgggacgtcaacagccagatgctgacggtgctcagagccttcccttgtcggagccggctcggggacgcagagactgcagctgccatcgaagaggagatctaccagagcctgttcctgcggggcctgtccctggtgggctggtaccacagccacccacacagcccggcgctgccatctctgcaggacatcgacgcacagatggactaccagctgcggctgcagggctccagcaatggcttccagccctgcctcgccctgctctgctccccttactattctggcaacccaggccccgagtccaagatctcgcctttctgggtgatgcctcctcccgagcaaaggcccagtgactatggcatccccatggatgtggagatggcctacgtccaggacagcttcctgaccaatgacatccttcacgagatgatgctgctggtggagttctacaagggttcccctgacctcgtgaggctccaggaaccctggagccaggagcacacctacctcgacaagcttaagatctccttggccagcaggacgcccaaggaccagagcctgtgtcacgtcctggaacaggtgtgcggcgtcctcaagcaggggagctgagccttccagggcagggtgggctccagttgtcttgagggtccggatgggctcaggtaataaagaaacggaagcagca

SEQ ID NO: 377261 - DNA, 1584 bp, Homo sapiens
ccgggaagccggagtctagagctccgggcgcggggaggcgcggccatggcaggtacggcgggcccagcggggcggaggcgcggggcgcggggctgcaggggcgcggggctgcagagccgtggggcgagcggcctccctgcagcctctcgctgtccgcagctccggagccgctgtccccggcgggcggtgcgggcgaggaggcgccggaggaggacgaggacgaagcggaggccgaggaccctgagcggccgaatgcgggagcgggcggtggacgcagtggcggcggcggcagtagcgtcagcggaggaggcggcggcggcggggccggggcggggggctgcggcgggcccgggggcgcgctcaccaggcgcgcggtcacactgcgggtgctcctcaaagacgcgctgctggagcctggcgccggggtgctgtccatctactacctggggaagaagttcctgggcgacctgcagccagacggaaggatcatgtggcaggagaccgggcagaccttcaactcacccagcgcctgggccacccactgcaagaagctggtgaaccctgccaagaagtcgggctgtggctgggcctctgtcaagtacaaaggccagaaactggacaagtacaaggccacctggctccggctgcaccagctgcacacgcctgccacggctgctgatgagagcccagccagtgaaggggaggaggaggagttgctgatggaagaggaggaggaggacgttctggcgggggtctcagcagaggacaagagtcggagaccactggggaagagcccttcagagcctgcccacccggaggccacaaccccagggaagcgggtggacagcaagatccgggttccggtccgctactgcatgctgggcagccgcgacttggccaggaacccccacaccctggtggaagtaacatcctttgcagccatcaacaagttccagccgttcaacgtggctgtttctagcaacgtgctgttcctgctgatctaccagagcctgttcctgcggggcctgtccctggtgggctggtaccacagccacccacacagcccggcgctgccatctctgcaggacatcgacgcacagatggactaccagctgcggctgcagggctccagcaatggcttccagccctgcctcgccctgctctgctccccttactattctggcaacccaggccccgagtccaagatctcgcctttctgggtgatgcctcctcccgagcaaaggcccagtgactatggcatccccatggatgtggagatggcctacgtccaggacagcttcctgaccaatgacatccttcacgagatgatgctgctggtggagttctacaagggttcccctgacctcgtgaggctccaggaaccctggagccaggagcacacctacctcgacaagcttaagatctccttggccagcaggacgcccaaggaccagagcctgtgtcacgtcctggaacaggtgtgcggcgtcctcaagcaggggagctgagccttccagggcagggtgggctccagttgtcttgagggtccggatgggctcaggtaataaagaaacggaagcagca

SEQ ID NO: 377262 - DNA, 1364 bp, Homo sapiens
ccgggaagccggagtctagagctccgggcgcggggaggcgcggccatggcagctccggagccgctgtccccggcgggcggtgcgggcgaggaggcgccggaggaggacgaggacgaagcggaggccgaggaccctgagcggccgaatgcgggagcgggcggtggacgcagtggcggcggcggcagtagcgtcagcggaggaggcggcggcggcggggccggggcggggggctgcggcgggcccgggggcgcgctcaccaggcgcgcggtcacactgcgggtgctcctcaaagacgcgctgctggagcctggcgccggggtgctgtccatctactacctggggaagaagttcctgggcgacctgcagccagacggaaggatcatgtggcaggagaccgggcagaccttcaactcacccagcgcctgggccacccactgcaagaagctggtgaaccctgccaagaagtcgggctgtggctgggcctctgtcaagtacaaaggccagaaactggacaagtacaaggccacctggctccggctgcaccagctgcacacgcctgccacggctgctgatgagagcccagccagtgaaggggaggaggaggagttgctgatggaagaggaggaggaggacgttctggcgggggtctcagcagaggacaagagtcggagaccactggggaagagcccttcagagcctgcccacccggaggccacaaccccagggaagcgggtggacagcaagatccgggttccggtccgctactgcatgctgggcagccgcgacttggccaggaacccccacaccctggtggaagtaacatcctttgcagccatcaacaagttccagccgttcaacgtggctgtttctagcaacgtgctgttcctgctggacttccacagtcacctgacacggagtgaggtcgtgggttacctggggggccgctgggacgtcaacagccagatgctgacggtgctcagagccttcccttgtcggagccggctcggggacgcagagactgcagctgccatcgaagaggagatgctgctggtggagttctacaagggttcccctgacctcgtgaggctccaggaaccctggagccaggagcacacctacctcgacaagcttaagatctccttggccagcaggacgcccaaggaccagagcctgtgtcacgtcctggaacaggtgtgcggcgtcctcaagcaggggagctgagccttccagggcagggtgggctccagttgtcttgagggtccggatgggctcaggtaataaagaaacggaagcagcagccagccacgctggtctccccaaggctggggtgagggtggctgggtgcccaggctggtaccatcacc

SEQ ID NO: 377263 - DNA, 1160 bp, Homo sapiens
ccgggaagccggagtctagagctccgggcgcggggaggcgcggccatggcaggtacggcgggcccagcggggcggaggcgcggggcgcggggctgcaggggcgcggggctgcagagccgtggggcgagcggcctccctgcagcctctcgctgtccgcagctccggagccgctgtccccggcgggcggtgcgggcgaggaggcgccggaggaggacgaggacgaagcggaggccgaggaccctgagcggccgaatgcgggagcgggcggtggacgcagtggcggcggcggcagtagcgtcagcggaggaggcggcggcggcggggccggggcggggggctgcggcgggcccgggggcgcgctcaccaggcgcgcggtcacactgcgggtgctcctcaaagacgcgctgctggagcctggcgccggggtgctgtccatctactacctggggaagaagttcctgggcgacctgcagccagacggaaggatcatgtggcaggagaccgggcagaccttcaactcacccagcgcctgggccacccactgcaagaagctggtgaaccctgccaagaagtcgggctgtggctgggcctctgtcaagtacaaaggccagaaactggacaagtacaaggccacctggctccggctgcaccagctgcacacgcctgccacggctgctgatgagagcccagccagtgaaggggaggaggaggagttgctgatggaagaggaggaggaggacgttctggcgggggtctcagcagaggacaagagtcggagaccactggggaagagcccttcagagcctgcccacccggaggccacaaccccagggaagcgggtggacagcaagatccgggttccggtccgctactgcatgctgggcagccgcgacttggccaggaacccccacaccctggtggaagtaacatcctttgcagccatcaacaagttccagccgttcaacgtggctgtttctagcaacgtgctgttcctgctggtgtgtggcccaccctgtctaggggcaaggggctccggagcccagtcggtgggcagcgggcggggctcccctgcgtatcagctccatgagagctggggccttgtctgctttgtttgctactggtacactgtgggtgctcaataaatgtatgaaggagggtgc

SEQ ID NO: 377264 - DNA, 848 bp, Homo sapiens
gtgccactgccctccagcctgggcgacagagcaagactgagtctcaaagagaatgagggcacaggctggctccagtgttggggcagggccacagcctgagccagtcttttgctgttcctcccttccccaggacttccacagtcacctgacacggagtgaggtcgtgggttacctggggggccgctgggacgtcaacagccagagtgggtatccagggccgggtgggcgggggcgttggaggaccggggtcacggggtcacagctgcccctccccacagtgctgacggtgctcagagccttcccttgtcggagccggctcggggacgcagagactgcagctgccatcgaagaggaggtgaggggctacctgggaggtggcattctggggagggttgggaagggacatagctgtcctggcgactgcccagtggctggcagtgttcttcacccttcaccatggggtcccaggtgaagggtgaagaacactgctttttttttttttttttgagacggagtctcgctctgtcacccaggctagagtgcagtggtgcgatctcagctccctgcaagctccgcctcccgggttcacgccattctcctgcctcagcctcccagtgaaaaaaaatttcttcttcgtaaataagagtctcactctgtaactcaggctggagtgcagtggtgtgatcacagctccctgcagcctcaacctcccatgctcaagcgatcctcctgcttcagcactgggattataggcatgcaccaccacacccagtggccacctaatttgttctaacttgggctggggagggactgaccctgcctttttctctcccagaggccacaacccc

SEQ ID NO: 377265 - DNA, 624 bp, Homo sapiens
  misc_feature (373)..(373): n is a, c, g, or t
  misc_feature (382)..(382): n is a, c, g, or t
  misc_feature (424)..(424): n is a, c, g, or t
  misc_feature (426)..(426): n is a, c, g, or t
  misc_feature (432)..(432): n is a, c, g, or t
  misc_feature (463)..(463): n is a, c, g, or t
  misc_feature (559)..(559): n is a, c, g, or t
  misc_feature (618)..(618): n is a, c, g, or t
ccgggaagccggagtctagagctccgggcgcggggaggcgcggccatggcagctccggagccgctgtccccggcgggcggtgcgggcgaggaggcgccggaggaggacgaggacgaagcggaggccgaggaccctgagcggccgaatgcgggagcgggcggtggacgcagtggcggcggcggcagtagcgtcagcggaggaggcggcggcggcggggccggggcggggggctgcggcgggcccgggggcgcgctcaccaggcgcgcggtcacactgcgggtgctcctcaaagacgcgctgctggagcctggcgccggggtgctgtccatctactacctggggaagaagtactgggccactgcagcagacgaangatcatgtngcagagacgggcagacttcactcaccacgctcgtcaccactnanactgtnactgcagatggtgtgtgctttcatacagcanatgacataagcactgctcgctcacacgcaaactccagctgctcacaaccacataggagagcagattagcacagcagcagcagagtctgcagggttnacacagacacatagcacacatgggcacacatcacactgccacgcaccaaaccagtatgntgtaac

SEQ ID NO: 377266 - DNA, 1734 bp, Homo sapiens
ccgggaagccggagtctagagctccgggcgcggggaggcgcggccatggcaggtacggcgggcccagcggggcggaggcgcggggcgcggggctgcaggggcgcggggctgcagagccgtggggcgagcggcctccctgcagcctctcgctgtccgcagctccggagccgctgtccccggcgggcggtgcgggcgaggaggcgccggaggaggacgaggacgaagcggaggccgaggaccctgagcggccgaatgcgggagcgggcggtggacgcagtggcggcggcggcagtagcgtcagcggaggaggcggcggcggcggggccggggcggggggctgcggcgggcccgggggcgcgctcaccaggcgcgcggtcacactgcgggtgctcctcaaagacgcgctgctggagcctggcgccggggtgctgtccatctactacctggggaagaagttcctgggcgacctgcagccagacggaaggatcatgtggcaggagaccgggcagaccttcaactcacccagcgcctgggccacccactgcaagaagctggtgaaccctgccaagaagtcgggctgtggctgggcctctgtcaagtacaaaggccagaaactggacaagtacaaggccacctggctccggctgcaccagctgcacacgcctgccacggctgctgatgagagcccagccagtgaaggggaggaggaggagttgctgatggaagaggaggaggaggacgttctggcgggggtctcagcagaggacaagagtcggagaccactggggaagagcccttcagagcctgcccacccggaggccacaaccccagggaagcgggtggacagcaagatccgggttccggtccgctactgcatgctgggcagccgcgacttggccaggaacccccacaccctggtggaagtaacatcctttgcagccatcaacaagttccagccgttcaacgtggctgtttctagcaacgtgctgttcctgctggacttccacagtcacctgacacggagtgaggtcgtgggttacctggggggccgctgggacgtcaacagccagatgctgacggtgctcagagccttcccttgtcggagccggctcggggacgcagagactgcagctgccatcgaagaggagatctaccagagcctgttcctgcggggcctgtccctggtgggctggtaccacagccacccacacagcccggcgctgccatctctgcaggacatcgacgcacagatggactaccagctgcggctgcagggctccagcaatggcttccagccctgcctcgccctgctctgctccccttactattctggcaacccaggccccgagtccaagatctcgcctttctgggtgatgcctcctcccgagcaaaggcccagtgactatggcatccccatggatgtggagatggcctacgtccaggacagcttcctgaccaatgacatccttcacgagatgatgctgctggtggagttctacaagggttcccctgacctcgtgaggctccaggaaccctggagccaggagcacacctacctcgacaagcttaagatctccttggccagcaggacgcccaaggaccagagcctgtgtcacgtcctggaacaggtgtgcggcgtcctcaagcaggggagctgagccttccagggcagggtgggctccagttgtcttgagggtccggatgggctcaggtaataaagaaacggaagcagca

SEQ ID NO: 377267 - DNA, 1604 bp, Homo sapiens
ccgggaagccggagtctagagctccgggcgcggggaggcgcggccatggcagctccggagccgctgtccccggcgggcggtgcgggcgaggaggcgccggaggaggacgaggacgaagcggaggccgaggaccctgagcggccgaatgcgggagcgggcggtggacgcagtggcggcggcggcagtagcgtcagcggaggaggcggcggcggcggggccggggcggggggctgcggcgggcccgggggcgcgctcaccaggcgcgcggtcacactgcgggtgctcctcaaagacgcgctgctggagcctggcgccggggtgctgtccatctactacctggggaagaagttcctgggcgacctgcagccagacggaaggatcatgtggcaggagaccgggcagaccttcaactcacccagcgcctgggccacccactgcaagaagctggtgaaccctgccaagaagtcgggctgtggctgggcctctgtcaagtacaaaggccagaaactggacaagtacaaggccacctggctccggctgcaccagctgcacacgcctgccacggctgctgatgagagcccagccagtgaaggggaggaggaggagttgctgatggaagaggaggaggaggacgttctggcgggggtctcagcagaggacaagagtcggagaccactggggaagagcccttcagagcctgcccacccggaggccacaaccccagggaagcgggtggacagcaagatccgggttccggtccgctactgcatgctgggcagccgcgacttggccaggaacccccacaccctggtggaagtaacatcctttgcagccatcaacaagttccagccgttcaacgtggctgtttctagcaacgtgctgttcctgctggacttccacagtcacctgacacggagtgaggtcgtgggttacctggggggccgctgggacgtcaacagccagatgctgacggtgctcagagccttcccttgtcggagccggctcggggacgcagagactgcagctgccatcgaagaggagatctaccagagcctgttcctgcggggcctgtccctggtgggctggtaccacagccacccacacagcccggcgctgccatctctgcaggacatcgacgcacagatggactaccagctgcggctgcagggctccagcaatggcttccagccctgcctcgccctgctctgctccccttactattctggcaacccaggccccgagtccaagatctcgcctttctgggtgatgcctcctcccgagatgctgctggtggagttctacaagggttcccctgacctcgtgaggctccaggaaccctggagccaggagcacacctacctcgacaagcttaagatctccttggccagcaggacgcccaaggaccagagcctgtgtcacgtcctggaacaggtgtgcggcgtcctcaagcaggggagctgagccttccagggcagggtgggctccagttgtcttgagggtccggatgggctcaggtaataaagaaacggaagcagcagccagccacgctggtctccccaaggctggggtgagggtggctgggtgcccaggctggtaccatcacc

SEQ ID NO: 377268 - DNA, 1534 bp, Homo sapiens
ccgggaagccggagtctagagctccgggcgcggggaggcgcggccatggcagctccggagccgctgtccccggcgggcggtgcgggcgaggaggcgccggaggaggacgaggacgaagcggaggccgaggaccctgagcggccgaatgcgggagcgggcggtggacgcagtggcggcggcggcagtagcgtcagcggaggaggcggcggcggcggggccggggcggggggctgcggcgggcccgggggcgcgctcaccaggcgcgcggtcacactgcgggtgctcctcaaagacgcgctgctggagcctggcgccggggtgctgtccatctactacctggggaagaagttcctgggcgacctgcagccagacggaaggatcatgtggcaggagaccgggcagaccttcaactcacccagcgcctgggccacccactgcaagaagctggtgaaccctgccaagaagtcgggctgtggctgggcctctgtcaagtacaaaggccagaaactggacaagtacaaggccacctggctccggctgcaccagctgcacacgcctgccacggctgctgatgagagcccagccagtgaaggggaggaggaggagttgctgatggaagaggaggaggaggacgttctggcgggggtctcagcagaggacaagagtcggagaccactggggaagagcccttcagagcctgcccacccggaggccacaaccccagggaagcgggtggacagcaagatccgggttccggtccgctactgcatgctgggcagccgcgacttggccaggaacccccacaccctggtggaagtaacatcctttgcagccatcaacaagttccagccgttcaacgtggctgtttctagcaacgtgctgttcctgctggacttccacagtcacctgacacggagtgaggtcgtgggttacctggggggccgctgggacgtcaacagccagatgctgacggtgctcagagccttcccttgtcggagccggctcggggacgcagagactgcagctgccatcgaagaggaggtgaggggctacctgggaggtggcattctggggagggttgggaagggacatagctgtcctggcgactgcccagtggctggcagtgttcttcacccttcaccatggggtcccaggtgaagggtgaagaacactgctttttttttttttttttgagacggagtctcgctctgtcacccaggctagagtgcagtggtgcgatctcagctccctgcaagctccgcctcccgggttcacgccattctcctgcctcagcctcccagtgaaaaaaaatttcttcttcgtaaataagagtctcactctgtaactcaggctggagtgcagtggtgtgatcacagctccctgcagcctcaacctcccatgctcaagcgatcctcctgcttcagcactgggattataggcatgcaccaccacacccagtggccacctaatttgttctaacttgggctggggagggactgaccctgcctttttctctcccagaggccacaacccc

SEQ ID NO: 377269 - DNA, 309 bp, Homo sapiens
actctctccctcccccccacgcgccccctccgcctcccgctccacaacccccctaatcaccccgtcctactaatcgtggtactctttagtgtttgctagcttcccttttaaattgataaatggacatttccactacatgcctttcctaccttcccttcacaaccaatcaagtgaatacttgattattatctcttccttactgtgctttatcttttttgtttggattggttctaattaatgaaaataaaagtttctaaatttacatttttatagggtattgtaaataaaaacaaattgtatacttaaaaa

SEQ ID NO: 377270 - DNA, 3975 bp, Homo sapiens
tagtctttggaggattgtcctctggatgaagatgaagatgcatttcagggactgggagaagaagatgaagagattgatcaattcaatgatgatacatttgggtcaggtgcagttgatgatgattggcaggaagcacatgagcgcctggctgaattggaagaaaagctaccagtggcagttaatgaacaaacaggcaatggagagagagatgaaatggacttgttgggtgaccatgaggagaatctggcagaaaggctcagtaagatggtgattgaaaatgaactagaagatccagctattatgagggcagtgcagaccaggccagttttacaaccccaaccaggaagtctgaattccagtatctgggatggatctgaagttctgaggcgaatccgaggaccactgcttgctcaggaaatgcctacagtgtctgtattagaatatgctttgcctcagaggcccccccagggtccagaagatgatcgggacctttctgaacgagcattaccaaggcggtcaacttcacctatcattggcagtcctcctgttagagctgtccccataggcaccccacctaaacagatggctgtacccagcttcacccaacagattctgtgtccgaagcctgtccatgttcggcccccaatgccacctcgttatcctgctccctatggtgagaggatgtctccaaaccagctctgcagtgtcccgaactcttccctcctgggtcacccttttcctcctagtgttcctcctgttctcagccccctccagagagcacagcttcttggaggagcacagctacagcctggacggatgtctcccagccagtttgcacgggtccctggatttgttggtagtccacttgctgccatgaatcccaagttgctacaagggcgagttgggcagatgcttcccccagcaccaggcttccgtgccttctttagtgctccaccctccgctacaccacctccacagcagcaccctcctggcccaggaccccacctgcaaaacctaagatctcaggccccaatgtttagaccggacacaactcacctccatccacagcaccgtcgactcttgcatcagagacagcaacagaatagaagtcagcatcggaatctcaatggtgcgggagatagaggaagtcaccggagcagtcatcaagatcatctccgaaaggatccatatgccaatctcatgttgcagcgggaaaaggattgggtctctaaaatccagatgatgcaactgcaaagcactgatccctacctggatgatttttattaccagaattactttgaaaaactggagaaactgtcagctgctgaagaaatacaaggtgatggccctaagaaggagcgcaccaagcttatcacccctcaggtggccaaactggagcacgcctataagccagtgcaatttgagggctctttgggaaagcttaccgtttctagtgtgaataatccccgaaaaatgattgatgctgttgtgacatctcggagtgaggatgatgagacaaaagaaaaacaagttcgagacaagaggagaaaaacccttgttataattgagaaaacctacagcttactccttgatgtggaggactatgaaagacgttatctcctaagtctggaagaagagcgacctgccctaatggatgacagaaagcacaaaatttgtagcatgtatgacaacttaagggggaaattgcctggacaagagaggcctagtgatgaccactttgtacagatcatgtgtatccgaaaagggaagagaatggttgcccgtattcttcctttcctctccacagagcaagcagctgacattctcatgacaacagccaggaacctccctttccttatcaagaaggatgcacaagatgaggtgctgccatgcttactgagtcccttctctctccttctctatcatcttccatcagtgagtatcaccagccttttgcgacagctaatgaacctacctcaaagtgcagctacaccagcactctccaatcctcacctcactgctgtgctccagaacaagtttggcctgtcactgctcctcatcctcctgagccgtggtgaagacctacagagttcagaccctgctacagaatcaacacaaaataatcagtggacggaggtgatgttcatggcaacacgagaacttctgcggattccccaagcagccctggccaagccaatctctatacctacaaacctagtgtccctcttttctcgctatgttgaccggcagaaactgaacttgctggagacaaaactgcagctagttcaggggatacgataaaagatctccaaatgtgtcctgtacctccttttggctgccacctgcactgctgccatcaccaatggagtgtttttaatgagggaaggaaggtagctttttccccaaagcaaagtcttgtgggatcgattcctgtttacaggggttgtctctctaaatgtcagatatttccccactgctctatgaaatttggctgggtgatacttctgctggtttctttaccttctgtgttacagttctgcatgtcctacttttactcagttctgttttgcattttctttgccctagagacacaagtgtaatctctccctttatccctccactactccacctcagagtagattgtagcctgccaaaggattccttccctcatcctattgaagttgttttttcattgccccatattaatatgactatagaagagccaattaagtagaaatcaagatatacacacacacatagatacacacacacacaccccatacatgtatttatgtggtcttcagagggtccttaaagaatgaattttagattgaaaaatatttagttgtctcattacctcttctaaacacaaaccagctgatgtattttaatctgtttctgttctatcttgtaattaatttggtgggttctacttgttttaacataaataaagagtatgcagcacgtttaataaaatcagaactcttaattggcttatgcccaggtctaggctgagaagtcctttttcttcttcccacctttatttccttagtttctgtccaccttaatcgaaacaacacatggttatgtctttttcctgctacaactacagggtacttgagcctttcccctcaagtgcattcgaagtcacccaggatgatcctcactagtagcctgctttggcagtgtggctttttgcacacttgccctgtcttcctgagactacttcagtaagccatgcttccttcttccccacttttatttggtgtcatgaatagaaacttccaaatgtaaccatggaagctaagtttggcctgctttgctttttagtctccacaccatgggcagaactgctgtctttactacttcatctcacccaagtcccgttcccaggcagccaggggcctgggtttgaataattgcagggccagcctgccatgatctttctcacttactcctctcccattcagcaatcaaccagactaaggagttttgatccctagtgattacagccctgaagaaaattaaatctgaattaattttacatggccttcgtgatctttctgctgttcttactttttcgaatgtagttggggggtgggagggacaggttatggtatttaaagagaataaacattttgcacatacatgtattgtacaacagtaagatcctctgttaaaaccagctgtcctgttctccatctccatttcttcccatgctgtaaccccaggctccaccagctgttccccagtgatgttacctagcttccctctaccgttgtctactgaccatttccactacatgcctttcctaccttcccttcacaaccaatcaagtgaatacttgattattatctcttccttactgtgctttatcttttttgtttggattggttctaattaatgaaaataaaagtttctaaatttacatttttatagggtattgtaaataaaaacaaattgtatacttaaaaa

SEQ ID NO: 377271 - DNA, 2570 bp, Homo sapiens
gggtcgcgcgcaggggggctgcgatcggccgaggttatctagagtcaccaaagccgcagggccccgcaaaatgatgatgctgtgtgacatctcggagtgaggatgatgagacaaaagaaaaacaagttcgagacaagaggagaaaaacccttgttataattgagaaaacctacagcttactccttgatgtggaggactatgaaagacgttatctcctaagtctggaagaagagcgacctgccctaatggatgacagaaagcacaaaatttgtagcatgtatgacaacttaagggggaaattgcctggacaagagaggcctagtgatgaccactttgtacagatcatgtgtatccgaaaagggaagagaatggttgcccgtattcttcctttcctctccacagagcaagcagctgacattctcatgacaacagccaggaacctccctttccttatcaagaaggatgcacaagatgaggtgctgccatgcttactgagtcccttctctctccttctctatcatcttccatcagtgagtatcaccagccttttgcgacagctaatgaacctacctcaaagtgcagctacaccagcactctccaatcctcacctcactgctgtgctccagaacaagtttggcctgtcactgctcctcatcctcctgagccgtggtgaagacctacagagttcagaccctgctacagaatcaacacaaaataatcagtggacggaggtgatgttcatggcaacacgagaacttctgcggattccccaagcagccctggccaagccaatctctatacctacaaacctagtgtccctcttttctcgctatgttgaccggcagaaactgaacttgctggagacaaaactgcagctagttcaggggatacgataaaagatctccaaatgtgtcctgtacctccttttggctgccacctgcactgctgccatcaccaatggagtgtttttaatgagggaaggaaggtagctttttccccaaagcaaagtcttgtgggatcgattcctgtttacaggggttgtctctctaaatgtcagatatttccccactgctctatgaaatttggctgggtgatacttctgctggtttctttaccttctgtgttacagttctgcatgtcctacttttactcagttctgttttgcattttctttgccctagagacacaagtgtaatctctccctttatccctccactactccacctcagagtagattgtagcctgccaaaggattccttccctcatcctattgaagttgttttttcattgccccatattaatatgactatagaagagccaattaagtagaaatcaagatatacacacacacatagatacacacacacacaccccatacatgtatttatgtggtcttcagagggtccttaaagaatgaattttagattgaaaaatatttagttgtctcattacctcttctaaacacaaaccagctgatgtattttaatctgtttctgttctatcttgtaattaatttggtgggttctacttgttttaacataaataaagagtatgcagcacgtttaataaaatcagaactcttaattggcttatgcccaggtctaggctgagaagtcctttttcttcttcccacctttatttccttagtttctgtccaccttaatcgaaacaacacatggttatgtctttttcctgctacaactacagggtacttgagcctttcccctcaagtgcattcgaagtcacccaggatgatcctcactagtagcctgctttggcagtgtggctttttgcacacttgccctgtcttcctgagactacttcagtaagccatgcttccttcttccccacttttatttggtgtcatgaatagaaacttccaaatgtaaccatggaagctaagtttggcctgctttgctttttagtctccacaccatgggcagaactgctgtctttactacttcatctcacccaagtcccgttcccaggcagccaggggcctgggtttgaataattgcagggccagcctgccatgatctttctcacttactcctctcccattcagcaatcaaccagactaaggagttttgatccctagtgattacagccctgaagaaaattaaatctgaattaattttacatggccttcgtgatctttctgctgttcttactttttcgaatgtagttggggggtgggagggacaggttatggtatttaaagagaataaacattttgcacatacatgtattgtacaacagtaagatcctctgttaaaaccagctgtcctgttctccatctccatttcttcccatgctgtaaccccaggctccaccagctgttccccagtgatgttacctagcttccctctaccgttgtctactgaccatttccactacatgcctttcctaccttcccttcacaaccaatcaagtgaatacttgattattatctcttccttactgtgctttatcttttttgtttggattggttctaattaatgaaaataaaagtttctaaatttacatttttatagggtattgtaaataaaaacaaattgtatacttaaaaa

SEQ ID NO: 377272 - DNA, 4016 bp, Homo sapiens
  misc_feature (3675)..(3675): n is a, c, g, or t
  misc_feature (3679)..(3679): n is a, c, g, or t
tagtctttggaggattgtcctctggatgaagatgaagatgcatttcagggactgggagaagaagatgaagagattgatcaattcaatgatgatacatttgggtcaggtgcagttgatgatgattggcaggaagcacatgagcgcctggctgaattggaagaaaagctaccagtggcagttaatgaacaaacaggcaatggagagagagatgaaatggacttgttgggtgaccatgaggagaatctggcagaaaggctcagtaagatggtgattgaaaatgaactagaagatccagctattatgagggcagtgcagaccaggccagttttacaaccccaaccaggaagtctgaattccagtatctgggatggatctgaagttctgaggcgaatccgaggaccactgcttgctcaggaaatgcctacagtgtctgtattagaatatgctttgcctcagaggcccccccagggtccagaagatgatcgggacctttctgaacgagcattaccaaggcggtcaacttcacctatcattggcagtcctcctgttagagctgtccccataggcaccccacctaaacagatggctgtacccagcttcacccaacagattctgtgtccgaagcctgtccatgttcggcccccaatgccacctcgttatcctgctccctatggtgagaggatgtctccaaaccagctctgcagtgtcccgaactcttccctcctgggtcacccttttcctcctagtgttcctcctgttctcagccccctccagagagcacagcttcttggaggagcacagctacagcctggacggatgtctcccagccagtttgcacgggtccctggatttgttggtagtccacttgctgccatgaatcccaagttgctacaagggcgagttgggcagatgcttcccccagcaccaggcttccgtgccttctttagtgctccaccctccgctacaccacctccacagcagcaccctcctggcccaggaccccacctgcaaaacctaagatctcaggccccaatgtttagaccggacacaactcacctccatccacagcaccgtcgactcttgcatcagagacagcaacagaatagaagtcagcatcggaatctcaatggtgcgggagatagaggaagtcaccggagcagtcatcaagatcatctccgaaaggatccatatgccaatctcatgttgcagcgggaaaaggattgggtctctaaaatccagatgatgcaactgcaaagcactgatccctacctggatgatttttattaccagaattactttgaaaaactggagaaactgtcagctgctgaagaaatacaaggtgatggccctaagaaggagcgcaccaagcttatcacccctcaggtggccaaactggagcacgcctataagccagtgcaatttgagggctctttgggaaagcttaccgtttctagtgtgaataatccccgaaaaatgattgatgctgttgtgacatctcggagtgaggatgatgagacaaaagaaaaacaagttcgagacaagaggagaaaaacccttgttataattgagaaaacctacagcttactccttgatgtggaggactatgaaagacgttatctcctaagtctggaagaagagcgacctgccctaatggatgacagaaagcacaaaatttgtagcatgtatgacaacttaagggggaaattgcctggacaagagaggcctagtgatgaccactttgtacagatcatgtgtatccgaaaagggaagagaatggttgcccgtattcttcctttcctctccacagagcaagcagctgacattctcatgacaacagccaggaacctccctttccttatcaagaaggatgcacaagatgaggtgctgccatgcttactgagtcccttctctctccttctctatcatcttccatcagtgagtatcaccagccttttgcgacagctaatgaacctacctcaaagtgcagctacaccagcactctccaatcctcacctcactgctgtgctccagaacaagtttggcctgtcactgctcctcatcctcctgagccgtggtgaagacctacagagttcagaccctgctacagaatcaacacaaaataatcagtggacggaggtgatgttcatggcaacacgagaacttctgcggattccccaagcagccctggccaagccaatctctatacctacaaacctagtgtccctcttttctcgctatgttgaccggcagaaactgaacttgctggagacaaaactgcagctagttcaggggatacgataaaagatctccaaatgtgtcctgtacctccttttggctgccacctgcactgctgccatcaccaatggagtgtttttaatgagggaaggaaggtagctttttccccaaagcaaagtcttgtgggatcgattcctgtttacaggggttgtctctctaaatgtcagatatttccccactgctctatgaaatttggctgggtgatacttctgctggtttctttaccttctgtgttacagttctgcatgtcctacttttactcagttctgttttgcattttctttgccctagagacacaagtgtaatctctccctttatccctccactactccacctcagagtagattgtagcctgccaaaggattccttccctcatcctattgaagttgttttttcattgccccatattaatatgactatagaagagccaattaagtagaaatcaagatatacacacacacatagatacacacacacacaccccatacatgtatttatgtggtcttcagagggtccttaaagaatgaattttagattgaaaaatatttagttgtctcattacctcttctaaacacaaaccagctgatgtattttaatctgtttctgttctatcttgtaattaatttggtgggttctacttgttttaacataaataaagagtatgcagcacgtttaataaaatcagaactcttaattggcttatgcccaggtctaggctgagaagtcctttttcttcttcccacctttatttccttagtttctgtccaccttaatcgaaacaacacatggttatgtctttttcctgctacaactacagggtacttgagcctttcccctcaagtgcattcgaagtcacccaggatgatcctcactagtagcctgctttggcagtgtggctttttgcacacttgccctgtcttcctgagactacttcagtaagccatgcttccttcttccccacttttatttggtgtcatgaatagaaacttccaaatgtaaccatggaagctaagtttggcctgctttgctttttagtctccacaccatgggcagaactgctgtctttactacttcatctcacccaagtcccgttcccaggcagccaggggcctgggtttgaataattgcagggccagcctgccatgatctttctcacttactcctctcccattcagcaatcaaccagactaaggagttttgatccctagtgattacagccctgaagaaaattaaatctgaattaattttacatggccttcgtgatctttctgctgttcttactttttcgaatgtagttggggggtgggagggacaggttatggtatttaaagagaataaacattttgcacatacatgtattgtacaacagtaaaaaaaagngggnaaaattttcccccccttttcccctttggggatcctctgttaaaaccagctgtcctgttctccatctccatttcttcccatgctgtaaccccaggctccaccagctgttccccagtgatgttacctagcttccctctaccgttgtctactgaccatttccactacatgcctttcctaccttcccttcacaaccaatcaagtgaatacttgattattatctcttccttactgtgctttatcttttttgtttggattggttctaattaatgaaaataaaagtttctaaatttacatttttatagggtattgtaaataaaaacaaattgtatacttaaaaa

SEQ ID NO: 377273 - DNA, 1713 bp, Homo sapiens
ctccgtacccccaaggaaccatccagccagggctggcttcacccgcaattcaggcttcagaggggccgatgcaaatacagacactgcccaacatgagatctggggctgcttcacaaacttaaggctctaaaatccatccacgttggccctgcctgcgaacctatgaataggttcgcaggggttgtctctctaaatgtcagatatttccccactgctctatgaaatttggctgggtgatacttctgctggtttctttaccttctgtgttacagttctgcatgtcctacttttactcagttctgttttgcattttctttgccctagagacacaagtgtaatctctccctttatccctccactactccacctcagagtagattgtagcctgccaaaggattccttccctcatcctattgaagttgttttttcattgccccatattaatatgactatagaagagccaattaagtagaaatcaagatatacacacacacatagatacacacacacacaccccatacatgtatttatgtggtcttcagagggtccttaaagaatgaattttagattgaaaaatatttagttgtctcattacctcttctaaacacaaaccagctgatgtattttaatctgtttctgttctatcttgtaattaatttggtgggttctacttgttttaacataaataaagagtatgcagcacgtttaataaaatcagaactcttaattggcttatgcccaggtctaggctgagaagtcctttttcttcttcccacctttatttccttagtttctgtccaccttaatcgaaacaacacatggttatgtctttttcctgctacaactacagggtacttgagcctttcccctcaagtgcattcgaagtcacccaggatgatcctcactagtagcctgctttggcagtgtggctttttgcacacttgccctgtcttcctgagactacttcagtaagccatgcttccttcttccccacttttatttggtgtcatgaatagaaacttccaaatgtaaccatggaagctaagtttggcctgctttgctttttagtctccacaccatgggcagaactgctgtctttactacttcatctcacccaagtcccgttcccaggcagccaggggcctgggtttgaataattgcagggccagcctgccatgatctttctcacttactcctctcccattcagcaatcaaccagactaaggagttttgatccctagtgattacagccctgaagaaaattaaatctgaattaattttacatggccttcgtgatctttctgctgttcttactttttcgaatgtagttggggggtgggagggacaggttatggtatttaaagagaataaacattttgcacatacatgtattgtacaacagtaagatcctctgttaaaaccagctgtcctgttctccatctccatttcttcccatgctgtaaccccaggctccaccagctgttccccagtgatgttacctagcttccctctaccgttgtctactgaccatttccactacatgcctttcctaccttcccttcacaaccaatcaagtgaatacttgattattatctcttccttactgtgctttatcttttttgtttggattggttctaattaatgaaaataaaagtttctaaatttacatttttatagggtattgtaaataaaaacaaattgtatacttaaaaa

SEQ ID NO: 377274 - DNA, 2170 bp, Homo sapiens
tagtctttggaggattgtcctctggatgaagatgaagatgcatttcagggactgggagaagaagatgaagagattgatcaattcaatgatgatacatttgggtcaggtgcagttgatgatgattggcaggaagcacatgagcgcctggctgaattggaagaaaagctaccagtggcagttaatgaacaaacaggcaatggagagagagatgaaatggacttgttgggtgaccatgaggagaatctggcagaaaggctcagtaagatggtgattgaaaatgaactagaagatccagctattatgagggcagtgcagaccaggccagttttacaaccccaaccaggaagtctgaattccagtatctgggatggatctgaagttctgaggcgaatccgaggaccactgcttgctcaggaaatgcctacagtgtctgtattagaatatgctttgcctcagaggcccccccagggtccagaagatgatcgggacctttctgaacgagcattaccaaggcggtcaacttcacctatcattggcagtcctcctgttagagctgtccccataggcaccccacctaaacagatggctgtacccagcttcacccaacagattctgtgtccgaagcctgtccatgttcggcccccaatgccacctcgttatcctgctccctatggtgagaggatgtctccaaaccagctctgcagtgtcccgaactcttccctcctgggtcacccttttcctcctagtgttcctcctgttctcagccccctccagagagcacagcttcttggaggagcacagctacagcctggacggatgtctcccagccagtttgcacgggtccctggatttgttggtagtccacttgctgccatgaatcccaagttgctacaagggcgagttgggcagatgcttcccccagcaccaggcttccgtgccttctttagtgctccaccctccgctacaccacctccacagcagcaccctcctggcccaggaccccacctgcaaaacctaagatctcaggccccaatgtttagaccggacacaactcacctccatccacagcaccgtcgactcttgcatcagagacagcaacagaatagaagtcagcatcggaatctcaatggtgcgggagatagaggaagtcaccggagcagtcatcaagatcatctccgaaaggatccatatgccaatctcatgttgcagcgggaaaaggattgggtctctaaaatccagatgatgcaactgcaaagcactgatccctacctggatgatttttattaccagaattactttgaaaaactggagaaactgtcagctgctgaagaaatacaaggtgatggccctaagaaggagcgcaccaagcttatcacccctcaggtggccaaactggagcacgcctataagccagtgcaatttgagggctctttgggaaagcttaccgtttctagtgtgaataatccccgaaaaatgattgatgctgttgtgacatctcggagtgaggatgatgagacaaaagaaaaacaagttcgagacaagaggagaaaaacccttgttataattgagaaaacctacagcttactccttgatgtggaggactatgaaagacgttatctcctaagtctggaagaagagcgacctgccctaatggatgacagaaagcacaaaatttgtagcatgtatgacaacttaagggggaaattgcctggacaagagaggcctagtgatgaccactttgtacagatcatgtgtatccgaaaagggaagagaatggttgcccgtattcttcctttcctctccacagagcaagcagctgacattctcatgacaacagccaggaacctccctttccttatcaagaaggatgcacaagatgaggtgctgccatgcttactgagtcccttctctctccttctctatcatcttccatcagtgagtatcaccagccttttgcgacagctaatgaacctacctcaaagtgcagctacaccagcactctccaatcctcacctcactgctgtgctccagaacaagtttggcctgtcactgctcctcatcctcctgagccgtggtgaagacctacagagttcagaccctgctacagaatcaacacaaaataatcagtgacagaggtgatgttcattgcaacacgtctcttaaggatcgg

SEQ ID NO: 377275 - DNA, 1976 bp, Homo sapiens
tagtctttggaggattgtcctctggatgaagatgaagatgcatttcagggactgggagaagaagatgaagagattgatcaattcaatgatgatacatttgggtcaggtgcagttgatgatgattggcaggaagcacatgagcgcctggctgaattggaagaaaagctaccagtggcagttaatgaacaaacaggcaatggagagagagatgaaatggacttgttgggtgaccatgaggagaatctggcagaaaggctcagtaagatggtgattgaaaatgaactagaagatccagctattatgagggcagtgcagaccaggccagttttacaaccccaaccaggaagtctgaattccagtatctgggatggatctgaagttctgaggcgaatccgaggaccactgcttgctcaggaaatgcctacagtgtctgtattagaatatgctttgcctcagaggcccccccagggtccagaagatgatcgggacctttctgaacgagcattaccaaggcggtcaacttcacctatcattggcagtcctcctgttagagctgtccccataggcaccccacctaaacagatggctgtacccagcttcacccaacagattctgtgtccgaagcctgtccatgttcggcccccaatgccacctcgttatcctgctccctatggtgagaggatgtctccaaaccagctctgcagtgtcccgaactcttccctcctgggtcacccttttcctcctagtgttcctcctgttctcagccccctccagagagcacagcttcttggaggagcacagctacagcctggacggatgtctcccagccagtttgcacgggtccctggatttgttggtagtccacttgctgccatgaatcccaagttgctacaagggcgagttgggcagatgcttcccccagcaccaggcttccgtgccttctttagtgctccaccctccgctacaccacctccacagcagcaccctcctggcccaggaccccacctgcaaaacctaagatctcaggccccaatgtttagaccggacacaactcacctccatccacagcaccgtcgactcttgcatcagagacagcaacagaatagaagtcagcatcggaatctcaatggtgcgggagatagaggaagtcaccggagcagtcatcaagatcatctccgaaaggatccatatgccaatctcatgttgcagcgggaaaaggattgggtctctaaaatccagatgatgcaactgcaaagcactgatccctacctggatgatttttattaccagaattactttgaaaaactggagaaactgtcagctgctgaagaaatacaaggtgatggccctaagaaggagcgcaccaagcttatcacccctcaggtggccaaactggagcacgcctataagccagtgcaatttgagggctctttgggaaagcttaccgtttctagtgtgaataatccccgaaaaatgattgatgctgttgtgacatctcggagtgaggatgatgtaagtgtcaacacaattgtctgtttaagaacgtctgatttgtgaccacttcttttggggtcaccatggaatgagatcaggcatggtagagttgtttgtagtctaacccggggcctcccacctcgtcatgcattctagttttccacagatgtgctgcagtattaacaccttcatttctaaggcagccaggcagggactagggtggcaggagtctttggattgggtagctctggctgcaaacagcatgtatttactccagtttgatgttaaaaaaattatcattttctatgtgttttaagattttcaggaagaggatcagaaagaataattatggggcactaggcttagtacctgggtgatgaaagaatttgtacaacccccatgacataagtttacctatgtaacaaacacatgtaccctataacctgcacgtgtaccattgaacctaaaattaacgtttaaga

SEQ ID NO: 377276 - DNA, 375 bp, Homo sapiens
acaattaaatatttgtaaaattttcttttgaggtacttagcatcttgcactattcactatcagtatatttctagagctgaacttgtgttactgtcactggcataaattatttgatggtaaacaacagtcgtgttctgtgcttgtgttacaactgaaatcatcttctcgtggtagaattactttgaaaaactggagaaactgtcagctgctgaagaaatacaaggtgatggccctaagaaggagcgcaccaagcttatcacccctcaggtggccaaactggagcacgcctataagccaggtaaggtcctcataagaaaaatgcccataataaaagaaatttgagaagctgctgatgtgattaaatatagacaagtg

SEQ ID NO: 377277 - DNA, 440 bp, Homo sapiens
gaatggttgcccgtattcttcctttcctctccacagagcaagcagctgacattctcatgacaacagccaggaacctccctttccttatcaagaaggatgcacaagatgaggtgactatgcaagatgggacatctttcttttgagtctttataagtgataagatttctagaatgcaaacttattttcctctcctcttcccttttgtatttttgtctaatctttggctgtgtgatttgattatttaaaacaaaacctttagtatttcaggcctatatttttaatcccatatttgatggaacagactatgtttctaaacatgagaaaaacaacaattccctcttacttgacatagttgtaaagatgtggtctgtatcagaattacttgcgtagataattcaactccaccccaaactgctgaatcagaatttacagaaggatta

SEQ ID NO: 377278 - DNA, 4289 bp, Homo sapiens
tagtctttggaggattgtcctctggatgaagatgaagatgcatttcagggactgggagaagaagatgaagagattgatcaattcaatgatgatacatttgggtcaggtgcagttgatgatgattggcaggaagcacatgagcgcctggctgaattggaagaaaagctaccagtggcagttaatgaacaaacaggcaatggagagagagatgaaatggacttgttgggtgaccatgaggagaatctggcagaaaggctcagtaagatggtgattgaaaatgaactagaagatccagctattatgagggcagtgcagaccaggccagttttacaaccccaaccaggaagtctgaattccagtatctgggatggatctgaagttctgaggcgaatccgaggaccactgcttgctcaggaaatgcctacagtgtctgtattagaatatgctttgcctcagaggcccccccagggtccagaagatgatcgggacctttctgaacgagcattaccaaggcggtcaacttcacctatcattggcagtcctcctgttagagctgtccccataggcaccccacctaaacagatggctgtacccagcttcacccaacagattctgtgtccgaagcctgtccatgttcggcccccaatgccacctcgttatcctgctccctatggtgagaggatgtctccaaaccagctctgcagtgtcccgaactcttccctcctgggtcacccttttcctcctagtgttcctcctgttctcagccccctccagagagcacagcttcttggaggagcacagctacagcctggacggatgtctcccagccagtttgcacgggtccctggatttgttggtagtccacttgctgccatgaatcccaagttgctacaagggcgagttgggcagatgcttcccccagcaccaggcttccgtgccttctttagtgctccaccctccgctacaccacctccacagcagcaccctcctggcccaggaccccacctgcaaaacctaagatctcaggccccaatgtttagaccggacacaactcacctccatccacagcaccgtcgactcttgcatcagagacagcaacagaatagaagtcagcatcggaatctcaatggtgcgggagatagaggaagtcaccggagcagtcatcaagatcatctccgaaaggatccatatgccaatctcatgttgcagcgggaaaaggattgggtctctaaaatccagatgatgcaactgcaaagcactgatccctacctggatgatttttattaccagaattactttgaaaaactggagaaactgtcagctgctgaagaaatacaaggtgatggccctaagaaggagcgcaccaagcttatcacccctcaggtggccaaactggagcacgcctataagccagtgcaatttgagggctctttgggaaagcttaccgtttctagtgtgaataatccccgaaaaatgattgatgctgttgtgacatctcggagtgaggatgatgagacaaaagaaaaacaagttcgagacaagaggagaaaaacccttgttataattgagaaaacctacagcttactccttgatgtggaggactatgaaagacgttatctcctaagtctggaagaagagcgacctgccctaatggatgacagaaagcacaaaatttgtagcatgtatgacaacttaagggggaaattgcctggacaagagaggcctagtgatgaccactttgtacagatcatgtgtatccgaaaagggaagagaatggttgcccgtattcttcctttcctctccacagagcaagcagctgacattctcatgacaacagccaggaacctccctttccttatcaagaaggatgcacaagatgaggtgctgccatgcttactgagtcccttctctctccttctctatcatcttccatcagtgagtatcaccagccttttgcgacagctaatgaacctacctcaaagtgcagctacaccagcactctccaatcctcacctcactgctgtgctccagaacaagtttggcctgtcactgctcctcatcctcctgagccgtggtgaagacctacagagttcagaccctgctacagaatcaacacaaaataatcagtggacggaggtgatgttcatggcaacacgagaacttctgcggattccccaagcagccctggccaagccaatctctatacctacaaacctagtgtccctcttttctcgctatgttgaccggcagaaactgaacttgctggagacaaaactgcagctagttcaggggatacgataaaagatctccaaatgtgtcctgtacctccttttggctgccacctgcactgctgccatcaccaatggagtgtttttaatgagggaaggaaggtagctttttccccaaagcaaagtcttgtgggatcgattcctgtttacaggggttgtctctctaaatgtcagatatttccccactgctctatgaaatttggctgggtgatacttctgctggtttctttaccttctgtgttacagttctgcatgtcctacttttactcagttctgttttgcattttctttgccctagagacacaagtgtaatctctccctttatccctccactactccacctcagagtagattgtagcctgccaaaggattccttccctcatcctattgaagttgttttttcattgccccatattaatatgactatagaagagccaattaagtagaaatcaagatatacacacacacatagatacacacacacacaccccatacatgtatttatgtggtcttcagagggtccttaaagaatgaattttagattgaaaaatatttagttgtctcattacctcttctaaacacaaaccagctgatgtattttaatctgtttctgttctatcttgtaattaatttggtgggttctacttgttttaacataaataaagagtatgcagcacgtttaataaaatcagaactcttaattggcttatgcccaggtctaggctgagaagtcctttttcttcttcccacctttatttccttagtttctgtccaccttaatcgaaacaacacatggttatgtctttttcctgctacaactacagggtacttgagcctttcccctcaagtgcattcgaagtcacccaggatgatcctcactagtagcctgctttggcagtgtggctttttgcacacttgccctgtcttcctgagactacttcagtaagccatgcttccttcttccccacttttatttggtgtcatgaatagaaacttccaaatgtaaccatggaagctaagtttggcctgctttgctttttagtctccacaccatgggcagaactgctgtctttactacttcatctcacccaagtcccgttcccaggcagccaggggcctgggtttgaataattgcagggccagcctgccatgatctttctcacttactcctctcccattcagcaatcaaccagactaaggagttttgatccctagtgattacagccctgaagaaaattaaatctgaattaattttacatggccttcgtgatctttctgctgttcttactttttcgaatgtagttggggggtgggagggacaggttatggtatttaaagagaataaacattttgcacatacatgtattgtacaacagtaagatcctctgttaaaaccagctgtcctgttctccatctccatttcttcccatgctgtaaccccaggctccaccagctgttccccagtgatgttacctagcttccctctaccgttgtctactgaccatttccactacatgcctttcctaccttcccttcacaaccaatcaagtgaatacttgattattatctcttccttactgtgctttatcttttttgtttggattggttctaattaatgaaaataaaagtttctaaatttacatttttatagggtattgtaaataaaaacaaattgtatacttaaaaaaaaaaaaaaaaaaaaaaatttgtgggcgggcttgggcctgggaaagagttttaaaaacaatcgggtggggggcgccgcggcccccgagcaaggtcaacagtagaccttggcgcaagaggctggtcccaaagagaaaccggggcaacagaagaaggtcgttgggagttctctcacgcaaaaaaaaagcggcccggggggaaaaccgaaggcgtcctggacgaaatcccaagagggaggccgagaaggccatacaggggtccaacaacagggattccaaagagagcagaataaatcgagagcgacggggaggacac

SEQ ID NO: 377279 - DNA, 2139 bp, Homo sapiens
gaccgcttcatcttacctgcccggctcggctccccagcctgtagacttcctattttctgcccacagccagcgtcatgttctccaccatcctcctcagatactatctttgaccccttggtgctcctaccctttcctgatgccactccacctacgccttacatcagtcaccaaatctcaccatcacagtctgaccaaaagcggaaacttctcatctgactcctctgatgcacagagatcgagctgagccctagagataggtagtgacttgctggggtcacatggtgatttcatggcgagactggaccacagcccaggcccctgggatccactcctaccctgactgcccccctggccaagccaatctctatacctacaaacctagtgtccctcttttctcgctatgttgaccggcagaaactgaacttgctggagacaaaactgcagctagttcaggggatacgataaaagatctccaaatgtgtcctgtacctccttttggctgccacctgcactgctgccatcaccaatggagtgtttttaatgagggaaggaaggtagctttttccccaaagcaaagtcttgtgggatcgattcctgtttacaggggttgtctctctaaatgtcagatatttccccactgctctatgaaatttggctgggtgatacttctgctggtttctttaccttctgtgttacagttctgcatgtcctacttttactcagttctgttttgcattttctttgccctagagacacaagtgtaatctctccctttatccctccactactccacctcagagtagattgtagcctgccaaaggattccttccctcatcctattgaagttgttttttcattgccccatattaatatgactatagaagagccaattaagtagaaatcaagatatacacacacacatagatacacacacacacaccccatacatgtatttatgtggtcttcagagggtccttaaagaatgaattttagattgaaaaatatttagttgtctcattacctcttctaaacacaaaccagctgatgtattttaatctgtttctgttctatcttgtaattaatttggtgggttctacttgttttaacataaataaagagtatgcagcacgtttaataaaatcagaactcttaattggcttatgcccaggtctaggctgagaagtcctttttcttcttcccacctttatttccttagtttctgtccaccttaatcgaaacaacacatggttatgtctttttcctgctacaactacagggtacttgagcctttcccctcaagtgcattcgaagtcacccaggatgatcctcactagtagcctgctttggcagtgtggctttttgcacacttgccctgtcttcctgagactacttcagtaagccatgcttccttcttccccacttttatttggtgtcatgaatagaaacttccaaatgtaaccatggaagctaagtttggcctgctttgctttttagtctccacaccatgggcagaactgctgtctttactacttcatctcacccaagtcccgttcccaggcagccaggggcctgggtttgaataattgcagggccagcctgccatgatctttctcacttactcctctcccattcagcaatcaaccagactaaggagttttgatccctagtgattacagccctgaagaaaattaaatctgaattaattttacatggccttcgtgatctttctgctgttcttactttttcgaatgtagttggggggtgggagggacaggttatggtatttaaagagaataaacattttgcacatacatgtattgtacaacagtaagatcctctgttaaaaccagctgtcctgttctccatctccatttcttcccatgctgtaaccccaggctccaccagctgttccccagtgatgttacctagcttccctctaccgttgtctactgaccatttccactacatgcctttcctaccttcccttcacaaccaatcaagtgaatacttgattattatctcttccttactgtgctttatcttttttgtttggattggttctaattaatgaaaataaaagtttctaaatttacatttttatagggtattgtaaataaaaacaaattgtatacttaaaaa

SEQ ID NO: 377280 - DNA, 2779 bp, Homo sapiens
tagtctttggaggattgtcctctggatgaagatgaagatgcatttcagggactgggagaagaagatgaagagattgatcaattcaatgatgatacatttgggtcaggtgcagttgatgatgattggcaggaagcacatgagcgcctggctgaattggaagaaaagctaccagtggcagttaatgaacaaacaggcaatggagagagagatgaaatggacttgttgggtgaccatgaggagaatctggcagaaaggctcagtaagatggtgattgaaaatgaactagaagatccagctattatgagggcagtgcagaccaggccagttttacaaccccaaccaggaagtctgaattccagtatctgggatggatctgaagttctgaggcgaatccgaggaccactgcttgctcaggaaatgcctacagtgtctgtattagaatatgctttgcctcagaggcccccccagggtccagaagatgatcgggacctttctgaacgagcattaccaaggcggtcaacttcacctatcattggcagtcctcctgttagagctgtccccataggcaccccacctaaacagatggctgtacccagcttcacccaacagattctgtgtccgaagcctgtccatgttcggcccccaatgccacctcgttatcctgctccctatggtgagaggatgtctccaaaccagctctgcagtgtcccgaactcttccctcctgggtcacccttttcctcctagtgttcctcctgttctcagccccctccagagagcacagcttcttggaggagcacagctacagcctggacggatgtctcccagccagtttgcacgggtccctggatttgttggtagtccacttgctgccatgaatcccaagttgctacaagggcgagttgggcagatgcttcccccagcaccaggcttccgtgccttctttagtgctccaccctccgctacaccacctccacagcagcaccctcctggcccaggaccccacctgcaaaacctaagatctcaggccccaatgtttagaccggacacaactcacctccatccacagcaccgtcgactcttgcatcagagacagcaacagaatagaagtcagcatcggaatctcaatggtgcgggagatagaggaagtcaccggagcagtcatcaagatcatctccgaaaggatccatatgccaatctcatgttgcagcgggaaaaggattgggtctctaaaatccagatgatgcaactgcaaagcactgatccctacctggatgatttttattaccagaattactttgaaaaactggagaaactgtcagctgctgaagaaatacaaggtgatggccctaagaaggagcgcaccaagcttatcacccctcaggtggccaaactggagcacgcctataagccagtgcaatttgagggctctttgggaaagcttaccgtttctagtgtgaataatccccgaaaaatgattgatgctgttgtgacatctcggagtgaggatgatgagacaaaagaaaaacaagttcgagacaagaggagaaaaacccttgttataattgagaaaacctacagcttactccttgatgtggaggactatgaaagacgttatctcctaagtctggaagaagagcgacctgccctaatggatgacagaaagcacaaaatttgtagcatgtatgacaacttaagggggaaattgcctggacaagagaggcctagtgatgaccactttgtacagatcatgtgtatccgaaaagggaagagaatggttgcccgtattcttcctttcctctccacagagcaagcagctgacattctcatgacaacagccaggaacctccctttccttatcaagaaggatgcacaagatgagtgagtatcaccagccttttgcgacagctaatgaacctacctcaaagtgcagctacaccagcactctccaatcctcacctcactgctgtgctccagaacaaggtgatcttgcccttttaactccttgaactttgtgaaatgtcttaatttgcgttatagattaaaataatggctgctgtatctctagcaacttgggaaaaaggcttctttcagtcaagagttacattaagctcctagtaaccggctagaaataacagtgttttcaacaaaatgggattttatgtgtctagtgtgaaataaatttgatttagtagctcgacagagtcatcagggatccaggctttttcactttttttcctctgccattcttaccagtggcttccatgttcattattcctcatggtccaagatggctgtggaattcatgattcagctttacatcaagaaggacaggtggatgtggagggcaaaaagatgtggaccagctgtccatcttccttattgagaccttttccaggagttctaaccagaaacttctacttactgttaatagccaggacattgtcacatggccacacctaagtgcagggaaggctggaaaatatcttttagtttatgccattgtcatgacacataagagttctgataatgggtaggaaggcatattaggcaattagcagtctctgtcataacactatgaatagtagaatcatccatttcatattttatttgcatcaagtttaaagattcagagattcctaggggaaacataatatgaaataaagaatatgaatttttagtccttccctgctactgtctagctttgtgaccttggacagatgatatcacattgctgaatcagtttcctggtctataagatggaggtgatgatgtagact

SEQ ID NO: 377281 - DNA, 330 bp, Homo sapiens
catctgcaagtattaataagagaaactccagccaaaaatggcctaagtgtaagaatccagagccagctgcagtggtgcgcacctgaaatcccagctactcaggagactgagtcaggaggattggatcatttgagcccaggagtttgagaccagccaggggaatgtagtgagaccctgtctcaaaaaagaaaaggaaaggttgtgggctcagtggctcacgcctgtaataatcctagcactttgggaggtctgaactcccagccaacatggtaaaacctcgtctctatgaaaaatacaaaaaaattagccaggtgtggtggtgcatacctg

SEQ ID NO: 377282 - DNA, 550 bp, Homo sapiens
gcaatctttgccacaacttcacattggatagggaaaatgaaaagaacattgtgtttcttttgtcttgtgatagtgattaatatctagctattctttattctcaggctcactttaatatttgagaaatcagagttatgctctacaaataatatataacattgatatcgtaaggtttctatttttctggattttgttttctccttgaaaggctgttatcgagttgatggtgtggtttaccatcagttgcatcttagaaataaaatatttgggccaggtgcagtgactcgtgcttgtaatcccagcactttgggagtccgaggctgacagattgcttgagctcaggagttcgaaaccagactgggcaacatagcaagacccagtctctgcaaaaaaaaaaaaaattagctgggcatggttgtatgctcctgtagtaccccctactcaggaggctgaggtgaaagaatcacttgagcccaggaggcagaggttgcagtcaactgagatctcaacactgcactccagcctgggtgacagaggcagaccctatctc

SEQ ID NO: 377283 - DNA, 418 bp, Homo sapiens
tgaagactgggaatatggggggatttaaagattgacgtaaatcatccaggatgctttttgtccaagagtagaagtgctgatgatgtctaactggtcttgatttcgtttgaaaaggtatccctaccattagtatctgtagcaagtggcatggcacgttgccagcattcatggacttgcaaggcagccagaaaatgccggggtaaatttggagttggaagaggtttaattttttttattagaaaggggtagagaagagagaagtcatttccatctagttccacacagtttcctctccctctctcgctctctctcactctctctgcctctctccatttaaaatttatttcaaagatgggttttggaaggcaattttgattatgtaggggatatgtagctatgtctgtcaaagacaaaaaaa

SEQ ID NO: 377284 - DNA, 812 bp, Homo sapiens
aacatattaaatagtcatttgtaaattagtgaagtgttcatttcctgaagaaattataatgctatgtgtagaatctaatataaacagtattttgggagacctcttatttagccaaattattatatactttaaatcatgtctaattaggtgccaaattatataccataattaaaattttaatgtaagggttgtacattctgaaattaaatctcttatcgggatgcttttcattttatcagcttcaaatagtgatccaaataaggcagcatatctgctcccatcttaagcccaaaagaccaacaataaattgtgtggcacttttagttcaaggcaatgaaaacagcacaaggtgagttgttcctctgtctataactgttttctcttaaccctgtgcacacattttgttctaaatatcgctcttaaaaagtatttttctaaaatattgattcatcgaaagtggttaaatattttggtaaagcatagttttaggttgaaaaaaaattatgaacatttgacatttataaatctaagaaaccacagttttactattaagactgtttttcaataaaacctcatttttatatggattttaaagtagctttcattaattggtatttccttaaaatcaaatgcttggtatttatggttacataggaaggttttgtgctggtcctattctccattcttaaagtaattttattttgttcctatatgtcttaaatacttaaaatttatatttgtttttagcaagtgtaaatcagattgataagaaacaatgtaataaaggtttgaatttttcacagtttctacta

SEQ ID NO: 377285 - DNA, 7649 bp, Homo sapiens
cagacatcacaaaaaacattacgcagtacaggcccgctgctgatcggccgaggagatggcggcggcctcgagcacccttctcttcttgccgccggggacttcagattgatccttcccgggaagagtagggactgctggtgccctgcgtcccgggatcccgagccaacttgtttcctccgttagtggtggggaagggcttatccttttgtggcggatctagcttctcctcgccttcaggatgaaagctcagggggaaaccgaggagtcagaaaagctgagtaagatgagttctctcctggaacggctccatgcaaaatttaaccaaaatagaccctggagtgaaaccattaagcttgtgcgtcaagtcatggagaagagggttgtgatgagttctggagggcatcaacatttggtcagctgtttggagacattgcagaaggctctcaaagtaacatctttaccagcaatgactgatcgtttggagtccatagcaagacagaatggactgggctctcatctcagtgccagtggcactgaatgttacatcacgtcagatatgttctatgtggaagtgcagttagatcctgcaggacagctttgtgatgtaaaagtggctcaccatggggagaatcctgtgagctgtccggagcttgtacagcagctaagggaaaaaaattttgatgaattttctaagcaccttaagggccttgttaatctgtataaccttccaggggacaacaaactgaagactaaaatgtacttggctctccaatccttagaacaagatctttctaaaatggcaattatgtactggaaagcaactaatgctggtcccttggataagattcttcatggaagtgttggctatctcacaccaaggagtgggggtcatttaatgaacctgaagtactatgtctctccttctgacctactggatgacaagactgcatctcccatcattttgcatgagaataatgtttctcgatctttgggcatgaatgcatcagtgacaattgaaggaacatctgctgtgtacaaactcccaattgcaccattaattatggggtcacatccagttgacaataaatggaccccttccttctcctcaatcaccagtgccaacagtgttgatcttcctgcctgtttcttcttgaaatttccccagccaatcccagtatctagagcatttgttcagaaactgcagaactgcacaggaattccattgtttgaaactcaaccaacttatgcacccctgtatgaactgatcactcagtttgagctatcaaaggaccctgaccccatacctttgaatcacaacatgagattttatgctgctcttcctggtcagcagcactgctatttcctcaacaaggatgctcctcttccagatggccgaagtctacagggaacccttgttagcaaaatcacctttcagcaccctggccgagttcctcttatcctaaatctgatcagacaccaagtggcctataacaccctcattggaagctgtgtcaaaagaactattctgaaagaagattctcctgggcttctccaatttgaagtgtgtcctctctcagagtctcgtttcagcgtatcttttcagcaccctgtgaatgactccctggtgtgtgtggtaatggatgtgcaggactcaacacatgtgagctgtaaactctacaaagggctgtcggatgcactgatctgcacagatgacttcattgccaaagttgttcaaagatgtatgtccatccctgtgacgatgagggctattcggaggaaagctgaaaccattcaagccgacaccccagcactgtccctcattgcagagacagttgaagacatggtgaaaaagaacctgcccccggctagcagcccagggtatggcatgaccacaggcaacaacccaatgagtggtaccactacatcaaccaacacctttccggggggtcccattgccaccttgtttaatatgagcatgagcatcaaagatcggcatgagtcggtgggccatggggaggacttcagcaaggtgtctcagaacccaattcttaccagtttgttgcaaatcacagggaacggggggtctaccattggctcgagtccgacccctcctcatcacacgccgccacctgtctcttcgatggccggcaacaccaagaaccacccgatgctcatgaaccttctcaaagataatcctgcccaggatttctcaaccctttatggaagcagccctttagaaaggcagaactcctcttccggctcaccccgcatggaaatatgctcggggagcaacaagaccaagaaaaagaagtcatcaagattaccacctgagaaaccaaagcaccagactgaagatgactttcagagggagctattttcaatggatgttgactcacagaaccctatctttgatgtcaacatgacagctgacacgctggatacgccacacatcactccagctccaagccagtgtagcactcccccaacaacttacccacaaccagtacctcacccccaacccagtattcaaaggatggtccgactatccagttcagacagcattggcccagatgtaactgacatcctttcagacattgcagaagaagcttctaaacttcccagcactagtgatgattgcccagccattggcacccctcttcgagattcttcaagctctgggcattctcagagtaccctgtttgactctgatgtctttcaaactaacaataatgaaaatccatacactgatccagctgatcttattgcagatgctgctggaagccccagtagtgactctcctaccaatcatttttttcatgatggagtagatttcaatcctgatttattgaacagccagagccaaagtggttttggagaagaatattttgatgaaagcagccaaagtggggataatgatgatttcaaaggatttgcatctcaggcactaaatactttgggggtgccaatgcttggaggtgataatggggagaccaagtttaagggcaataaccaagccgacacagttgatttcagtattatttcagtagccggcaaagctttagctcctgcagatcttatggagcatcacagtggtagtcagggtcctttactgaccactggggacttagggaaagaaaagactcaaaagagggtaaaggaaggcaatggcaccagtaatagtactctctcggggcccggattagacagcaaaccagggaagcgcagtcggaccccttctaatgatgggaaaagcaaagataagcctccaaagcggaagaaggcagacactgagggaaagtctccatctcatagttcttctaacagaccttttaccccacctaccagtacaggtggatctaaatcgccaggcagtgcaggaagatctcagactcccccaggtgttgccacaccacccattcccaaaatcactattcagattcctaagggaacagtgatggtgggcaagccttcctctcacagtcagtataccagcagtggttctgtgtcttcctcaggcagcaaaagccaccatagccattcttcctcctcttcctcatctgcttccacctcagggaagatgaaaagcagtaaatcagaaggttcatcaagttccaagttaagtagcagtatgtattctagccaggggtcttctggatctagccagtccaaaaattcatcccagtctggggggaagccaggctcctctcccataaccaagcatggactgagcagtggctctagcagcaccaagatgaaacctcaaggaaagccatcatcacttatgaatccttctttaagtaaaccaaacatatccccttctcattcaaggccacctggaggctctgacaagcttgcctctccaatgaagcctgttcctggaactcctccatcctctaaagccaagtcccctatcagttcaggttctggtggttctcatatgtctggaactagttcaagctctggcatgaagtcatcttcagggttaggatcctcaggctcgttgtcccagaaaactcccccatcatctaattcctgtacggcatcttcctcctccttttcctcaagtggctcttccatgtcatcctctcagaaccagcatgggagttctaaaggaaaatctcccagcagaaacaagaagccgtccttgacagctgtcatagataaactgaagcatggggttgtcaccagtggccctgggggtgaagacccactggacggccagatgggggtgagcacaaattcttccagccatcctatgtcctccaaacataacatgtcaggaggagagtttcagggcaagcgtgagaaaagtgataaagacaaatcaaaggtttccacctccgggagttcagtggattcttctaagaagacctcagagtcaaaaaatgtggggagcacaggtgtggcaaaaattatcatcagtaagcatgatggaggctcccctagcattaaagccaaagtgactttgcagaaacctggggaaagtagtggagaagggcttaggcctcaaatggcttcttctaaaaactatggctctccactcatcagtggttccactccaaagcatgagcgtggctctcccagccatagtaagtcaccagcatataccccccagaatctggacagtgaaagtgagtcaggctcctccatagcagagaaatcttatcagaatagtcccagctcagacgatggtatccgaccacttccagaatacagcacagagaaacataagaagcacaaaaaggaaaagaagaaagtaaaagacaaagatagggaccgagaccgggacaaagaccgagacaagaaaaaatctcatagcatcaagccagagagttggtccaaatcacccatctcttcagaccagtccttgtctatgacaagtaacacaatcttatctgcagacagaccctcaaggctcagcccagactttatgattggggaggaagatgatgatcttatggatgtggccctgattgggaattaggaaccttatttcctaaaagaaacagggccagaggaaaaaaaactattgataagtttataggcaaaccaccataaggggtgagtcagacaggtctgatttggttaagaatcctaaatggcatggctttgacatcaagctgggtgaattagaaaggcatatccagaccctattaaagaaaccacagggtttgattctggttaccaggaagtcttctttgttcctgtgccagaaagaaagttaaaatacttgcttaagaaagggaggggggtgggaggggtgtagggagagggaagggagggaaacagttttgtgggaaatattcatatatattttcttctccctttttccatttttaggccatgttttaaactcattttagtgcatgtatatgaagggctgggcagaaaatgaaaaagcaatacattccttgatgcatttgcatgaaggttgttcaactttgtttgaggtagttgtccgtttgagtcatgggcaaatgaaggactttggtcattttggacacttaagtaatgtttggtgtctgtttcttaggagtgactgggggagggaagattattttagctatttatttgtaatattttaaccctttatctgtttgtttttatacagtgtttcgttctaaatctatgaggtttagggttcaaaatgatggaaggccgaagagcaaggcttatatggtggtagggagcttatagcttgtgctaatactgtagcatcaagcccaagcaaattagtcagagcccgcctttagagttaaatataatagaaaaaccaaaatgatatttttattttaggagggtttaaatagggttcagagatcataggaatattaggagttacctctctgtggaggtattgacttgtaatctcattttcctttcaaaaaaaaaaaaaaaagctaaggtggcttgttgggatgtaaacatgttttcagatgcagtaaggtttagtgtaggacagccttcctgacccagtggcatgaaaaccattacaggattaatagttctcctacttccacaatgtgccaaaagtctgcatcccagcattttgtttgcaggagaactgatgccattcctaagagctggactcactgtttctcttcatcacaaggagaaggagtccaaactttaatcactccactgtatgctccctgagataaaacagtaaaaaatccgcagccatagttcacttaaaacaatttcaagctcacttttgaagtaatgggggcctggaatgctaggtgagcatgaagataaacccttgctactatgtagcaacccaattggacctttttggagaaataggtctgagtctggattctgggggacatcaataagagcccttcacataaaaatatagaaatccaggagactgtttcgagtgcaacagaagttctcagtatttggagggtcctctcaaaaattctgcggccttactttgatattgacacctgcactgtgccattcctgattattccattcaggatctgtatcagcgggatggggcatggtccccagcacaactcttctgggttaaaaaaaaaaagccaggtgattcctttgtgtgttatgtcgtaagtggagtgacttcatcatatatggaagaagatttctatattcagctttttctgcaggttggagtcagcatagagttggaaaatcagctttggctttctttcctgtctcatttcctctagtgttctcctttttattgtcatcagctctcaacaactctgccacttttgtgtcccaaggtaataagatgtaggaaacaaaacattgtaaagtggagcaagaaaagttatcaattaaccacatcagagtcaaatgtcttgggtgacactaaggaggatatgggcaggtgataccagagtgctttatcttgtgatgttgatacagtagcagcctctcagacattcagccaggttggatttctcatgagtttgtcacctagttttgaatcctatcccgttggtttctgcaggaaaaaaaaaaaaatttatgtggtttttaaaatttgttctgagtggggagaatcttagggggaatgtactgaatagtatcatgggctcagctcccccatgcagggccaacaaataccaaaatgagtaaactgggaagcttttctctctttctgtcttcatcccagatcaaagaatcccgagttaggatctggatgaaggataagcccctgaattgtcgatgggctcacccccacactgacccagcatctgaacttgcttaacagggagccggggctaaactgcttcaccctgcctgagaaccagggagcactgcatttctccacagggtggaggagaagaggcagaataaaccaagcctgggacacctccctcctgtctaggtgtactcattcttctgtttcaaaagaaggcaaggacatgaagtcaacttctacctatcttctgctgctggtgtcttatgtattctcagtttgacctgattcctcttctgtcttttgacttaacattaggggttcttggtcataacctgctctgatgtacataaagatttcaggttcaatatcaatgtgtcttaaaacagaagtattttagcgggtggggggtggggtggtggggacaaacaacgcaggatataattgccaaaaccaggcttgaggttggtga

SEQ ID NO: 377286 - DNA, 7340 bp, Homo sapiens
cagacatcacaaaaaacattacgcagtacaggcccgctgctgatcggccgaggagatggcggcggcctcgagcacccttctcttcttgccgccggggacttcagattgatccttcccgggaagagtagggactgctggtgccctgcgtcccgggatcccgagccaacttgtttcctccgttagtggtggggaagggcttatccttttgtggcggatctagcttctcctcgccttcaggatgaaagctcagggggaaaccgaggagtcagaaaagctgagtaagatgagttctctcctggaacggctccatgcaaaatttaaccaaaatagaccctggagtgaaaccattaagcttgtggaaaaaaattttgatgaattttctaagcaccttaagggccttgttaatctgtataaccttccaggggacaacaaactgaagactaaaatgtacttggctctccaatccttagaacaagatctttctaaaatggcaattatgtactggaaagcaactaatgctggtcccttggataagattcttcatggaagtgttggctatctcacaccaaggagtgggggtcatttaatgaacctgaagtactatgtctctccttctgacctactggatgacaagactgcatctcccatcattttgcatgagaataatgtttctcgatctttgggcatgaatgcatcagtgacaattgaaggaacatctgctgtgtacaaactcccaattgcaccattaattatggggtcacatccagttgacaataaatggaccccttccttctcctcaatcaccagtgccaacagtgttgatcttcctgcctgtttcttcttgaaatttccccagccaatcccagtatctagagcatttgttcagaaactgcagaactgcacaggaattccattgtttgaaactcaaccaacttatgcacccctgtatgaactgatcactcagtttgagctatcaaaggaccctgaccccatacctttgaatcacaacatgagattttatgctgctcttcctggtcagcagcactgctatttcctcaacaaggatgctcctcttccagatggccgaagtctacagggaacccttgttagcaaaatcacctttcagcaccctggccgagttcctcttatcctaaatctgatcagacaccaagtggcctataacaccctcattggaagctgtgtcaaaagaactattctgaaagaagattctcctgggcttctccaatttgaagtgtgtcctctctcagagtctcgtttcagcgtatcttttcagcaccctgtgaatgactccctggtgtgtgtggtaatggatgtgcaggactcaacacatgtgagctgtaaactctacaaagggctgtcggatgcactgatctgcacagatgacttcattgccaaagttgttcaaagatgtatgtccatccctgtgacgatgagggctattcggaggaaagctgaaaccattcaagccgacaccccagcactgtccctcattgcagagacagttgaagacatggtgaaaaagaacctgcccccggctagcagcccagggtatggcatgaccacaggcaacaacccaatgagtggtaccactacatcaaccaacacctttccggggggtcccattgccaccttgtttaatatgagcatgagcatcaaagatcggcatgagtcggtgggccatggggaggacttcagcaaggtgtctcagaacccaattcttaccagtttgttgcaaatcacagggaacggggggtctaccattggctcgagtccgacccctcctcatcacacgccgccacctgtctcttcgatggccggcaacaccaagaaccacccgatgctcatgaaccttctcaaagataatcctgcccaggatttctcaaccctttatggaagcagccctttagaaaggcagaactcctcttccggctcaccccgcatggaaatatgctcggggagcaacaagaccaagaaaaagaagtcatcaagattaccacctgagaaaccaaagcaccagactgaagatgactttcagagggagctattttcaatggatgttgactcacagaaccctatctttgatgtcaacatgacagctgacacgctggatacgccacacatcactccagctccaagccagtgtagcactcccccaacaacttacccacaaccagtacctcacccccaacccagtattcaaaggatggtccgactatccagttcagacagcattggcccagatgtaactgacatcctttcagacattgcagaagaagcttctaaacttcccagcactagtgatgattgcccagccattggcacccctcttcgagattcttcaagctctgggcattctcagagtaccctgtttgactctgatgtctttcaaactaacaataatgaaaatccatacactgatccagctgatcttattgcagatgctgctggaagccccagtagtgactctcctaccaatcatttttttcatgatggagtagatttcaatcctgatttattgaacagccagagccaaagtggttttggagaagaatattttgatgaaagcagccaaagtggggataatgatgatttcaaaggatttgcatctcaggcactaaatactttgggggtgccaatgcttggaggtgataatggggagaccaagtttaagggcaataaccaagccgacacagttgatttcagtattatttcagtagccggcaaagctttagctcctgcagatcttatggagcatcacagtggtagtcagggtcctttactgaccactggggacttagggaaagaaaagactcaaaagagggtaaaggaaggcaatggcaccagtaatagtactctctcggggcccggattagacagcaaaccagggaagcgcagtcggaccccttctaatgatgggaaaagcaaagataagcctccaaagcggaagaaggcagacactgagggaaagtctccatctcatagttcttctaacagaccttttaccccacctaccagtacaggtggatctaaatcgccaggcagtgcaggaagatctcagactcccccaggtgttgccacaccacccattcccaaaatcactattcagattcctaagggaacagtgatggtgggcaagccttcctctcacagtcagtataccagcagtggttctgtgtcttcctcaggcagcaaaagccaccatagccattcttcctcctcttcctcatctgcttccacctcagggaagatgaaaagcagtaaatcagaaggttcatcaagttccaagttaagtagcagtatgtattctagccaggggtcttctggatctagccagtccaaaaattcatcccagtctggggggaagccaggctcctctcccataaccaagcatggactgagcagtggctctagcagcaccaagatgaaacctcaaggaaagccatcatcacttatgaatccttctttaagtaaaccaaacatatccccttctcattcaaggccacctggaggctctgacaagcttgcctctccaatgaagcctgttcctggaactcctccatcctctaaagccaagtcccctatcagttcaggttctggtggttctcatatgtctggaactagttcaagctctggcatgaagtcatcttcagggttaggatcctcaggctcgttgtcccagaaaactcccccatcatctaattcctgtacggcatcttcctcctccttttcctcaagtggctcttccatgtcatcctctcagaaccagcatgggagttctaaaggaaaatctcccagcagaaacaagaagccgtccttgacagctgtcatagataaactgaagcatggggttgtcaccagtggccctgggggtgaagacccactggacggccagatgggggtgagcacaaattcttccagccatcctatgtcctccaaacataacatgtcaggaggagagtttcagggcaagcgtgagaaaagtgataaagacaaatcaaaggtttccacctccgggagttcagtggattcttctaagaagacctcagagtcaaaaaatgtggggagcacaggtgtggcaaaaattatcatcagtaagcatgatggaggctcccctagcattaaagccaaagtgactttgcagaaacctggggaaagtagtggagaagggcttaggcctcaaatggcttcttctaaaaactatggctctccactcatcagtggttccactccaaagcatgagcgtggctctcccagccatagtaagtcaccagcatataccccccagaatctggacagtgaaagtgagtcaggctcctccatagcagagaaatcttatcagaatagtcccagctcagacgatggtatccgaccacttccagaatacagcacagagaaacataagaagcacaaaaaggaaaagaagaaagtaaaagacaaagatagggaccgagaccgggacaaagaccgagacaagaaaaaatctcatagcatcaagccagagagttggtccaaatcacccatctcttcagaccagtccttgtctatgacaagtaacacaatcttatctgcagacagaccctcaaggctcagcccagactttatgattggggaggaagatgatgatcttatggatgtggccctgattgggaattaggaaccttatttcctaaaagaaacagggccagaggaaaaaaaactattgataagtttataggcaaaccaccataaggggtgagtcagacaggtctgatttggttaagaatcctaaatggcatggctttgacatcaagctgggtgaattagaaaggcatatccagaccctattaaagaaaccacagggtttgattctggttaccaggaagtcttctttgttcctgtgccagaaagaaagttaaaatacttgcttaagaaagggaggggggtgggaggggtgtagggagagggaagggagggaaacagttttgtgggaaatattcatatatattttcttctccctttttccatttttaggccatgttttaaactcattttagtgcatgtatatgaagggctgggcagaaaatgaaaaagcaatacattccttgatgcatttgcatgaaggttgttcaactttgtttgaggtagttgtccgtttgagtcatgggcaaatgaaggactttggtcattttggacacttaagtaatgtttggtgtctgtttcttaggagtgactgggggagggaagattattttagctatttatttgtaatattttaaccctttatctgtttgtttttatacagtgtttcgttctaaatctatgaggtttagggttcaaaatgatggaaggccgaagagcaaggcttatatggtggtagggagcttatagcttgtgctaatactgtagcatcaagcccaagcaaattagtcagagcccgcctttagagttaaatataatagaaaaaccaaaatgatatttttattttaggagggtttaaatagggttcagagatcataggaatattaggagttacctctctgtggaggtattgacttgtaatctcattttcctttcaaaaaaaaaaaaaaaagctaaggtggcttgttgggatgtaaacatgttttcagatgcagtaaggtttagtgtaggacagccttcctgacccagtggcatgaaaaccattacaggattaatagttctcctacttccacaatgtgccaaaagtctgcatcccagcattttgtttgcaggagaactgatgccattcctaagagctggactcactgtttctcttcatcacaaggagaaggagtccaaactttaatcactccactgtatgctccctgagataaaacagtaaaaaatccgcagccatagttcacttaaaacaatttcaagctcacttttgaagtaatgggggcctggaatgctaggtgagcatgaagataaacccttgctactatgtagcaacccaattggacctttttggagaaataggtctgagtctggattctgggggacatcaataagagcccttcacataaaaatatagaaatccaggagactgtttcgagtgcaacagaagttctcagtatttggagggtcctctcaaaaattctgcggccttactttgatattgacacctgcactgtgccattcctgattattccattcaggatctgtatcagcgggatggggcatggtccccagcacaactcttctgggttaaaaaaaaaaagccaggtgattcctttgtgtgttatgtcgtaagtggagtgacttcatcatatatggaagaagatttctatattcagctttttctgcaggttggagtcagcatagagttggaaaatcagctttggctttctttcctgtctcatttcctctagtgttctcctttttattgtcatcagctctcaacaactctgccacttttgtgtcccaaggtaataagatgtaggaaacaaaacattgtaaagtggagcaagaaaagttatcaattaaccacatcagagtcaaatgtcttgggtgacactaaggaggatatgggcaggtgataccagagtgctttatcttgtgatgttgatacagtagcagcctctcagacattcagccaggttggatttctcatgagtttgtcacctagttttgaatcctatcccgttggtttctgcaggaaaaaaaaaaaaatttatgtggtttttaaaatttgttctgagtggggagaatcttagggggaatgtactgaatagtatcatgggctcagctcccccatgcagggccaacaaataccaaaatgagtaaactgggaagcttttctctctttctgtcttcatcccagatcaaagaatcccgagttaggatctggatgaaggataagcccctgaattgtcgatgggctcacccccacactgacccagcatctgaacttgcttaacagggagccggggctaaactgcttcaccctgcctgagaaccagggagcactgcatttctccacagggtggaggagaagaggcagaataaaccaagcctgggacacctccctcctgtctaggtgtactcattcttctgtttcaaaagaaggcaaggacatgaagtcaacttctacctatcttctgctgctggtgtcttatgtattctcagtttgacctgattcctcttctgtcttttgacttaacattaggggttcttggtcataacctgctctgatgtacataaagatttcaggttcaatatcaatgtgtcttaaaacagaagtattttagcgggtggggggtggggtggtggggacaaacaacgcaggatataattgccaaaaccaggcttgaggttggtga

SEQ ID NO: 377287 - DNA, 1917 bp, Homo sapiens
cagacatcacaaaaaacattacgcagtacaggcccgctgctgatcggccgaggagatggcggcggcctcgagcacccttctcttcttgccgccggggacttcagattgatccttcccgggaagagtagggactgctggtgccctgcgtcccgggatcccgagccaacttgtttcctccgttagtggtggggaagggcttatccttttgtggcggatctagcttctcctcgccttcaggatgaaagctcagggggaaaccgaggagtcagaaaagctgagtaagatgagttctctcctggaacggctccatgcaaaatttaaccaaaatagaccctggagtgaaaccattaagcttgtgcgtcaagtcatggagaagagggttgtgatgagttctggagggcatcaacatttggtcagctgtttggagacattgcagaaggctctcaaagtaacatctttaccagcaatgactgatcgtttggagtccatagcaagacagaatggactgggctctcatctcagtgccagtggcactgaatgttacatcacgtcagatatgttctatgtggaagtgcagttagatcctgcaggacagctttgtgatgtaaaagtggctcaccatggggagaatcctgtgagctgtccggagcttgtacagcagctaagggaaaaaaattttgatgaattttctaagcaccttaagggccttgttaatctgtataaccttccaggggacaacaaactgaagactaaaatgtacttggctctccaatccttagaacaagatctttctaaaatggcaattatgtactggaaagcaactaatgctggtcccttggataagattcttcatggaagtgttggctatctcacaccaaggagtgggggtcatttaatgaacctgaagtactatgtctctccttctgacctactggatgacaagactgcatctcccatcattttgcatgagaataatgtttctcgatctttgggcatgaatgcatcagtgacaattgaaggaacatctgctgtgtacaaactcccaattgcaccattaattatggggtcacatccagttgacaataaatggaccccttccttctcctcaatcaccagtgccaacagtgttgatcttcctgcctgtttcttcttgaaatttccccagccaatcccagtatctagagcatttgttcagaaactgcagaactgcacaggaattccattgtttgaaactcaaccaacttatgcacccctgtatgaactgatcactcagtttgagctatcaaaggaccctgaccccatacctttgaatcacaacatgagattttatgctgctcttcctggtcagcagcactgctatttcctcaacaaggatgctcctcttccagatggccgaagtctacagggaacccttgttagcaaaatcacctttcagcaccctggccgagttcctcttatcctaaatctgatcagacaccaagtggcctataacaccctcattggaagctgtgtcaaaagaactattctgaaagaagattctcctgggcttctccaatttgaagtgtgtcctctctcagagtctcgtttcagcgtatcttttcagcaccctgtgaatgactccctggtgtgtgtggtaatggatgtgcaggactcaacacatgtgagctgtaaactctacaaagggctgtcggatgcactgatctgcacagatgacttcattgccaaagttgttcaaagatgtatgtccatccctgtgacgatgagggctattcggaggaaagctgaaaccattcaagccgacaccccagcactgtccctcattgcagagacagttgaagacatggtgaaaaagaacctgcccccggctagcagcccagggtatgcaattccacagggggccggtaccgagctcgatta

SEQ ID NO: 377288 - DNA, 554 bp, Homo sapiens
cagacatcacaaaaaacattacgcagtacaggcccgctgctgatcggccgaggagatggcggcggcctcgagcacccttctcttcttgccgccggggacttcagattgatccttcccgggaagagtagggactgctggtgccctgcgtcccgggatcccgagccaacttgtttcctccgttagtggtggggaagggcttatccttttgtggcggatctagcttctcctcgccttcaggatgaaagctcagggggaaaccgagggtaagtgactgtaggggaaaggagggggcgggacacaactgggggagccagtttgtgagaggaggttcttgcagatgtcccatgggggccactttaggggcatagagtccaggagagggaatgtgtattagttttagattgtcactataccctccttggtgattatagagcttcgactttagggcgatggggactctcaacttctgtgaagatttcatgctcgactagggcacttttggcctaaagtggtgggagacggggcaaatgaatacaaaatcagcttacatctcg

SEQ ID NO: 377289 - DNA, 522 bp, Homo sapiens
  misc_feature (200)..(200): n is a, c, g, or t
  misc_feature (234)..(234): n is a, c, g, or t
tccttctcgggttccaagcaaattctcctgccctcaacccttccaagcagctgggattaacaggtgccctgccacccacgctccgctaatttttgtagttttagtaaagatggggttttgcaatgttggcaagcccggtctcaaactcctgacctcaggtgatctgcccgcctcagcctcccaaggtgctgggatgacanggctgagccaccccgcttggtcatatttttcaanctattaactcatgttcttctcatctactctccggccaaactgaagactaaaatgtacttggctctccaatccttagaacaagatctttctaaaatggcaattatgtactggaaagactgctaaaaccttaattctacatgatcccttgagtttttctctggggagattagggtcctattttatacatctctattaagcctgtatgataatatgtcctttctcttccaaaatgatgattgtatttgaacttctgagtatcagtatcgctaagtcgttgttacacattct

SEQ ID NO: 377290 - DNA, 1289 bp, Homo sapiens
ccacgcgtcgcggacgcgtgggtcgcccacgcgtccgccacgcgtccgagggtcctctcaaaaattctgcggccttactttgatattgacacctgcactgtgccattcctgattattccattcaggatctgtatcagcgggatggggcatggtccccagcacaactcttctgggttaaaaaaaaaaagccaggtgattcctttgtgtgttatgtcgtaagtggagtgacttcatcatatatggaagaagatttctatattcagctttttctgcaggttggagtcagcatagagttggaaaatcagctttggctttctttcctgtctcatttcctctagtgttctcctttttattgtcatcagctctcaacaactctgccacttttgtgtcccaaggtaataagatgtaggaaacaaaacattgtaaagtggagcaagaaaagttatcaattaaccacatcagagtcaaatgtcttgggtgacactaaggaggatatgggcaggtgataccagagtgctttatcttgtgatgttgatacagtagcagcctctcagacattcagccaggttggatttctcatgagtttgtcacctagttttgaatcctatcccgttggtttctgcaggaaaaaaaaaaaaatttatgtggtttttaaaatttgttctgagtggggagaatcttagggggaatgtactgaatagtatcatgggctcagctcccccatgcagggccaacaaataccaaaatgagtaaactgggaagcttttctctctttctgtcttcatcccagatcaaagaatcccgagttaggatctggatgaaggataagcccctgaattgtcgatgggctcacccccacactgacccagcatctgaacttgcttaacagggagccggggctaaactgcttcaccctgcctgagaaccagggagcactgcatttctccacagggtggaggagaagaggcagaataaaccaagcctgggacacctccctcctgtctaggtgtactcattcttctgtttcaaaagaaggcaaggacatgaagtcaacttctacctatcttctgctgctggtgtcttatgtattctcagtttgacctgattcctcttctgtcttttgacttaacattaggggttcttggtcataacctgctctgatgtacataaagatttcaggttcaatatcaatgtgtcttaaaacagaagtattttagcgggtggggggtggggtggtggggacaaacaacgcaggatataattgccaaaaccaggcttgaggttggtga

SEQ ID NO: 377291 - DNA, 7595 bp, Homo sapiens
cagacatcacaaaaaacattacgcagtacaggcccgctgctgatcggccgaggagatggcggcggcctcgagcacccttctcttcttgccgccggggacttcagattgatccttcccgggaagagtagggactgctggtgccctgcgtcccgggatcccgagccaacttgtttcctccgttagtggtggggaagggcttatccttttgtggcggatctagcttctcctcgccttcaggatgaaagctcagggggaaaccgaggagtcagaaaagctgagtaagatgagttctctcctggaacggctccatgcaaaatttaaccaaaatagaccctggagtgaaaccattaagcttgtgcgtcaagtcatggagaagagggttgtgatgagttctggagggcatcaacatttggtcagctgtttggagacattgcagaaggctctcaaagtaacatctttaccagcaatgactgatcgtttggagtccatagcaagacagaatggactgggctctcatctcagtgccagtggcactgaatgttacatcacgtcagatatgttctatgtggaagtgcagttagatcctgcaggacagctttgtgatgtaaaagtggctcaccatggggagaatcctgtgagctgtccggagcttgtacagcagctaagggaaaaaaattttgatgaattttctaagcaccttaagggccttgttaatctgtataaccttccaggggacaacaaactgaagactaaaatgtacttggctctccaatccttagaacaagatctttctaaaatggcaattatgtactggaaagcaactaatgctggtcccttggataagattcttcatggaagtgttggctatctcacaccaaggagtgggggtcatttaatgaacctgaagtactatgtctctccttctgacctactggatgacaagactgcatctcccatcattttgcatgagaataatgtttctcgatctttgggcatgaatgcatcagtgacaattgaaggaacatctgctgtgtacaaactcccaattgcaccattaattatggggtcacatccagttgacaataaatggaccccttccttctcctcaatcaccagtgccaacagtgttgatcttcctgcctgtttcttcttgaaatttccccagccaatcccagtatctagagcatttgttcagaaactgcagaactgcacaggaattccattgtttgaaactcaaccaacttatgcacccctgtatgaactgatcactcagtttgagctatcaaaggaccctgaccccatacctttgaatcacaacatgagattttatgctgctcttcctggtcagcagcactgctatttcctcaacaaggatgctcctcttccagatggccgaagtctacagggaacccttgttagcaaaatcacctttcagcaccctggccgagttcctcttatcctaaatctgatcagacaccaagtggcctataacaccctcattggaagctgtgtcaaaagaactattctgaaagaagattctcctgggcttctccaatttgaagtgtgtcctctctcagagtctcgtttcagcgtatcttttcagcaccctgtgaatgactccctggtgtgtgtggtaatggatgtgcaggactcaacacatgtgagctgtaaactctacaaagggctgtcggatgcactgatctgcacagatgacttcattgccaaagttgttcaaagatgtatgtccatccctgtgacgatgagggctattcggaggaaagctgaaaccattcaagccgacaccccagcactgtccctcattgcagagacagttgaagacatggtgaaaaagaacctgcccccggctagcagcccagggtatggcatgaccacaggcaacaacccaatgagtggtaccactacatcaaccaacacctttccggggggtcccattgccaccttgtttaatatgagcatgagcatcaaagatcggcatgagtcggtgggccatggggaggacttcagcaaggtgtctcagaacccaattcttaccagtttgttgcaaatcacagggaacggggggtctaccattggctcgagtccgacccctcctcatcacacgccgccacctgtctcttcgatggccggcaacaccaagaaccacccgatgctcatgaaccttctcaaagataatcctgcccaggatttctcaaccctttatggaagcagccctttagaaaggcagaactcctcttccggctcaccccgcatggaaatatgctcggggagcaacaagaccaagaaaaagaagtcatcaagattaccacctgagaaaccaaagcaccagactgaagatgactttcagagggagctattttcaatggatgttgactcacagaaccctatctttgatgtcaacatgacagctgacacgctggatacgccacacatcactccagctccaagccagtgtagcactcccccaacaacttacccacaaccagtacctcacccccaacccagtattcaaaggatggtccgactatccagttcagacagcattggcccagatgtaactgacatcctttcagacattgcagaagaagcttctaaacttcccagcactagtgatgattgcccagccattggcacccctcttcgagattcttcaagctctgggcattctcagagtaccctgtttgactctgatgtctttcaaactaacaataatgaaaatccatacactgatccagctgatcttattgcagatgctgctggaagccccagtagtgactctcctaccaatcatttttttcatgatggagtagatttcaatcctgatttattgaacagccagagccaaagtggttttggagaagaatattttgatgaaagcagccaaagtggggataatgatgatttcaaaggatttgcatctcaggcactaaatactttgggggtgccaatgcttggaggtgataatggggagaccaagtttaagggcaataaccaagccgacacagttgatttcagtattatttcagtagccggcaaagctttagctcctgcagatcttatggagcatcacagtggtagtcagggtcctttactgaccactggggacttagggaaagaaaagactcaaaagagggtaaaggaaggcaatggcaccagtaatagtactctctcggggcccggattagacagcaaaccagggaagcgcagtcggaccccttctaatgatgggaaaagcaaagataagcctccaaagcggaagaaggcagacactgagggaaagtctccatctcatagttcttctaacagaccttttaccccacctaccagtacaggtggatctaaatcgccaggcagtgcaggaagatctcagactcccccaggtgttgccacaccacccattcccaaaatcactattcagattcctaagggaacagtgatggtgggcaagccttcctctcacagtcagtataccagcagtggttctgtgtcttcctcaggcagcaaaagccaccatagccattcttcctcctcttcctcatctgcttccacctcagggaagatgaaaagcagtaaatcagaaggttcatcaagttccaagttaagtagcagtatgtattctagccaggggtcttctggatctagccagtccaaaaattcatcccagtctggggggaagccaggctcctctcccataaccaagcatggactgagcagtggctctagcagcaccaagatgaaacctcaaggaaagccatcatcacttatgaatccttctttaagtaaaccaaacatatccccttctcattcaaggccacctggaggctctgacaagcttgcctctccaatgaagcctgttcctggaactcctccatcctctaaagccaagtcccctatcagttcaggttctggtggttctcatatgtctggaactagttcaagctctggcatgaagtcatcttcagggttaggatcctcaggctcgttgtcccagaaaactcccccatcatctaattcctgtacggcatcttcctcctccttttcctcaagtggctcttccatgtcatcctctcagaaccagcatgggagttctaaaggaaaatctcccagcagaaacaagaagccgtccttgacagctgtcatagataaactgaagcatggggttgtcaccagtggccctgggggtgaagacccactggacggccagatgggggtgagcacaaattcttccagccatcctatgtcctccaaacataacatgtcaggaggagagtttcagggcaagcgtgagaaaagtgataaagacaaatcaaaggtttccacctccgggagttcagtggattcttctaagaagacctcagagtcaaaaaatgtggggagcacaggtgtggcaaaaattatcatcagtaagcatgatggaggctcccctagcattaaagccaaagtgactttgcagaaacctggggaaagtagtggagaagggcttaggcctcaaatggcttcttctaaaaactatggctctccactcatcagtggttccactccaaagcatgagcgtggctctcccagccatagtaagtcaccagcatataccccccagaatctggacagtgaaagtgagtcaggctcctccatagcagagaaatcttatcagaatagtcccagctcagacgatggtatccgaccacttccagaatacagcacagagaaacataagaagcacaaaaaggaaaagaagaaagtaaaagacaaagatagggaccgagaccgggacaaagaccgagacaagaaccagtccttgtctatgacaagtaacacaatcttatctgcagacagaccctcaaggctcagcccagactttatgattggggaggaagatgatgatcttatggatgtggccctgattgggaattaggaaccttatttcctaaaagaaacagggccagaggaaaaaaaactattgataagtttataggcaaaccaccataaggggtgagtcagacaggtctgatttggttaagaatcctaaatggcatggctttgacatcaagctgggtgaattagaaaggcatatccagaccctattaaagaaaccacagggtttgattctggttaccaggaagtcttctttgttcctgtgccagaaagaaagttaaaatacttgcttaagaaagggaggggggtgggaggggtgtagggagagggaagggagggaaacagttttgtgggaaatattcatatatattttcttctccctttttccatttttaggccatgttttaaactcattttagtgcatgtatatgaagggctgggcagaaaatgaaaaagcaatacattccttgatgcatttgcatgaaggttgttcaactttgtttgaggtagttgtccgtttgagtcatgggcaaatgaaggactttggtcattttggacacttaagtaatgtttggtgtctgtttcttaggagtgactgggggagggaagattattttagctatttatttgtaatattttaaccctttatctgtttgtttttatacagtgtttcgttctaaatctatgaggtttagggttcaaaatgatggaaggccgaagagcaaggcttatatggtggtagggagcttatagcttgtgctaatactgtagcatcaagcccaagcaaattagtcagagcccgcctttagagttaaatataatagaaaaaccaaaatgatatttttattttaggagggtttaaatagggttcagagatcataggaatattaggagttacctctctgtggaggtattgacttgtaatctcattttcctttcaaaaaaaaaaaaaaaagctaaggtggcttgttgggatgtaaacatgttttcagatgcagtaaggtttagtgtaggacagccttcctgacccagtggcatgaaaaccattacaggattaatagttctcctacttccacaatgtgccaaaagtctgcatcccagcattttgtttgcaggagaactgatgccattcctaagagctggactcactgtttctcttcatcacaaggagaaggagtccaaactttaatcactccactgtatgctccctgagataaaacagtaaaaaatccgcagccatagttcacttaaaacaatttcaagctcacttttgaagtaatgggggcctggaatgctaggtgagcatgaagataaacccttgctactatgtagcaacccaattggacctttttggagaaataggtctgagtctggattctgggggacatcaataagagcccttcacataaaaatatagaaatccaggagactgtttcgagtgcaacagaagttctcagtatttggagggtcctctcaaaaattctgcggccttactttgatattgacacctgcactgtgccattcctgattattccattcaggatctgtatcagcgggatggggcatggtccccagcacaactcttctgggttaaaaaaaaaaagccaggtgattcctttgtgtgttatgtcgtaagtggagtgacttcatcatatatggaagaagatttctatattcagctttttctgcaggttggagtcagcatagagttggaaaatcagctttggctttctttcctgtctcatttcctctagtgttctcctttttattgtcatcagctctcaacaactctgccacttttgtgtcccaaggtaataagatgtaggaaacaaaacattgtaaagtggagcaagaaaagttatcaattaaccacatcagagtcaaatgtcttgggtgacactaaggaggatatgggcaggtgataccagagtgctttatcttgtgatgttgatacagtagcagcctctcagacattcagccaggttggatttctcatgagtttgtcacctagttttgaatcctatcccgttggtttctgcaggaaaaaaaaaaaaatttatgtggtttttaaaatttgttctgagtggggagaatcttagggggaatgtactgaatagtatcatgggctcagctcccccatgcagggccaacaaataccaaaatgagtaaactgggaagcttttctctctttctgtcttcatcccagatcaaagaatcccgagttaggatctggatgaaggataagcccctgaattgtcgatgggctcacccccacactgacccagcatctgaacttgcttaacagggagccggggctaaactgcttcaccctgcctgagaaccagggagcactgcatttctccacagggtggaggagaagaggcagaataaaccaagcctgggacacctccctcctgtctaggtgtactcattcttctgtttcaaaagaaggcaaggacatgaagtcaacttctacctatcttctgctgctggtgtcttatgtattctcagtttgacctgattcctcttctgtcttttgacttaacattaggggttcttggtcataacctgctctgatgtacataaagatttcaggttcaatatcaatgtgtcttaaaacagaagtattttagcgggtggggggtggggtggtggggacaaacaacgcaggatataattgccaaaaccaggcttgaggttggtga

SEQ ID NO: 377292 - DNA, 6213 bp, Homo sapiens
gcgatagatcgagccggtaccatctaaatctgatcagacaccaagtggcctataacaccctcattggaagctgtgtcaaaagaactattctgaaagaagattctcctgggcttctccaatttgaagtgtgtcctctctcagagtctcgtttcagcgtatcttttcagcaccctgtgaatgactccctggtgtgtgtggtaatggatgtgcaggactcaacacatgtgagctgtaaactctacaaagggctgtcggatgcactgatctgcacagatgacttcattgccaaagttgttcaaagatgtatgtccatccctgtgacgatgagggctattcggaggaaagctgaaaccattcaagccgacaccccagcactgtccctcattgcagagacagttgaagacatggtgaaaaagaacctgcccccggctagcagcccagggtatggcatgaccacaggcaacaacccaatgagtggtaccactacatcaaccaacacctttccggggggtcccattgccaccttgtttaatatgagcatgagcatcaaagatcggcatgagtcggtgggccatggggaggacttcagcaaggtgtctcagaacccaattcttaccagtttgttgcaaatcacagggaacggggggtctaccattggctcgagtccgacccctcctcatcacacgccgccacctgtctcttcgatggccggcaacaccaagaaccacccgatgctcatgaaccttctcaaagataatcctgcccaggatttctcaaccctttatggaagcagccctttagaaaggcagaactcctcttccggctcaccccgcatggaaatatgctcggggagcaacaagaccaagaaaaagaagtcatcaagattaccacctgagaaaccaaagcaccagactgaagatgactttcagagggagctattttcaatggatgttgactcacagaaccctatctttgatgtcaacatgacagctgacacgctggatacgccacacatcactccagctccaagccagtgtagcactcccccaacaacttacccacaaccagtacctcacccccaacccagtattcaaaggatggtccgactatccagttcagacagcattggcccagatgtaactgacatcctttcagacattgcagaagaagcttctaaacttcccagcactagtgatgattgcccagccattggcacccctcttcgagattcttcaagctctgggcattctcagagtaccctgtttgactctgatgtctttcaaactaacaataatgaaaatccatacactgatccagctgatcttattgcagatgctgctggaagccccagtagtgactctcctaccaatcatttttttcatgatggagtagatttcaatcctgatttattgaacagccagagccaaagtggttttggagaagaatattttgatgaaagcagccaaagtggggataatgatgatttcaaaggatttgcatctcaggcactaaatactttgggggtgccaatgcttggaggtgataatggggagaccaagtttaagggcaataaccaagccgacacagttgatttcagtattatttcagtagccggcaaagctttagctcctgcagatcttatggagcatcacagtggtagtcagggtcctttactgaccactggggacttagggaaagaaaagactcaaaagagggtaaaggaaggcaatggcaccagtaatagtactctctcggggcccggattagacagcaaaccagggaagcgcagtcggaccccttctaatgatgggaaaagcaaagataagcctccaaagcggaagaaggcagacactgagggaaagtctccatctcatagttcttctaacagaccttttaccccacctaccagtacaggtggatctaaatcgccaggcagtgcaggaagatctcagactcccccaggtgttgccacaccacccattcccaaaatcactattcagattcctaagggaacagtgatggtgggcaagccttcctctcacagtcagtataccagcagtggttctgtgtcttcctcaggcagcaaaagccaccatagccattcttcctcctcttcctcatctgcttccacctcagggaagatgaaaagcagtaaatcagaaggttcatcaagttccaagttaagtagcagtatgtattctagccaggggtcttctggatctagccagtccaaaaattcatcccagtctggggggaagccaggctcctctcccataaccaagcatggactgagcagtggctctagcagcaccaagatgaaacctcaaggaaagccatcatcacttatgaatccttctttaagtaaaccaaacatatccccttctcattcaaggccacctggaggctctgacaagcttgcctctccaatgaagcctgttcctggaactcctccatcctctaaagccaagtcccctatcagttcaggttctggtggttctcatatgtctggaactagttcaagctctggcatgaagtcatcttcagggttaggatcctcaggctcgttgtcccagaaaactcccccatcatctaattcctgtacggcatcttcctcctccttttcctcaagtggctcttccatgtcatcctctcagaaccagcatgggagttctaaaggaaaatctcccagcagaaacaagaagccgtccttgacagctgtcatagataaactgaagcatggggttgtcaccagtggccctgggggtgaagacccactggacggccagatgggggtgagcacaaattcttccagccatcctatgtcctccaaacataacatgtcaggaggagagtttcagggcaagcgtgagaaaagtgataaagacaaatcaaaggtttccacctccgggagttcagtggattcttctaagaagacctcagagtcaaaaaatgtggggagcacaggtgtggcaaaaattatcatcagtaagcatgatggaggctcccctagcattaaagccaaagtgactttgcagaaacctggggaaagtagtggagaagggcttaggcctcaaatggcttcttctaaaaactatggctctccactcatcagtggttccactccaaagcatgagcgtggctctcccagccatagtaagtcaccagcatataccccccagaatctggacagtgaaagtgagtcaggctcctccatagcagagaaatcttatcagaatagtcccagctcagacgatggtatccgaccacttccagaatacagcacagagaaacataagaagcacaaaaaggaaaagaagaaagtaaaagacaaagatagggaccgagaccgggacaaagaccgagacaagaaaaaatctcatagcatcaagccagagagttggtccaaatcacccatctcttcagaccagtccttgtctatgacaagtaacacaatcttatctgcagacagaccctcaaggctcagcccagactttatgattggggaggaagatgatgatcttatggatgtggccctgattgggaattaggaaccttatttcctaaaagaaacagggccagaggaaaaaaaactattgataagtttataggcaaaccaccataaggggtgagtcagacaggtctgatttggttaagaatcctaaatggcatggctttgacatcaagctgggtgaattagaaaggcatatccagaccctattaaagaaaccacagggtttgattctggttaccaggaagtcttctttgttcctgtgccagaaagaaagttaaaatacttgcttaagaaagggaggggggtgggaggggtgtagggagagggaagggagggaaacagttttgtgggaaatattcatatatattttcttctccctttttccatttttaggccatgttttaaactcattttagtgcatgtatatgaagggctgggcagaaaatgaaaaagcaatacattccttgatgcatttgcatgaaggttgttcaactttgtttgaggtagttgtccgtttgagtcatgggcaaatgaaggactttggtcattttggacacttaagtaatgtttggtgtctgtttcttaggagtgactgggggagggaagattattttagctatttatttgtaatattttaaccctttatctgtttgtttttatacagtgtttcgttctaaatctatgaggtttagggttcaaaatgatggaaggccgaagagcaaggcttatatggtggtagggagcttatagcttgtgctaatactgtagcatcaagcccaagcaaattagtcagagcccgcctttagagttaaatataatagaaaaaccaaaatgatatttttattttaggagggtttaaatagggttcagagatcataggaatattaggagttacctctctgtggaggtattgacttgtaatctcattttcctttcaaaaaaaaaaaaaaaagctaaggtggcttgttgggatgtaaacatgttttcagatgcagtaaggtttagtgtaggacagccttcctgacccagtggcatgaaaaccattacaggattaatagttctcctacttccacaatgtgccaaaagtctgcatcccagcattttgtttgcaggagaactgatgccattcctaagagctggactcactgtttctcttcatcacaaggagaaggagtccaaactttaatcactccactgtatgctccctgagataaaacagtaaaaaatccgcagccatagttcacttaaaacaatttcaagctcacttttgaagtaatgggggcctggaatgctaggtgagcatgaagataaacccttgctactatgtagcaacccaattggacctttttggagaaataggtctgagtctggattctgggggacatcaataagagcccttcacataaaaatatagaaatccaggagactgtttcgagtgcaacagaagttctcagtatttggagggtcctctcaaaaattctgcggccttactttgatattgacacctgcactgtgccattcctgattattccattcaggatctgtatcagcgggatggggcatggtccccagcacaactcttctgggttaaaaaaaaaaagccaggtgattcctttgtgtgttatgtcgtaagtggagtgacttcatcatatatggaagaagatttctatattcagctttttctgcaggttggagtcagcatagagttggaaaatcagctttggctttctttcctgtctcatttcctctagtgttctcctttttattgtcatcagctctcaacaactctgccacttttgtgtcccaaggtaataagatgtaggaaacaaaacattgtaaagtggagcaagaaaagttatcaattaaccacatcagagtcaaatgtcttgggtgacactaaggaggatatgggcaggtgataccagagtgctttatcttgtgatgttgatacagtagcagcctctcagacattcagccaggttggatttctcatgagtttgtcacctagttttgaatcctatcccgttggtttctgcaggaaaaaaaaaaaaatttatgtggtttttaaaatttgttctgagtggggagaatcttagggggaatgtactgaatagtatcatgggctcagctcccccatgcagggccaacaaataccaaaatgagtaaactgggaagcttttctctctttctgtcttcatcccagatcaaagaatcccgagttaggatctggatgaaggataagcccctgaattgtcgatgggctcacccccacactgacccagcatctgaacttgcttaacagggagccggggctaaactgcttcaccctgcctgagaaccagggagcactgcatttctccacagggtggaggagaagaggcagaataaaccaagcctgggacacctccctcctgtctaggtgtactcattcttctgtttcaaaagaaggcaaggacatgaagtcaacttctacctatcttctgctgctggtgtcttatgtattctcagtttgacctgattcctcttctgtcttttgacttaacattaggggttcttggtcataacctgctctgatgtacataaagatttcaggttcaatatcaatgtgtcttaaaacagaagtattttagcgggtggggggtggggtggtggggacaaacaacgcaggatataattgccaaaaccaggcttgaggttggtga

SEQ ID NO: 377293 - DNA, 448 bp, Homo sapiens
ttttcaatataatatataagagggcatgctactgtgacagatgcacctgatgtaggattagcaatgttgaggtccaggccagcaaagtgcagatggaaaggtcttgtcccatagatcaaaggaaagcccatgtttagaatgtaaatgaaatgagctctttcctttgagtgtaaaatatggtcttatttactggagtagatttagtttgtttcttcttgatgcttcgagttgcagtttcactgttttaatgaaactcagctgtaatattgtttgccccacctcacctcacctccataaaagtgaagcacctttggaaatgaaaacagtatctaccaaaacccctctagtggtattgattatatttggtaagcttggtaagatgttgctgtttttaacaccagtattgtacatttggtaattaaaaaactgacttgaaagaagaatgaac

SEQ ID NO: 377294 - DNA, 349 bp, Homo sapiens
tgggagtttcactcttgttgcgcaggctggggtgcagtggtgggatctcggctcacagcaaccttcacctcctgggttcaagcaattctcctgcctcagcctcctgagtagctgggattacaggcgtgcgctaccatggctggctaattttgtatttttagtagagacagggcttcaccatgttggtcaagctggtctctaactcctgacctcaagtgatccacctgccttggcctcccaaagtgctgggattacaggtgtattgggcctggcctcaacgtattttattgaagttatctaaaagtatcttatgttttatgagaaggcctatgaatgcagtttgtcgttt

SEQ ID NO: 377295 - DNA, 145 bp, Homo sapiens
gggaatccatacagataatgtaagaaactgagagtctcagcagggcatttctgaatgagcactgcctaagttgggattatgtaagttggaagcttattgtggtaattaacaagttactatgggttaaggcaacagaagagacggc

SEQ ID NO: 377296 - DNA, 454 bp, Homo sapiens
tggtgagctgagattgcgccattgcactccagcctgggcaacaagagcgaaactccgtctaaaaaaaaaagctataactagtaacagttacccaactaagtaaataaaaccaagaaaatggaataaacaggaagaacactgtgtcacagatgacacagctctatctgtgtaagagaaaggaaaggatctagtccacttcttcctttagcatcaaaagagaagacagaagacaaactcaaagaaagaacagaaatggtagccagaaagcagaatgcagaaagtagaaattggctttgtctcatcccttcggtctgtgtggtggctgtgaaagtggttgaataagaaaacaggccaggtgcagtagctcacatctgtaatcccagcacttttagaggccgagggcagaggatggctttaagccaagtcttcccttggccaattttggcaaaagcgc

SEQ ID NO: 377297 - DNA, 653 bp, Homo sapiens
gttcaatttaatattttataaattaaaatctgaatataattgacactatttcaatcttgtttgaaacagctccataatccctaagacctttcacacacactggaactctacactacaatacttttctgtggttattataagggtacaagatgtccttacccgctcttggagaaagtctacccaataaaatagagtaaataataccaagaagtgattaaaaatgagaagccacaatggtgtctaaaaatcataagaggaaaatttaaagttcacatagcttaataaatttcaaaaattataatgcttcaacaaagtaacaaactttacataagcaacctggaatttcttaaaggaaaatacagtctagtgaaaaaatgctttcagatcaacaacagaaaagttgattaatggataatcaattcttaaggtcatctttttccaggattcctagcatttttgggaaaaaggtaattatcagaatatattctgttacttgtacgtcaagttgaaaattaatctgcaagacttagtagaaagagcactggtctcaagtctcaatgacccctgcctctacctaaaccgtgtgaccttaagcgaatcatttaacctttctgggtttcaatttactcctctgaaacatgagataattgaac

SEQ ID NO: 377298 - DNA, 1063 bp, Homo sapiens
gttgcagttcccgcctgccttaaacagaacaagcaagaagagctttcatggccagattccccccaggacattggggaagctgctggcattgtctttctgggaagattttgcttcctgggacaaaatggcagtctgattaccagtgtcgggcctgcatgctgccccggacacacgcacgcacgcgcacacacgtgtgcacatgggccatagccacaagccagctctcctccagggtcctttcaacctcgctgtccagggaccctgtccttcttgcccgtggggcttccatctggcagagaacgttcagggcttgttgaacttgaaagctcattagacttaagctgtcacctgtgcttggtgccccaggaacagccagagaggacagcagctctagattggatttctgttgcgtttcctccatgttggagggtgtcggaatagagtctgagaagcagaaggaggtctgggagtcatgcaggaatgaatacttctggtcctttggggggaggcaagagttcaccattagtccaagtctgcagcctcccattctctaggcctgcagccaaattactggacctaaacttctgggagccatgaactgggctctacattgttccaaaggaaaggggctcaaggaatcagtgcagcttagcaattgtcccttagaaagctcacagatcaaaaacctcccctgcgtatcaattctacagccaccagcagcacttcaactgacctttctgaaaactgaaaaaatgaacaccaaataagtcaaccacagatgtactaacccacatcaggcttgcttttttagaggcctgcgctgagccatcaactgaacaggctcacttctaaatcagaaagcagcctgtgctgcgtgcctaagggaacgtcacaagacagtaggtctggaaagaagcacccaggcagccaagggtgggagctgcaccccaggatcacaaacgccttggtgaatgcctgctctacctgcagtgtggcccctttggcctctacagctggaagtcttcatctgtacaaagtgaataataaaaatattataaaacaa

SEQ ID NO: 377299 - DNA, 444 bp, Homo sapiens
acagtaccatagtagttgttgcagacaaaatccagttagaggaaaatcagaatatttacatagtctcaaagtatctctcccaggataattattaactacaaagaaaaaatagtaatccgacagtggaggtactatgttaacaaagtgatcaaggttaacatcaccagtaatgagacaaggacatcatgaacccaaagaggcagtgagaaggacacagcggcatttctgtgacgtttgttattcttgccaaaaatgcataatctttttatctttctaatcatgataaaatattgtaaaactctaaactgaggaacattctacaaaataactggccaggtcaggtgcagaggctcatgtctgtaatcccagcattttggtctcgaactcctggcttcaagcgattctcccacctcagcctcccaaagtgctgggattacagggcgt

SEQ ID NO: 377300 - DNA, 661 bp, Homo sapiens
ttgtagttatatataagatattcactagcttgagacacctgccttgtgtatctggacttgtaggctaccttagagaaggtgcttttgggctgaattcaacaccctgagttctgagccatgttgtgtcttgctgaagaggtcagcaatattgtcaaaaatgtgaacctcttggaagatcaggtctagttaaatccctgctagtccagttttcttccagatttcaagcaatactgtcaaagataagagcattcaccagtcatggatactacagctattcaagctattcatttctatagatgagattaaggttgaccatgtggctgacccaccttcatcaaacacttctgcaagtgcaaatgtcctgctttgtcatttgcaccatcttctcctcacaaagcaggcaaaggggactatgttccagctcctaacctttctccatagacaactaaaaatggcaggcagtatagtagttaagccccatcaacttcaactcacatctcaaccttattaatcactaactgatcttatgtctttactgtaagcccttgtccttatatataaaatggggattatcagagtggctgcactctgcacagtgtttggcacacagtgaggactcagtacatgttagccctcattctcctccatcctcagcaacaga

SEQ ID NO: 377301 - DNA, 381 bp, Homo sapiens
aaaaaaatttttttgtgtgagacagagtctcactctgttgcccaggctggtgtgcagtggtacggtcttggctcactgcaacctgtgcctcctggattcaaatgattcttgtgcctcagcctcacgagtagctgggattacaggttcacaccctcacaactggctaactttttttttttttccttactttttactaagtaataccatgttggccaggctggtctaaaactcctggcctcaggtgagccactcgcctcagcctcccaaagtgctgggattacaggtgtgagccactacgctggccttaactttttttttttacattcatgatatatattcagtaataatatctaacttccttattatgaacagttgggggaa

SEQ ID NO: 377302 - DNA, 1172 bp, Homo sapiens
ctattcctcaagagaaggtgctcattactagaagagtacaaagtactgaggaaacagaaaattctaagacattgcttccaggggattccagtggatgcagaaggcttggtggagtggaggcagtaaagctggccctgacagatgaacagattttaaccctgggcccatgcaaaatctcagaggagggaaggcttgggacatgggtgggaaatggtatgcagtatagtttgtctgagatttagtgaccttaaggaagagtgaggtataaaggacaggtaagtgggaccagaacatgaaggctttacctccgtctttgaaagagggcctttgggccgggtgcagtggctcacatatgtaatcccagcactttgggaggctgaggcaggcagatcacgaggtcaggagatcgagaccatggtgaaaccctgtctctactaaaaatacaaaaaaattagccgggcatggtggtgggtgcctgtagtcccagttatttgggaggctgaggcaggagaatggtgtgaacctgggaggcggagcttgcagtaagccgagcttgtgccactgcactccagcctgggcgacaaagcgtgactccgtctcaaaaaaaaaaaaaagaaagagagcctttgaagaggtttaacctaggaatgttaatatcatttaaaatgatgtgttttatgtcaatatatattgatttggaaagatgtttataaggtaaaaacataacaaaacaatacgtacagtataatcccattttaaattgtaaagcgtatatatacacacacacatacacacacacagaagaggtaagacctgtaagtttatatttctcataacattggttatctctgggtgttgagagttgagggtttttttctgtttgtttatatttatatatttcctgacttttctacagttcacacttactactgttgtagttataaattattcacttgttttaaataagcacatatatgatggctgagtgagaatgatctagaactatgccagggattagataaaaacacagagtaaaagttggccatatagtaacatttttgatgtccaaattggagaggaatccctcaaatgttcaaaaatataggaatgggtcgggtgtggtggctcatgcctgtaatcccagcactttgggaggccaaggcaggaagatc

SEQ ID NO: 377303 - DNA, 354 bp, Homo sapiens
aggatgtataggagtttgccaggcagaaaagaagggagatggcatatttggcagagagatcacagtggggcggggagatgggtggatttggctgggaatggtggccatgcctgtaatcccagcactttggaaggccgaagagagaaaattgctagagctcaggagtttgagaccagcctgggcaatagagtaagactttgtctctatcaaaaatttaaaaattaactgggcttggcggtgtgcacctgtggtccagctactcaggaggctgaggtgggaggattgcttgagcccaagaggttgaggctgcagtaagccgtgactgagggcttgtgaaacagcaagaacctgtct

SEQ ID NO: 377304 - DNA, 1000 bp, Homo sapiens
ggaagtgacagtttattttcttcacttactggtaaatgaaagccaaaaagctgaattttcctaagtaaactagaaagaacatggagtgtgtgtgactaactaggatgtttgtgtttacgtttacaaagataactttcacctacagtggttgtagatacaagtaataaaaatgaacaagaccagtattctaacgtggttaccttccaagattggaaatttaaccaggcgttgaaatgctgaaaatttctgttagaaaagatgggcgaaggaattaatggtggatactgaaaccacagttggctgtatgagttgaactgtaacaggcaatacctgttgtatggccaacatgattactcagttgcagtgcacatgttggctggttggcatatgctctgtaagcgcagcttggcagtctttaagatccatagaaatactctttgacgtttgatctctaagttccatttctgggcatttgtccttaaggaatggaaaagcaggcaaactaaagctagtcattgcagcaataacccactggaaacaactgaaaatataatgagagaattgtagagtgctggataaaatgttgtgggtccactcaaaatgattcgagtgttgtagtgtggaaaatgcccaagccaggggggacacatttaaaatggtgggtacactctgattgtgattatccaaatatatagatggacaaggacaggagggttttttgaaaagtaaagacagatgagaagtgtaatataacctaagtctttaaaacgtagaaacatttaaaaatacaattgctttgaatttgagtggactcatataaaacaagaattgtctggatttgctgtcttgctgttaaggcagggttcttgaaaagagctgtgtgtccactgcctcaatcactcctcacagtcctgctgcttctctctttgctgaaaatgctttaggggtggaatgtctgttcttaaccactgtgggtggcttcataaatcacctccttact

SEQ ID NO: 377305 - DNA, 221 bp, Homo sapiens
ccccacaccgaggcccttcacctgctgtgtgtctgtttcaggcacatgcctcctttccatgtcacgtctgatttgtaaggaatttctgtccttagcattagcaatagctgagaagtttgcactgctgccttctctccttcactcttgagagggctctgccaagtcccacaggggtatcttggtgtcacctggcattttcctgggagctcagacagctgaaa

SEQ ID NO: 377306 - DNA, 811 bp, Homo sapiens
  misc_feature (6)..(6): n is a, c, g, or t
  misc_feature (133)..(133): n is a, c, g, or t
gatcgngccactgcattccagcctgggcaacagagcaagaacccgtctcaaaaaaaaaaaaaaaaaaaaaaaaaagcaccctgtgaggaaacagtactaattatttgatattctgggaaaagtgggggacaantgtcaggcttctttgtcgaaagtttatgaactgatggctcagttaatggctgcaagtatagtgtgtgtgtatatatatatatatacctagcagtatttattaaatcccactgtggtttcaagatgtctggccgcggtaagggcggaaagggtctaggtaagggtggcgccaagcgtcaccgtaaggtattgcgtgacaatatccaaggaatcaccaagcccgctatccgccgcctggctcgccgcggcggcgtcaagcgtatttctggcctcatttatgaggaaactcgcggagtgctgaaagttttcctggaaaatgtaatccgcgatgctgtcacctacacggaacacgccaaacgcaagacagtcacagccatggacgtggtgtacgcgctcaagcgccagggacgcactctttatggcttcggcggctgagcttacctctacagtacactaccgcaaaaccaacggcccttttcagggccacctatccactcaggagaaagagtagtagtcactgctaaaagtgtagtttcacgtgtttagtagctccggttttcaagttaaatggtcttattacgccttggcttcatatcttactggccggtgaggatagtgtattaaagtttattttcactcttgctgtgtcgcccatgctggagtaatcaatggcgcgatc

SEQ ID NO: 377307 - DNA, 1664 bp, Homo sapiens
atctaataggaaaggattagagttgtagactgatgtggtcctttaagtatgcttggaatagctgaggtaaataacaagactgaaaaactagatttaaaatagtggttttagaaaacaggatatcacaagtaacagtttttcaaatggatttttttaaagataaatttatgaaaacaggataaacaatataatggagagaaggagaaatagtgatgggtctgttttgcagtaaagtttatgcagaatgacgttttgcagaaaataacagaagcatcactttaaaaaatatatcattaagagccatgacgttaactgatgaaaataagtgatataacatactttgaaagatttttaaacagaaaattctgaatcgtgaatgagccttctctaggttttaattttttttcttcaaattatttccaacaaagtttggctataaactaacaccatctatccacaggaattttaataggaaaaggattagaattgtagactgattgttggtcctttaagtatgcttggaagaaaattcaatcgagtttcaaggctttttctaaatgggagggagaacaatattgatttaggattattttctttcatttaggattagaacagttaagtgcctttaaaaaggactttaaaaattattttgatacttatatatgatttttaattgttttcgtattttccaaataccatattaaaattttaatgaaatttatctcctatgaaaggaatttctttaaagcaaaattctgctttgcctttgatttccattttaaaagttaaaggcttccatctgaaactcctcaaatagagtcagatttttggcaatggaagtattaaaattccgatcagccctttggacgatgaagtttacctgcatattaggatttgttaggagtttttggcctcaccaagtgattcttttctattgcagagagcactttactcacctacctgttatgcaactttccctatgcctggaggtgcctccagccaggataccctactttgttacccaattctcctttttgttttacaagagtattcataatatctatatgtttatattccagactacatatttaaaaatgagatctcaaattatatgaaatggatttttaaatactgtgtttgcatacattgacctataaagaagattaaatatttaggtgaataattccctgctgcagtatttgtacacttcagactacctcttaggaaaagcttaacttagtattgcaaaattccctttctctttttttttttaagagatggggtctcgcactgttgcccaggctgaagtgcagtggcatgattgtaactcactgcatcctcgaactcctgggttcaagcaatcctcctgcttccatctgctgagtaggtaggactacagccatgcaccaacaaacctggctaattctttttcatttatatagttagtatcttgctgtgttgttcaagctggactccaactcccggactcaagtaatcctcccaccttagtctcctgcattgctggaattataggcacgagccactgcacctggcacccaaattacttctagttctcaagttagatgattaatatcacacttttctcatgtatgttttatgatagcattgaatttttataattaaaaatttcctaatgcaaacaa

SEQ ID NO: 377308 - DNA, 489 bp, Homo sapiens
gtcttttctgacgttttcagctgtgatagtcgctttgttctcgcgatatttccgggtacgcgggagccccggcgacccgggcttctgtgaaacatggcggtaggctgggaccataacacaagcatgactatatgaaggaagaggaaggttttcctgaagatgaggcgactgaatcggaaaaaaactttaagtttgtttctctaatagcatttacaactatggctttattaaccataatggaattctcagtatatcaagatacatggatgaagtatgaatacgaagtagacaaggatttttctagcaaattaagaattaatatagatattactgttgccatgaagtgtcaatatgttggagcggatgtattggatttagcagaaacaatggttgcatctgcagatggtttagtttatgaaccaacagtatttgatctttcaccacagcaggagtggcagaagatgcttgagctgattcagagtaggctct

SEQ ID NO: 377309 - DNA, 4254 bp, Homo sapiens
gtcttttctgacgttttcagctgtgatagtcgctttgttctcgcgatatttccgggtacgcgggagccccggcgacccgggcttctgtgaaacatggcggtaggctgggaccataacacaaggttattgtcataggataaattcctcaatgggcatttacttagaagaggagtggtgtgcatgactatatgaaggaagaggaaggttttcctgaagatgaggcgactgaatcggaaaaaaactttaagtttggtaaaagagttggatgcctttccgaaggttcctgagagctatgtagagacttcagccagtggaggtacagtttctctaatagcatttacaactatggctttattaaccataatggaattctcagtatatcaagatacatggatgaagtatgaatacgaagtagacaaggatttttctagcaaattaagaattaatatagatattactgttgccatgaagtgtcaatatgttggagcggatgtattggatttagcagaaacaatggttgcatctgcagatggtttagtttatgaaccaacagtatttgatctttcaccacagcagaaagagtggcagaggatgctgcagctgattcagagtaggctacaagaagagcattcacttcaagatgtgatatttaaaagtgcttttaaaagtacatcaacagctcttccaccaagagaagatgattcatcacagtctccaaatgcatgcagaattcatggccatctatatgtcaataaagtagcagggaattttcacataacagtgggcaaggcaattccacatcctcgtggtcatgcacatttggcagcacttgtcaaccatgaatcttacaatttttctcatagaatagatcatttgtcttttggagagcttgttccagcaattattaatcctttagatggaactgaaaaaattgctatagatcacaaccagatgttccaatattttattacagttgtgccaacaaaactacatacatataaaatatcagcagacacccatcagttttctgtgacagaaagggaacgtatcattaaccatgctgcaggcagccatggagtctctgggatatttatgaaatatgatctcagttctcttatggtgacagttactgaggagcacatgccattctggcagttttttgtaagactctgtggtattgttggaggaatcttttcaacaacaggcatgttacatggaattggaaaatttatagttgaaataatttgctgtcgtttcagacttggatcctataaacctgtcaattctgttccttttgaggatggccacacagacaaccacttacctcttttagaaaataatacacattaacacctcccgattgaaggagaaaaactttttgcctgagacataaaacctttttttaataataaaatattgtgcaatatattcaaagaaaagaaaacacaaataagcagaaaacatacttattttaaaaaagaaaaaaaaggataaaaaaacccaaactgaaattctatatacgttgtgtctgttacaaatgtcgtagaagaaatcatgcagctaaacgatgaagaagcccaactggagtgttgctttgaagatgacgccttcttatattttcatagcaaatgggtggtatcaaaatcagacattgcttcttgctgataaaaagcctgaaggaaataagtgaaactacatctatgggaaaaaaaaaaacattgagaagtgcaaatgttcgcatccttttgtttttaaaagatatgatgtcagaataaaatgtggaaaaacatacggaaaactagtctagactttaaagaattgtgatcaggtcacattgttaataaaaaaaaaaaacgggctagtccctatgttatagccatattaatgttaagccatattgacaagaccagttatccaataatttggtcttaaaaagtaactacttttctttgaactctggttattgacttatctaactgttgaagatagagtcttagaagactaaggtaaattctcacaggggcagatatgtaggtgttatgtaactagggtgtcattcacaaatggtatagtagaatcttatacacggaaaagaaagcacatttttttaaaaaagatgccaagttttttaatctaatcattatattattggtgtattttgggcaacatagggtgagttataaaaagatccgctactgatagtgaaaattaccggtttgtaaaacattaagagaaaaaataggatattttatacatgtggtgagtggagaacagggtaactttaaatgaaagtgtaaggcaaattgtaagcaccacaagatatatcagatttgagaggtgccatgttaaacattgtccattaaactataaaactgtattatgaagtatttgcattcagggtgtcctgaatatgattgattctgtattagattgtgttctaactttcttactatttaaggattggttctaaatcttcacattataaaagattaaaaacagtgagagggagctatcacacaggtactattaaaagctgtatttggaatatgtgtaccaatatcagttttccttttgtagtactgaatggcagtagaagaatcagcagccaatcctcaaagtttaaatcatttaaggaaatggggaaacaaaattccaggtaaataacaagactgaaaaactagatttaaaatagtggttttagaaaacaggatatcacaagtaacagtttttcaaatggatttttttaaagataaatttatgaaaacaggataaacaatataatggagagaaggagaaatagtgatgggtctgttttgcagtaaagtttatgcagaatgacgttttgcagaaaataacagaagcatcactttaaaaaatatatcattaagagccatgacgttaactgatgaaaataagtgatataacatactttgaaagatttttaaacagaaaattctgaatcgtgaatgagccttctctaggttttaattttttttcttcaaattatttccaacaaagtttggctataaactaacaccatctatccacaggaattttaataggaaaaggattagaattgtagactgattgttggtcctttaagtatgcttggaagaaaattcaatcgagtttcaaggctttttctaaatgggagggagaacaatattgatttaggattattttctttcatttaggattagaacagttaagtgcctttaaaaaggactttaaaaattattttgatacttatatatgatttttaattgttttcgtattttccaaataccatattaaaattttaatgaaatttatctcctatgaaaggaatttctttaaagcaaaattctgctttgcctttgatttccattttaaaagttaaaggcttccatctgaaactcctcaaatagagtcagatttttggcaatggaagtattaaaattccgatcagccctttggacgatgaagtttacctgcatattaggatttgttaggagtttttggcctcaccaagtgattcttttctattgcagagagcactttactcacctacctgttatgcaactttccctatgcctggaggtgcctccagccaggataccctactttgttacccaattctcctttttgttttacaagagtattcataatatctatatgtttatattccagactacatatttaaaaatgagatctcaaattatatgaaatggatttttaaatactgtgtttgcatacattgacctataaagaagattaaatatttaggtgaataattccctgctgcagtatttgtacacttcagactacctcttaggaaaagcttaacttagtattgcaaaattccctttctctttttttttttaagagatggggtctcgcactgttgcccaggctgaagtgcagtggcatgattgtaactcactgcatcctcgaactcctgggttcaagcaatcctcctgcttccatctgctgagtaggtaggactacagccatgcaccaacaaacctggctaattctttttcatttatatagttagtatcttgctgtgttgttcaagctggactccaactcccggactcaagtaatcctcccaccttagtctcctgcattgctggaattataggcacgagccactgcacctggcacccaaattacttctagttctcaagttagatgattaatatcacacttttctcatgtatgttttatgatagcattgaatttttataattaaaaatttcctaatgcaaacaa

SEQ ID NO: 377310 - DNA, 4122 bp, Homo sapiens
gtcttttctgacgttttcagctgtgatagtcgctttgttctcgcgatatttccgggtacgcgggagccccggcgacccgggcttctgtgaaacatggcggtaggctgggaccataacacaagcatgactatatgaaggaagaggaaggttttcctgaagatgaggcgactgaatcggaaaaaaactttaagtttggtaaaagagttggatgcctttccgaaggttcctgagagctatgtagagacttcagccagtggaggtacagtttctctaatagcatttacaactatggctttattaaccataatggaattctcagtatatcaagatacatggatgaagtatgaatacgaagtagacaaggatttttctagcaaattaagaattaatatagatattactgttgccatgaagtgtcaatatgttggagcggatgtattggatttagcagaaacaatggttgcatctgcagatggtttagtttatgaaccaacagtatttgatctttcaccacagcagaaagagtggcagaggatgctgcagctgattcagagtaggctacaagaagagcattcacttcaagatgtgatatttaaaagtgcttttaaaagtacatcaacagctcttccaccaagagaagatgattcatcacagtctccaaatgcatgcagaattcatggccatctatatgtcaataaagtagcagggaattttcacataacagtgggcaaaatagatcatttgtcttttggagagcttgttccagcaattattaatcctttagatggaactgaaaaaattgctatagatcacaaccagatgttccaatattttattacagttgtgccaacaaaactacatacatataaaatatcagcagacacccatcagttttctgtgacagaaagggaacgtatcattaaccatgctgcaggcagccatggagtctctgggatatttatgaaatatgatctcagttctcttatggtgacagttactgaggagcacatgccattctggcagttttttgtaagactctgtggtattgttggaggaatcttttcaacaacaggcatgttacatggaattggaaaatttatagttgaaataatttgctgtcgtttcagacttggatcctataaacctgtcaattctgttccttttgaggatggccacacagacaaccacttacctcttttagaaaataatacacattaacacctcccgattgaaggagaaaaactttttgcctgagacataaaacctttttttaataataaaatattgtgcaatatattcaaagaaaagaaaacacaaataagcagaaaacatacttattttaaaaaagaaaaaaaaggataaaaaaacccaaactgaaattctatatacgttgtgtctgttacaaatgtcgtagaagaaatcatgcagctaaacgatgaagaagcccaactggagtgttgctttgaagatgacgccttcttatattttcatagcaaatgggtggtatcaaaatcagacattgcttcttgctgataaaaagcctgaaggaaataagtgaaactacatctatgggaaaaaaaaaaacattgagaagtgcaaatgttcgcatccttttgtttttaaaagatatgatgtcagaataaaatgtggaaaaacatacggaaaactagtctagactttaaagaattgtgatcaggtcacattgttaataaaaaaaaaaaacgggctagtccctatgttatagccatattaatgttaagccatattgacaagaccagttatccaataatttggtcttaaaaagtaactacttttctttgaactctggttattgacttatctaactgttgaagatagagtcttagaagactaaggtaaattctcacaggggcagatatgtaggtgttatgtaactagggtgtcattcacaaatggtatagtagaatcttatacacggaaaagaaagcacatttttttaaaaaagatgccaagttttttaatctaatcattatattattggtgtattttgggcaacatagggtgagttataaaaagatccgctactgatagtgaaaattaccggtttgtaaaacattaagagaaaaaataggatattttatacatgtggtgagtggagaacagggtaactttaaatgaaagtgtaaggcaaattgtaagcaccacaagatatatcagatttgagaggtgccatgttaaacattgtccattaaactataaaactgtattatgaagtatttgcattcagggtgtcctgaatatgattgattctgtattagattgtgttctaactttcttactatttaaggattggttctaaatcttcacattataaaagattaaaaacagtgagagggagctatcacacaggtactattaaaagctgtatttggaatatgtgtaccaatatcagttttccttttgtagtactgaatggcagtagaagaatcagcagccaatcctcaaagtttaaatcatttaaggaaatggggaaacaaaattccaggtaaataacaagactgaaaaactagatttaaaatagtggttttagaaaacaggatatcacaagtaacagtttttcaaatggatttttttaaagataaatttatgaaaacaggataaacaatataatggagagaaggagaaatagtgatgggtctgttttgcagtaaagtttatgcagaatgacgttttgcagaaaataacagaagcatcactttaaaaaatatatcattaagagccatgacgttaactgatgaaaataagtgatataacatactttgaaagatttttaaacagaaaattctgaatcgtgaatgagccttctctaggttttaattttttttcttcaaattatttccaacaaagtttggctataaactaacaccatctatccacaggaattttaataggaaaaggattagaattgtagactgattgttggtcctttaagtatgcttggaagaaaattcaatcgagtttcaaggctttttctaaatgggagggagaacaatattgatttaggattattttctttcatttaggattagaacagttaagtgcctttaaaaaggactttaaaaattattttgatacttatatatgatttttaattgttttcgtattttccaaataccatattaaaattttaatgaaatttatctcctatgaaaggaatttctttaaagcaaaattctgctttgcctttgatttccattttaaaagttaaaggcttccatctgaaactcctcaaatagagtcagatttttggcaatggaagtattaaaattccgatcagccctttggacgatgaagtttacctgcatattaggatttgttaggagtttttggcctcaccaagtgattcttttctattgcagagagcactttactcacctacctgttatgcaactttccctatgcctggaggtgcctccagccaggataccctactttgttacccaattctcctttttgttttacaagagtattcataatatctatatgtttatattccagactacatatttaaaaatgagatctcaaattatatgaaatggatttttaaatactgtgtttgcatacattgacctataaagaagattaaatatttaggtgaataattccctgctgcagtatttgtacacttcagactacctcttaggaaaagcttaacttagtattgcaaaattccctttctctttttttttttaagagatggggtctcgcactgttgcccaggctgaagtgcagtggcatgattgtaactcactgcatcctcgaactcctgggttcaagcaatcctcctgcttccatctgctgagtaggtaggactacagccatgcaccaacaaacctggctaattctttttcatttatatagttagtatcttgctgtgttgttcaagctggactccaactcccggactcaagtaatcctcccaccttagtctcctgcattgctggaattataggcacgagccactgcacctggcacccaaattacttctagttctcaagttagatgattaatatcacacttttctcatgtatgttttatgatagcattgaatttttataattaaaaatttcctaatgcaaacaa

SEQ ID NO: 377311 - DNA, 1208 bp, Homo sapiens
gtcttttctgacgttttcagctgtgatagtcgctttgttctcgcgatatttccgggtacgcgggagccccggcgacccgggcttctgtgaaacatggcggtaggctgggaccataacacaagcatgactatatgaaggaagaggaaggttttcctgaagatgaggcgactgaatcggaaaaaaactttaagtttggtaaaagagttggatgcctttccgaaggttcctgagagctatgtagagacttcagccagtggaggtacagtttctctaatagcatttacaactatggctttattaaccataatggaattctcagtatatcaagatacatggatgaagtatgaatacgaagtagacaaggatttttctagcaaattaagaattaatatagatattactgttgccatgaagtgtcaatatgttggagcggatgtattggatttagcagaaacaatggttgcatctgcagatggtttagtttatgaaccaacagtatttgatctttcaccacagcagaaagagtggcagaggatgctgcagctgattcagagtaggctacaagaagagcattcacttcaagatgtgatatttaaaagtgcttttaaaagtacatcaacagctcttccaccaagagaagatgattcatcacagtctccaaatgcatgcagaattcatggccatctatatgtcaataaagtagcagggaattttcacataacagtgggcaaggcaattccacatcctcgtggtcatgcacatttggcagcacttgtcaaccatgaatcttacaatttttctcatagaatagatcatttgtcttttggagagcttgttccagcaattattaatcctttagatggaactgaaaaaattgctatagatcacaaccagatgttccaatattttattacagttgtgccaacaaaactacatacatataaaatatcagcagacacccatcagttttctgtgacagaaagggaacgtatcattaaccatgctgcaggcagccatggagtctctgggatatttatgaaatatgatctcagttctcttatggtgacagttactgaggagcacatgccattctggcagttttttgtaagactctgtggtattgttggaggaatcttttcaacaacaggcatgttacatggaattggagtcattactcgtgtaaataatagccggcgctaaggtcgctg

SEQ ID NO: 377312 - DNA, 3399 bp, Homo sapiens
gtttcaccatgttggccaggctggtctcgaactcctgacctcaggtgatccactcaccttggcctcccaaagtgctaggattacaggtgtgagccactgcactccagcctgggcaacagagtgagacgtctcaaaaaaaaaaagattgtgctgagatcgtgaattatgtggccttgtgactttgaaaagaaatccatttgttttaaaatctttcttgattatttttaaccatggaagtgaataatgcaaactgctttgttttcttccgtaatctattccattatagttatttattcttaaataacagtttaggaaataattaaaagcataaacttattgtttattacaggcatgttacatggaattggaaaatttatagttgaaataatttgctgtcgtttcagacttggatcctataaacctgtcaattctgttccttttgaggatggccacacagacaaccacttacctcttttagaaaataatacacattaacacctcccgattgaaggagaaaaactttttgcctgagacataaaacctttttttaataataaaatattgtgcaatatattcaaagaaaagaaaacacaaataagcagaaaacatacttattttaaaaaagaaaaaaaaggataaaaaaacccaaactgaaattctatatacgttgtgtctgttacaaatgtcgtagaagaaatcatgcagctaaacgatgaagaagcccaactggagtgttgctttgaagatgacgccttcttatattttcatagcaaatgggtggtatcaaaatcagacattgcttcttgctgataaaaagcctgaaggaaataagtgaaactacatctatgggaaaaaaaaaaacattgagaagtgcaaatgttcgcatccttttgtttttaaaagatatgatgtcagaataaaatgtggaaaaacatacggaaaactagtctagactttaaagaattgtgatcaggtcacattgttaataaaaaaaaaaaacgggctagtccctatgttatagccatattaatgttaagccatattgacaagaccagttatccaataatttggtcttaaaaagtaactacttttctttgaactctggttattgacttatctaactgttgaagatagagtcttagaagactaaggtaaattctcacaggggcagatatgtaggtgttatgtaactagggtgtcattcacaaatggtatagtagaatcttatacacggaaaagaaagcacatttttttaaaaaagatgccaagttttttaatctaatcattatattattggtgtattttgggcaacatagggtgagttataaaaagatccgctactgatagtgaaaattaccggtttgtaaaacattaagagaaaaaataggatattttatacatgtggtgagtggagaacagggtaactttaaatgaaagtgtaaggcaaattgtaagcaccacaagatatatcagatttgagaggtgccatgttaaacattgtccattaaactataaaactgtattatgaagtatttgcattcagggtgtcctgaatatgattgattctgtattagattgtgttctaactttcttactatttaaggattggttctaaatcttcacattataaaagattaaaaacagtgagagggagctatcacacaggtactattaaaagctgtatttggaatatgtgtaccaatatcagttttccttttgtagtactgaatggcagtagaagaatcagcagccaatcctcaaagtttaaatcatttaaggaaatggggaaacaaaattccaggtaaataacaagactgaaaaactagatttaaaatagtggttttagaaaacaggatatcacaagtaacagtttttcaaatggatttttttaaagataaatttatgaaaacaggataaacaatataatggagagaaggagaaatagtgatgggtctgttttgcagtaaagtttatgcagaatgacgttttgcagaaaataacagaagcatcactttaaaaaatatatcattaagagccatgacgttaactgatgaaaataagtgatataacatactttgaaagatttttaaacagaaaattctgaatcgtgaatgagccttctctaggttttaattttttttcttcaaattatttccaacaaagtttggctataaactaacaccatctatccacaggaattttaataggaaaaggattagaattgtagactgattgttggtcctttaagtatgcttggaagaaaattcaatcgagtttcaaggctttttctaaatgggagggagaacaatattgatttaggattattttctttcatttaggattagaacagttaagtgcctttaaaaaggactttaaaaattattttgatacttatatatgatttttaattgttttcgtattttccaaataccatattaaaattttaatgaaatttatctcctatgaaaggaatttctttaaagcaaaattctgctttgcctttgatttccattttaaaagttaaaggcttccatctgaaactcctcaaatagagtcagatttttggcaatggaagtattaaaattccgatcagccctttggacgatgaagtttacctgcatattaggatttgttaggagtttttggcctcaccaagtgattcttttctattgcagagagcactttactcacctacctgttatgcaactttccctatgcctggaggtgcctccagccaggataccctactttgttacccaattctcctttttgttttacaagagtattcataatatctatatgtttatattccagactacatatttaaaaatgagatctcaaattatatgaaatggatttttaaatactgtgtttgcatacattgacctataaagaagattaaatatttaggtgaataattccctgctgcagtatttgtacacttcagactacctcttaggaaaagcttaacttagtattgcaaaattccctttctctttttttttttaagagatggggtctcgcactgttgcccaggctgaagtgcagtggcatgattgtaactcactgcatcctcgaactcctgggttcaagcaatcctcctgcttccatctgctgagtaggtaggactacagccatgcaccaacaaacctggctaattctttttcatttatatagttagtatcttgctgtgttgttcaagctggactccaactcccggactcaagtaatcctcccaccttagtctcctgcattgctggaattataggcacgagccactgcacctggcacccaaattacttctagttctcaagttagatgattaatatcacacttttctcatgtatgttttatgatagcattgaatttttataattaaaaatttcctaatgcaaacaa

SEQ ID NO: 377313 - DNA, 3267 bp, Homo sapiens
caagcctgtagtcccagctacttgggagggcacagtgggaggatcacttgagcccaggaagttgaggttgtagtgagctatgatcgtacgtaccactgcactccagcctgggtgacagagcagaccctgcctcaaaaaagatagagatagagagatagagaaatagggggagagagagagagaaatagtagcttttggttactagaaaggattgcccaaaataaaaccttgtgtttagaggaaagagtataaggaataaaactaattctttggtctttttttccctccttttctccttaggttccttttgaggatggccacacagacaaccacttacctcttttagaaaataatacacattaacacctcccgattgaaggagaaaaactttttgcctgagacataaaacctttttttaataataaaatattgtgcaatatattcaaagaaaagaaaacacaaataagcagaaaacatacttattttaaaaaagaaaaaaaaggataaaaaaacccaaactgaaattctatatacgttgtgtctgttacaaatgtcgtagaagaaatcatgcagctaaacgatgaagaagcccaactggagtgttgctttgaagatgacgccttcttatattttcatagcaaatgggtggtatcaaaatcagacattgcttcttgctgataaaaagcctgaaggaaataagtgaaactacatctatgggaaaaaaaaaaacattgagaagtgcaaatgttcgcatccttttgtttttaaaagatatgatgtcagaataaaatgtggaaaaacatacggaaaactagtctagactttaaagaattgtgatcaggtcacattgttaataaaaaaaaaaaacgggctagtccctatgttatagccatattaatgttaagccatattgacaagaccagttatccaataatttggtcttaaaaagtaactacttttctttgaactctggttattgacttatctaactgttgaagatagagtcttagaagactaaggtaaattctcacaggggcagatatgtaggtgttatgtaactagggtgtcattcacaaatggtatagtagaatcttatacacggaaaagaaagcacatttttttaaaaaagatgccaagttttttaatctaatcattatattattggtgtattttgggcaacatagggtgagttataaaaagatccgctactgatagtgaaaattaccggtttgtaaaacattaagagaaaaaataggatattttatacatgtggtgagtggagaacagggtaactttaaatgaaagtgtaaggcaaattgtaagcaccacaagatatatcagatttgagaggtgccatgttaaacattgtccattaaactataaaactgtattatgaagtatttgcattcagggtgtcctgaatatgattgattctgtattagattgtgttctaactttcttactatttaaggattggttctaaatcttcacattataaaagattaaaaacagtgagagggagctatcacacaggtactattaaaagctgtatttggaatatgtgtaccaatatcagttttccttttgtagtactgaatggcagtagaagaatcagcagccaatcctcaaagtttaaatcatttaaggaaatggggaaacaaaattccaggtaaataacaagactgaaaaactagatttaaaatagtggttttagaaaacaggatatcacaagtaacagtttttcaaatggatttttttaaagataaatttatgaaaacaggataaacaatataatggagagaaggagaaatagtgatgggtctgttttgcagtaaagtttatgcagaatgacgttttgcagaaaataacagaagcatcactttaaaaaatatatcattaagagccatgacgttaactgatgaaaataagtgatataacatactttgaaagatttttaaacagaaaattctgaatcgtgaatgagccttctctaggttttaattttttttcttcaaattatttccaacaaagtttggctataaactaacaccatctatccacaggaattttaataggaaaaggattagaattgtagactgattgttggtcctttaagtatgcttggaagaaaattcaatcgagtttcaaggctttttctaaatgggagggagaacaatattgatttaggattattttctttcatttaggattagaacagttaagtgcctttaaaaaggactttaaaaattattttgatacttatatatgatttttaattgttttcgtattttccaaataccatattaaaattttaatgaaatttatctcctatgaaaggaatttctttaaagcaaaattctgctttgcctttgatttccattttaaaagttaaaggcttccatctgaaactcctcaaatagagtcagatttttggcaatggaagtattaaaattccgatcagccctttggacgatgaagtttacctgcatattaggatttgttaggagtttttggcctcaccaagtgattcttttctattgcagagagcactttactcacctacctgttatgcaactttccctatgcctggaggtgcctccagccaggataccctactttgttacccaattctcctttttgttttacaagagtattcataatatctatatgtttatattccagactacatatttaaaaatgagatctcaaattatatgaaatggatttttaaatactgtgtttgcatacattgacctataaagaagattaaatatttaggtgaataattccctgctgcagtatttgtacacttcagactacctcttaggaaaagcttaacttagtattgcaaaattccctttctctttttttttttaagagatggggtctcgcactgttgcccaggctgaagtgcagtggcatgattgtaactcactgcatcctcgaactcctgggttcaagcaatcctcctgcttccatctgctgagtaggtaggactacagccatgcaccaacaaacctggctaattctttttcatttatatagttagtatcttgctgtgttgttcaagctggactccaactcccggactcaagtaatcctcccaccttagtctcctgcattgctggaattataggcacgagccactgcacctggcacccaaattacttctagttctcaagttagatgattaatatcacacttttctcatgtatgttttatgatagcattgaatttttataattaaaaatttcctaatgcaaacaa

SEQ ID NO: 377314 - DNA, 1372 bp, Homo sapiens
gtcttttctgacgttttcagctgtgatagtcgctttgttctcgcgatatttccgggtacgcgggagccccggcgacccgggcttctgtgaaacatggcggtaggctgggaccataacacaagcatgactatatgaaggaagaggaaggttttcctgaagatgaggcgactgaatcggaaaaaaactttaagtttggtaaaagagttggatgcctttccgaaggttcctgagagctatgtagagacttcagccagtggaggtacagtttctctaatagcatttacaactatggctttattaaccataatggaattctcagtatatcaagatacatggatgaagtatgaatacgaagtagacaaggatttttctagcaaattaagaattaatatagatattactgttgccatgaagtgtcaatatgttggagcggatgtattggatttagcagaaacaatggttgcatctgcagatggtttagtttatgaaccaacagtatttgatctttcaccacagcagaaagagtggcagaggatgctgcagctgattcagagtaggctacaagaagagcattcacttcaagatgtgatatttaaaagtgcttttaaaagtacatcaacagctcttccaccaagagaagatgattcatcacagtctccaaatgcatgcagaattcatggccatctatatgtcaataaagtagcagggaattttcacataacagtgggcaaggcaattccacatcctcgtggtcatgcacatttggcagcacttgtcaaccatgaatcttacaatttttctcatagaatagatcatttgtcttttggagagcttgttccagcaattattaatcctttagatggaactgaaaaaattgctatagatcacaaccagatgttccaatattttattacagttgtgccaacaaaactacatacatataaaatatcagcagacacccatcagttttctgtgacagaaagggaacgtatcattaaccatgctgcaggcagccatggagtctctgggatatttatgaaatatgatctcagttctcttatggtgacagttactgaggagcacatgccattctggcagttttttgtaagactctgtggtattgttggaggaatcttttcaacaacaggcatgttacatggaattggaaaatttatagttgaaataatttgctgtcgtttcagacttggatcctataaacctgtcaattctgttccttttgaggatggccacacagacaaccacttacctcttttagaaaataatacacattaacacctcccgattgaaggagaaaaactttttgcctgagacataaaacctttttttaataataaaatattgtgcaatatat

SEQ ID NO: 377315 - DNA, 4197 bp, Homo sapiens
gtcttttctgacgttttcagctgtgatagtcgctttgttctcgcgatatttccgggtacgcgggagccccggcgacccgggcttctgtgaaacatggcggtaggctgggaccataacacaagcatgactatatgaaggaagaggaaggttttcctgaagatgaggcgactgaatcggaaaaaaactttaagtttggtaaaagagttggatgcctttccgaaggttcctgagagctatgtagagacttcagccagtggaggtacagtttctctaatagcatttacaactatggctttattaaccataatggaattctcagtatatcaagatacatggatgaagtatgaatacgaagtagacaaggatttttctagcaaattaagaattaatatagatattactgttgccatgaagtgtcaatatgttggagcggatgtattggatttagcagaaacaatggttgcatctgcagatggtttagtttatgaaccaacagtatttgatctttcaccacagcagaaagagtggcagaggatgctgcagctgattcagagtaggctacaagaagagcattcacttcaagatgtgatatttaaaagtgcttttaaaagtacatcaacagctcttccaccaagagaagatgattcatcacagtctccaaatgcatgcagaattcatggccatctatatgtcaataaagtagcagggaattttcacataacagtgggcaaggcaattccacatcctcgtggtcatgcacatttggcagcacttgtcaaccatgaatcttacaatttttctcatagaatagatcatttgtcttttggagagcttgttccagcaattattaatcctttagatggaactgaaaaaattgctatagatcacaaccagatgttccaatattttattacagttgtgccaacaaaactacatacatataaaatatcagcagacacccatcagttttctgtgacagaaagggaacgtatcattaaccatgctgcaggcagccatggagtctctgggatatttatgaaatatgatctcagttctcttatggtgacagttactgaggagcacatgccattctggcagttttttgtaagactctgtggtattgttggaggaatcttttcaacaacaggcatgttacatggaattggaaaatttatagttgaaataatttgctgtcgtttcagacttggatcctataaacctgtcaattctgttccttttgaggatggccacacagacaaccacttacctcttttagaaaataatacacattaacacctcccgattgaaggagaaaaactttttgcctgagacataaaacctttttttaataataaaatattgtgcaatatattcaaagaaaagaaaacacaaataagcagaaaacatacttattttaaaaaagaaaaaaaaggataaaaaaacccaaactgaaattctatatacgttgtgtctgttacaaatgtcgtagaagaaatcatgcagctaaacgatgaagaagcccaactggagtgttgctttgaagatgacgccttcttatattttcatagcaaatgggtggtatcaaaatcagacattgcttcttgctgataaaaagcctgaaggaaataagtgaaactacatctatgggaaaaaaaaaaacattgagaagtgcaaatgttcgcatccttttgtttttaaaagatatgatgtcagaataaaatgtggaaaaacatacggaaaactagtctagactttaaagaattgtgatcaggtcacattgttaataaaaaaaaaaaacgggctagtccctatgttatagccatattaatgttaagccatattgacaagaccagttatccaataatttggtcttaaaaagtaactacttttctttgaactctggttattgacttatctaactgttgaagatagagtcttagaagactaaggtaaattctcacaggggcagatatgtaggtgttatgtaactagggtgtcattcacaaatggtatagtagaatcttatacacggaaaagaaagcacatttttttaaaaaagatgccaagttttttaatctaatcattatattattggtgtattttgggcaacatagggtgagttataaaaagatccgctactgatagtgaaaattaccggtttgtaaaacattaagagaaaaaataggatattttatacatgtggtgagtggagaacagggtaactttaaatgaaagtgtaaggcaaattgtaagcaccacaagatatatcagatttgagaggtgccatgttaaacattgtccattaaactataaaactgtattatgaagtatttgcattcagggtgtcctgaatatgattgattctgtattagattgtgttctaactttcttactatttaaggattggttctaaatcttcacattataaaagattaaaaacagtgagagggagctatcacacaggtactattaaaagctgtatttggaatatgtgtaccaatatcagttttccttttgtagtactgaatggcagtagaagaatcagcagccaatcctcaaagtttaaatcatttaaggaaatggggaaacaaaattccaggtaaataacaagactgaaaaactagatttaaaatagtggttttagaaaacaggatatcacaagtaacagtttttcaaatggatttttttaaagataaatttatgaaaacaggataaacaatataatggagagaaggagaaatagtgatgggtctgttttgcagtaaagtttatgcagaatgacgttttgcagaaaataacagaagcatcactttaaaaaatatatcattaagagccatgacgttaactgatgaaaataagtgatataacatactttgaaagatttttaaacagaaaattctgaatcgtgaatgagccttctctaggttttaattttttttcttcaaattatttccaacaaagtttggctataaactaacaccatctatccacaggaattttaataggaaaaggattagaattgtagactgattgttggtcctttaagtatgcttggaagaaaattcaatcgagtttcaaggctttttctaaatgggagggagaacaatattgatttaggattattttctttcatttaggattagaacagttaagtgcctttaaaaaggactttaaaaattattttgatacttatatatgatttttaattgttttcgtattttccaaataccatattaaaattttaatgaaatttatctcctatgaaaggaatttctttaaagcaaaattctgctttgcctttgatttccattttaaaagttaaaggcttccatctgaaactcctcaaatagagtcagatttttggcaatggaagtattaaaattccgatcagccctttggacgatgaagtttacctgcatattaggatttgttaggagtttttggcctcaccaagtgattcttttctattgcagagagcactttactcacctacctgttatgcaactttccctatgcctggaggtgcctccagccaggataccctactttgttacccaattctcctttttgttttacaagagtattcataatatctatatgtttatattccagactacatatttaaaaatgagatctcaaattatatgaaatggatttttaaatactgtgtttgcatacattgacctataaagaagattaaatatttaggtgaataattccctgctgcagtatttgtacacttcagactacctcttaggaaaagcttaacttagtattgcaaaattccctttctctttttttttttaagagatggggtctcgcactgttgcccaggctgaagtgcagtggcatgattgtaactcactgcatcctcgaactcctgggttcaagcaatcctcctgcttccatctgctgagtaggtaggactacagccatgcaccaacaaacctggctaattctttttcatttatatagttagtatcttgctgtgttgttcaagctggactccaactcccggactcaagtaatcctcccaccttagtctcctgcattgctggaattataggcacgagccactgcacctggcacccaaattacttctagttctcaagttagatgattaatatcacacttttctcatgtatgttttatgatagcattgaatttttataattaaaaatttcctaatgcaaacaa

SEQ ID NO: 377316 - DNA, 3862 bp, Homo sapiens
aacctatcgaataccaactacacgagtattattactactatcttactaattaatatagatcttactgtttgccatgaagtgtcactatgttggagcggatgtattggatttagcagaaacaatggttgcatctgcagatggtttagtttatgaaccaacagtatttgatctttcaccacagcagaaagagtggcagaggatgctgcagctgattcagagtaggctacaagaagagcattcacttcaagatgtgatatttaaaagtgcttttaaaagtacatcaacagctcttccaccaagagaagatgattcatcacagtctccaaatgcatgcagaattcatggccatctatatgtcaataaagtagcagggaattttcacataacagtgggcaaggcaattccacatcctcgtggtcatgcacatttggcagcacttgtcaaccatgaatcttacaatttttctcatagaatagatcatttgtcttttggagagcttgttccagcaattattaatcctttagatggaactgaaaaaattgctatagatcacaaccagatgttccaatattttattacagttgtgccaacaaaactacatacatataaaatatcagcagacacccatcagttttctgtgacagaaagggaacgtatcattaaccatgctgcaggcagccatggagtctctgggatatttatgaaatatgatctcagttctcttatggtgacagttactgaggagcacatgccattctggcagttttttgtaagactctgtggtattgttggaggaatcttttcaacaacaggcatgttacatggaattggaaaatttatagttgaaataatttgctgtcgtttcagacttggatcctataaacctgtcaattctgttccttttgaggatggccacacagacaaccacttacctcttttagaaaataatacacattaacacctcccgattgaaggagaaaaactttttgcctgagacataaaacctttttttaataataaaatattgtgcaatatattcaaagaaaagaaaacacaaataagcagaaaacatacttattttaaaaaagaaaaaaaaggataaaaaaacccaaactgaaattctatatacgttgtgtctgttacaaatgtcgtagaagaaatcatgcagctaaacgatgaagaagcccaactggagtgttgctttgaagatgacgccttcttatattttcatagcaaatgggtggtatcaaaatcagacattgcttcttgctgataaaaagcctgaaggaaataagtgaaactacatctatgggaaaaaaaaaaacattgagaagtgcaaatgttcgcatccttttgtttttaaaagatatgatgtcagaataaaatgtggaaaaacatacggaaaactagtctagactttaaagaattgtgatcaggtcacattgttaataaaaaaaaaaaacgggctagtccctatgttatagccatattaatgttaagccatattgacaagaccagttatccaataatttggtcttaaaaagtaactacttttctttgaactctggttattgacttatctaactgttgaagatagagtcttagaagactaaggtaaattctcacaggggcagatatgtaggtgttatgtaactagggtgtcattcacaaatggtatagtagaatcttatacacggaaaagaaagcacatttttttaaaaaagatgccaagttttttaatctaatcattatattattggtgtattttgggcaacatagggtgagttataaaaagatccgctactgatagtgaaaattaccggtttgtaaaacattaagagaaaaaataggatattttatacatgtggtgagtggagaacagggtaactttaaatgaaagtgtaaggcaaattgtaagcaccacaagatatatcagatttgagaggtgccatgttaaacattgtccattaaactataaaactgtattatgaagtatttgcattcagggtgtcctgaatatgattgattctgtattagattgtgttctaactttcttactatttaaggattggttctaaatcttcacattataaaagattaaaaacagtgagagggagctatcacacaggtactattaaaagctgtatttggaatatgtgtaccaatatcagttttccttttgtagtactgaatggcagtagaagaatcagcagccaatcctcaaagtttaaatcatttaaggaaatggggaaacaaaattccaggtaaataacaagactgaaaaactagatttaaaatagtggttttagaaaacaggatatcacaagtaacagtttttcaaatggatttttttaaagataaatttatgaaaacaggataaacaatataatggagagaaggagaaatagtgatgggtctgttttgcagtaaagtttatgcagaatgacgttttgcagaaaataacagaagcatcactttaaaaaatatatcattaagagccatgacgttaactgatgaaaataagtgatataacatactttgaaagatttttaaacagaaaattctgaatcgtgaatgagccttctctaggttttaattttttttcttcaaattatttccaacaaagtttggctataaactaacaccatctatccacaggaattttaataggaaaaggattagaattgtagactgattgttggtcctttaagtatgcttggaagaaaattcaatcgagtttcaaggctttttctaaatgggagggagaacaatattgatttaggattattttctttcatttaggattagaacagttaagtgcctttaaaaaggactttaaaaattattttgatacttatatatgatttttaattgttttcgtattttccaaataccatattaaaattttaatgaaatttatctcctatgaaaggaatttctttaaagcaaaattctgctttgcctttgatttccattttaaaagttaaaggcttccatctgaaactcctcaaatagagtcagatttttggcaatggaagtattaaaattccgatcagccctttggacgatgaagtttacctgcatattaggatttgttaggagtttttggcctcaccaagtgattcttttctattgcagagagcactttactcacctacctgttatgcaactttccctatgcctggaggtgcctccagccaggataccctactttgttacccaattctcctttttgttttacaagagtattcataatatctatatgtttatattccagactacatatttaaaaatgagatctcaaattatatgaaatggatttttaaatactgtgtttgcatacattgacctataaagaagattaaatatttaggtgaataattccctgctgcagtatttgtacacttcagactacctcttaggaaaagcttaacttagtattgcaaaattccctttctctttttttttttaagagatggggtctcgcactgttgcccaggctgaagtgcagtggcatgattgtaactcactgcatcctcgaactcctgggttcaagcaatcctcctgcttccatctgctgagtaggtaggactacagccatgcaccaacaaacctggctaattctttttcatttatatagttagtatcttgctgtgttgttcaagctggactccaactcccggactcaagtaatcctcccaccttagtctcctgcattgctggaattataggcacgagccactgcacctggcacccaaattacttctagttctcaagttagatgattaatatcacacttttctcatgtatgttttatgatagcattgaatttttataattaaaaatttcctaatgcaaacaa

SEQ ID NO: 377317 - DNA, 4101 bp, Homo sapiens
gtcttttctgacgttttcagctgtgatagtcgctttgttctcgcgatatttccgggtacgcgggagccccggcgacccgggcttctgtgaaacatggcggtaggctgggaccataacacaagcatgactatatgaaggaagaggaaggttttcctgaagatgaggcgactgaatcggaaaaaaactttaagtttggtaaaagagttggatgcctttccgaaggttcctgagagctatgtagagacttcagccagtggaggtacagtttctctaatagcatttacaactatggctttattaaccataatggaattctcagtatatcaagatacatggatgaagtatgaatacgaagtagacaaggatttttctagcaaattaagaattaatatagatattactgttgccatgaagtgtcaatatgttggagcggatgtattggatttagcagaaacaatggttgcatctgcagatggtttagtttatgaaccaacagtatttgatctttcaccacagcagaaagagtggcagaggatgctgcagctgattcagagtaggctacaagaagagcattcacttcaagatgtgatatttaaaagtgcttttaaaagtacatcaacagctcttccaccaagggcaattccacatcctcgtggtcatgcacatttggcagcacttgtcaaccatgaatcttacaatttttctcatagaatagatcatttgtcttttggagagcttgttccagcaattattaatcctttagatggaactgaaaaaattgctatagatcacaaccagatgttccaatattttattacagttgtgccaacaaaactacatacatataaaatatcagcagacacccatcagttttctgtgacagaaagggaacgtatcattaaccatgctgcaggcagccatggagtctctgggatatttatgaaatatgatctcagttctcttatggtgacagttactgaggagcacatgccattctggcagttttttgtaagactctgtggtattgttggaggaatcttttcaacaacaggcatgttacatggaattggaaaatttatagttgaaataatttgctgtcgtttcagacttggatcctataaacctgtcaattctgttccttttgaggatggccacacagacaaccacttacctcttttagaaaataatacacattaacacctcccgattgaaggagaaaaactttttgcctgagacataaaacctttttttaataataaaatattgtgcaatatattcaaagaaaagaaaacacaaataagcagaaaacatacttattttaaaaaagaaaaaaaaggataaaaaaacccaaactgaaattctatatacgttgtgtctgttacaaatgtcgtagaagaaatcatgcagctaaacgatgaagaagcccaactggagtgttgctttgaagatgacgccttcttatattttcatagcaaatgggtggtatcaaaatcagacattgcttcttgctgataaaaagcctgaaggaaataagtgaaactacatctatgggaaaaaaaaaaacattgagaagtgcaaatgttcgcatccttttgtttttaaaagatatgatgtcagaataaaatgtggaaaaacatacggaaaactagtctagactttaaagaattgtgatcaggtcacattgttaataaaaaaaaaaaacgggctagtccctatgttatagccatattaatgttaagccatattgacaagaccagttatccaataatttggtcttaaaaagtaactacttttctttgaactctggttattgacttatctaactgttgaagatagagtcttagaagactaaggtaaattctcacaggggcagatatgtaggtgttatgtaactagggtgtcattcacaaatggtatagtagaatcttatacacggaaaagaaagcacatttttttaaaaaagatgccaagttttttaatctaatcattatattattggtgtattttgggcaacatagggtgagttataaaaagatccgctactgatagtgaaaattaccggtttgtaaaacattaagagaaaaaataggatattttatacatgtggtgagtggagaacagggtaactttaaatgaaagtgtaaggcaaattgtaagcaccacaagatatatcagatttgagaggtgccatgttaaacattgtccattaaactataaaactgtattatgaagtatttgcattcagggtgtcctgaatatgattgattctgtattagattgtgttctaactttcttactatttaaggattggttctaaatcttcacattataaaagattaaaaacagtgagagggagctatcacacaggtactattaaaagctgtatttggaatatgtgtaccaatatcagttttccttttgtagtactgaatggcagtagaagaatcagcagccaatcctcaaagtttaaatcatttaaggaaatggggaaacaaaattccaggtaaataacaagactgaaaaactagatttaaaatagtggttttagaaaacaggatatcacaagtaacagtttttcaaatggatttttttaaagataaatttatgaaaacaggataaacaatataatggagagaaggagaaatagtgatgggtctgttttgcagtaaagtttatgcagaatgacgttttgcagaaaataacagaagcatcactttaaaaaatatatcattaagagccatgacgttaactgatgaaaataagtgatataacatactttgaaagatttttaaacagaaaattctgaatcgtgaatgagccttctctaggttttaattttttttcttcaaattatttccaacaaagtttggctataaactaacaccatctatccacaggaattttaataggaaaaggattagaattgtagactgattgttggtcctttaagtatgcttggaagaaaattcaatcgagtttcaaggctttttctaaatgggagggagaacaatattgatttaggattattttctttcatttaggattagaacagttaagtgcctttaaaaaggactttaaaaattattttgatacttatatatgatttttaattgttttcgtattttccaaataccatattaaaattttaatgaaatttatctcctatgaaaggaatttctttaaagcaaaattctgctttgcctttgatttccattttaaaagttaaaggcttccatctgaaactcctcaaatagagtcagatttttggcaatggaagtattaaaattccgatcagccctttggacgatgaagtttacctgcatattaggatttgttaggagtttttggcctcaccaagtgattcttttctattgcagagagcactttactcacctacctgttatgcaactttccctatgcctggaggtgcctccagccaggataccctactttgttacccaattctcctttttgttttacaagagtattcataatatctatatgtttatattccagactacatatttaaaaatgagatctcaaattatatgaaatggatttttaaatactgtgtttgcatacattgacctataaagaagattaaatatttaggtgaataattccctgctgcagtatttgtacacttcagactacctcttaggaaaagcttaacttagtattgcaaaattccctttctctttttttttttaagagatggggtctcgcactgttgcccaggctgaagtgcagtggcatgattgtaactcactgcatcctcgaactcctgggttcaagcaatcctcctgcttccatctgctgagtaggtaggactacagccatgcaccaacaaacctggctaattctttttcatttatatagttagtatcttgctgtgttgttcaagctggactccaactcccggactcaagtaatcctcccaccttagtctcctgcattgctggaattataggcacgagccactgcacctggcacccaaattacttctagttctcaagttagatgattaatatcacacttttctcatgtatgttttatgatagcattgaatttttataattaaaaatttcctaatgcaaacaa

SEQ ID NO: 377318 - DNA, 334 bp, Homo sapiens
ttgcttgcttctgttggttgcatattggaaaggagaaatgagttttaagcatcaggtggctgctactgatagggggtgccttttccatctcagattgaagccacagctaaggtttagactggattgcaagggacatttggaagaaagagtaatctcacagagacatcagaccccttttgtattaacagtttaataaagtcttgagaaaatgcgtctagcctgcaggccaattatttattttttattatttcaaatggcatttcatccttcatgaggaaaagcagtagatgaagcaggaagctttcaggtcatacagaacttccctcttttcaaa

SEQ ID NO: 377319 - DNA, 629 bp, Homo sapiens
attgattgaatctgcattaagtgtaacagatttcatgttagctgaagaaaggactctttcttctacctagaagatttgagatttagtgtcacaggagcataaacacgatgttcctgaagctgtgaaagaaactatttttgcatttaaggaagcaaatctctactagctgccatatgaagggaagccagagaataatgtacagcatcttttctgttaagtaaaacgtcatgaagaagtatagtaaatcacataaagagctttgtatcttaaatgaagctgaagatgctatgacttatggaaaactagtgctatatataagataaaagaagatataggtaaccttggttttacacaaatatgccatgtcatcaatatgccagttattgcacagtttatccttgaagatttgccagaacctagagagaagtataaacactagtacatacagttttgcatttcatttcaagaggcttacctctaaaggccaacatgggccacaggttaaaaaacacctgacctgttcctcacccagggttccagctttctggaagttcccactgtaaaagcaggtaatacctatacagaagaatacacacatacctaactacaatgattctactttaaagatc

SEQ ID NO: 377320 - DNA, 637 bp, Homo sapiens
actgggggtgcagtatgtctttgagaagtgattttattttctttgtatatatactcagaaagggagactgccagataatacggttattttatttttaagattttgaggaacctccatactaatttcataatgactttaccaatttataatacattctcaacaacagtgtacaaggggttccttttcttcacatcctcaccaatacttatctttttacttttgataatagccattctaacaggtgtgtggtgatatttaattgtagttttgatttgcattttcctggtgattggtgatgttggacattttttcacatacctgttggccatttgcatttcttctttgaaaaaatttctattcagggtctttgataatttttcttttctttttttttttgctattgagttgtatgaatttcttatatttttggatattaacctccaatcagatatatgacttgcaaatattttttctcattacctacgcttccattgatttcatttttttctttgctatggagaaacattagattgatgaagtctcagttgtatatttttccttttgttccctgtgcttctggtgccattaaaaaaaaatactgccaagacaaatgtcatcagacatgtatggtacctga

SEQ ID NO: 377321 - DNA, 1375 bp, Homo sapiens
  misc_feature (1)..(1): n is a, c, g, or t
  misc_feature (93)..(93): n is a, c, g, or t
  misc_feature (840)..(840): n is a, c, g, or t
  misc_feature (1374)..(1374): n is a, c, g, or t
nggagcctgcggagttcgagaccatgctgctgttctgccccggctgcgggaacgggctgatcgtggaggagggacaacgctgccaccgcttcncctgcaacacgtgcccctacgtgcacaacatcacccgcaaggtaacaaatcggaagtacccaaaactgaaagaagtggatgatgtgcttggtggagcagctgcctgggagaatgttgactctactgcagagtcgtgtcccaaatgcgaacatcctcgtgcttacttcatgcagcttcagacccgctctgcagatgagccgatgaccaccttctacaagtgctgcaatgctcagtgtggacaccgctggagggattagggccaggatggcccagctgccctagtgtgtgcttgccttgtccctcggggtagatgcttagctggcagtatgagttgtgtgtcctgagggtctttgctagtgtggtggaaagataaaccttttgaggtgaagagccagggggtcaggaaatatggcctatctgccaggcagggtggatgaagtcatgaatgtctgggagtttttctgtgtggggaggagacagagacccataactaaatatgctctgtgtaaagtcctattctttcatcttccactttattggcagttgacattcccttactcccaatcaacactcttaaatatttgtactgtttgtaaaacttagtacatgtccctaaatatttaactgttacttgtaaacttgtgtaatttattatttattttaatcaaaattctgaatatttcatttaaatgaaagttggaatattgccttctcagtgttttaaatagcttaagaggtagaaagcanaccccaaatcacagtgatcccagaatagactacatacttacatttgaacaggctacgaaaatgttaatcaccgggatttcaatttctttctttattcctattcttactcccttattcatttttttgaacctcccctgatttgcttcctcgggttgctttaaatgtataagatactatttatttatttatttattttatttatttatttatttatttaagacagagtcttgttctgtcgcccaggctggagtgcagtggtacgaattcagctcactgcaacctctgccttccgggttcaagggattctcctgtctcagcctcccaagcagctgggactacaggcatgcaccaccacacctgggtaattttgcatttttagtagagatggggtttctccatgttggtcgggctggtctccaactcctgacctcagataatctgtctgcctcggcctcctaaagtgctgggattacaggcgtgagccactgtgtcccaccaatctttacatttaatatgactattttcttattgttng

SEQ ID NO: 377322 - DNA, 1176 bp, Homo sapiens
  misc_feature (641)..(641): n is a, c, g, or t
  misc_feature (1175)..(1175): n is a, c, g, or t
cacttcttttttctcattgccagagtcgtgtcccaaatgcgaacatcctcgtgcttacttcatgcagcttcagacccgctctgcagatgagccgatgaccaccttctacaagtgctgcaatgctcagtgtggacaccgctggagggattagggccaggatggcccagctgccctagtgtgtgcttgccttgtccctcggggtagatgcttagctggcagtatgagttgtgtgtcctgagggtctttgctagtgtggtggaaagataaaccttttgaggtgaagagccagggggtcaggaaatatggcctatctgccaggcagggtggatgaagtcatgaatgtctgggagtttttctgtgtggggaggagacagagacccataactaaatatgctctgtgtaaagtcctattctttcatcttccactttattggcagttgacattcccttactcccaatcaacactcttaaatatttgtactgtttgtaaaacttagtacatgtccctaaatatttaactgttacttgtaaacttgtgtaatttattatttattttaatcaaaattctgaatatttcatttaaatgaaagttggaatattgccttctcagtgttttaaatagcttaagaggtagaaagcanaccccaaatcacagtgatcccagaatagactacatacttacatttgaacaggctacgaaaatgttaatcaccgggatttcaatttctttctttattcctattcttactcccttattcatttttttgaacctcccctgatttgcttcctcgggttgctttaaatgtataagatactatttatttatttatttattttatttatttatttatttatttaagacagagtcttgttctgtcgcccaggctggagtgcagtggtacgaattcagctcactgcaacctctgccttccgggttcaagggattctcctgtctcagcctcccaagcagctgggactacaggcatgcaccaccacacctgggtaattttgcatttttagtagagatggggtttctccatgttggtcgggctggtctccaactcctgacctcagataatctgtctgcctcggcctcctaaagtgctgggattacaggcgtgagccactgtgtcccaccaatctttacatttaatatgactattttcttattgttng

SEQ ID NO: 377323 - DNA, 746 bp, Homo sapiens
  misc_feature (1)..(1): n is a, c, g, or t
  misc_feature (93)..(93): n is a, c, g, or t
nggagcctgcggagttcgagaccatgctgctgttctgccccggctgcgggaacgggctgatcgtggaggagggacaacgctgccaccgcttcncctgcaacacgtgcccctacgtgcacaacatcacccgcaaggtaacaaatcggaagtacccaaaactgaaagaagtggatgatgtgcttggtggagcagctgcctgggagaatgttgactctactgcaggtaagagggaaaactgtttctgttgctaaactgtggataattatgaggctgttgatgccactgcttggcagagtctatgatgtcatataaatgatgtaggtttctaaaaatagaaaatggttcttgaataatttatttgtatttgttactgtttaataatctgtcagacaagcaatatttgtgccagccttggagtcatacaggcccgggtcagattctcagggcaaccttgtattgttgtaggaccttccttgggtctcttgacttctctggggctaatccatattcgtagactgcgagagcataaagtgaattataccgtgcttggtatataagaggcactcaacaggtgatagctttgataatggcaatgatgagtagattaataaaaataagagtctaaggaaaaaagtatgttctttctgtttgatatggtttggctgtgtctccaccctaatctcatcttgaattatagtttccgtaatccccaggtgtcctgggaggggcccagtgggaggtaattg

SEQ ID NO: 377324 - DNA, 360 bp, Homo sapiens
ggtccccacggaggatcagtgactttcccagaccccgcgggcgagcccgcgcttgggacccggcagctctgcgcgggctggttttggagggggtggtgttcgtttgtttaaattccagttgttatttggcagcatatcgccttccgagtcagtaagaattgcccacgacgtaaagagcgacttgcaggaaggggccgaagccgtcgttagcgcccgggcggcggcggccactcgaaccccgtttccgccaagcgcgctgcaacctgcggggcgagttcgttttgttttgccaaaatcatttggggacttctttgtcattcatgcccttccttttaaatgatttttatttttttccactgt

SEQ ID NO: 377325 - DNA, 777 bp, Homo sapiens
atttagtgaatatttattggtggtctgttatgtcctagacactgttttaggcactggcgatttagcattaaaccaggtaatcctgctgccatgggagctaaaaatagcccacacttgtacccactggttgtcttttgccattttgtatttcagtttttgttggtttgtttgttttaaatgtaagggcatgctgcttagaataattttcaagctgtgtgaaaatcaacgtcatttcaacttttctgccccttctggtttacactaagagctactataaacttccaggtgatagtattagctctttcatcatccattatttatcacattttttcccttcaaacttattactatcctgagaaaaacgcagtgcacaaagaaacagtaattaagaggactgaagaccctaccctaagtggagtttcatgtctttgtaatttttcgatgctttcacacataatccaggagaaaactaacgtcactctgcattcttccttcacaggtaccatgttttaaggaactgtcagttgctcagagataataagcagcctgaatttctttttatttctttgcatattgtgcaggagttcatgatcaagtgttgcccacaccaaatgcttcatccagagtcatagtacatgtggatctggattgcttttatgcacaagtagaaatgatctcaaatccagagctaaaagacaaacctttagggtccaccagaattattgggggtactgcacctatgaaggttggaaacttggggttaagaccctttgcagg

SEQ ID NO: 377326 - DNA, 2321 bp, Homo sapiens
gcttaataaatcccaatccagcctagctgatttactgaagaacaaagggatgactagtttttgctacgccaaggggttcaacagaaatatttggtggttacctgcaactatgaagctaggaaacttggagttaagaaacttatgaatgtcagagatgcaaaagaaaagtgtccacagttggtattagttaatggagaagacctgacccgctacagagaaatgtcttataaggttacagaattactggaagaatttagtccagttgttgagagacttggatttgatgaaaattttgtggatctaacagaaatggttgagaagagactacagcagctgcaaagtgatgaactttctgcggtgactgtgtcgggtcatgtatacaataatcagtctataaacctgcttgacgtcttgcacatcagactacttgttggatctcagattgcagcagagatgcgggaagccatgtataatcagttggggctcactggctgtgctggagtggcttctaataaactgttggcaaaattagtttctggtgtctttaaaccaaatcaacaaacagtcttattacctgaaagttgtcaacatcttattcatagtttgaatcacataaaggaaatacctggtattggctataaaactgccaaatgtcttgaagcactgggtatcaatagtgtgcgtgatctccaaaccttttcacccaaaattttagaaaaagaattaggaatttcagttgctcagcgtatccaaaagctcagttttggagaggataactcccctgtgatactctcaggaccacctcagtcctttagtgaagaagattcatttaaaaaatgttcatctgaagttgaagctaaaaataagattgaagaactacttgctagtcttttaaacagagtatgccaagatggaaggaagcctcatacagtgagattaataatccgtcggtattcctctgagaagcactatggtcgtgagagtcgtcagtgccctattccttcacatgtaattcagaaattagggacaggaaattatgatgtgatgaccccaatggttgatatacttatgaaactttttcgaaatatggtgaatgtgaagatgccatttcaccttacccttctaagtgtgtgcttctgcaaccttaaagcactaaatactgctaagaaagggcttattgattattatttaatgccatcattatcaactacttcacgctctggcaagcacagttttaaaatgaaagacactcatatggaagattttcccaaagacaaagaaacaaaccgggatttcctaccaagtggaagaattgaaagtacaagaactagggagtctccactagataccacaaatttttctaaagaaaaagacattaatgaattcccactctgttcacttcctgaaggtgttgaccaagaagtcttcaagcagcttccagtagatattcaagaagaaatcctttctggaaaatctagggaaaaatttcaagggaaaggaagtgtgagttgtccattacatgcctctagaggagtattatctttcttttctaaaaaacaaatgcaagatattcccataaatcctagagatcatttatccagtagcaaacaggtatcctctgtatctccttgtgaaccgggaacatcaggctttaatagcagtagttcttcttacatgtctagccaaaaggattattcatattatttagataatagattaaaagatgaacgaataagtcaaggacctaaagaacctcaaggattccactttacaaattcaaaccctgctgtgtctgcttttcattcatttccaaacttgcagagtgagcaacttttctccagaaaccacactacagatagccataagcaaacagtagcaacagactctcatgaaggacttacagaaaatagagagccagattctgttgatgagaaaattactttcccttctgacattgatcctcaagttttctatgaactaccagaagcagtacaaaaggaactgctggcagagtggaagagaacaggatcagatttccacattggacataaataagcatattcagcaaaaaggtctgaaaagcaagggaataccattattttcggattagcggtttattaagctcttctatattaaacactaatagatattcaataacggagtaaactgttccagataaagcaagaatagttgcaagaagtaaattctggcacaaagcgtaaaaatataacagaagaaataatgtaaaatactatcttttatgtctaaagccattttatattacttttcaataaaaagaatatcatggtcaaaaaaaaaaa

SEQ ID NO: 377327 - DNA, 1668 bp, Homo sapiens
aacagttaatataaaagtgaactaaatggctcaaactaaggacaagaggtaagttagtgaagaatgtattgaatatttatttgactgtacactgataataattagatatagttatttgagtttgtgctaatccttatttatgcttctttgatagtcctttagtgaagaagattcatttaaaaaatgttcatctgaagttgaagctaaaaataagattgaagaactacttgctagtcttttaaacagagtatgccaagatggaaggaagcctcatacagtgagattaataatccgtcggtattcctctgagaagcactatggtcgtgagagtcgtcagtgccctattccttcacatgtaattcagaaattagggacaggaaattatgatgtgatgaccccaatggttgatatacttatgaaactttttcgaaatatggtgaatgtgaagatgccatttcaccttacccttctaagtgtgtgcttctgcaaccttaaagcactaaatactgctaagaaagggcttattgattattatttaatgccatcattatcaactacttcacgctctggcaagcacagttttaaaatgaaagacactcatatggaagattttcccaaagacaaagaaacaaaccgggatttcctaccaagtggaagaattgaaagtacaagaactagggagtctccactagataccacaaatttttctaaagaaaaagacattaatgaattcccactctgttcacttcctgaaggtgttgaccaagaagtcttcaagcagcttccagtagatattcaagaagaaatcctttctggaaaatctagggaaaaatttcaagggaaaggaagtgtgagttgtccattacatgcctctagaggagtattatctttcttttctaaaaaacaaatgcaagatattcccataaatcctagagatcatttatccagtagcaaacaggtatcctctgtatctccttgtgaaccgggaacatcaggctttaatagcagtagttcttcttacatgtctagccaaaaggattattcatattatttagataatagattaaaagatgaacgaataagtcaaggacctaaagaacctcaaggattccactttacaaattcaaaccctgctgtgtctgcttttcattcatttccaaacttgcagagtgagcaacttttctccagaaaccacactacagatagccataagcaaacagtagcaacagactctcatgaaggacttacagaaaatagagagccagattctgttgatgagaaaattactttcccttctgacattgatcctcaagttttctatgaactaccagaagcagtacaaaaggaactgctggcagagtggaagagaacaggatcagatttccacattggacataaataagcatattcagcaaaaaggtctgaaaagcaagggaataccattattttcggattagcggtttattaagctcttctatattaaacactaatagatattcaataacggagtaaactgttccagataaagcaagaatagttgcaagaagtaaattctggcacaaagcgtaaaaatataacagaagaaataatgtaaaatactatcttttatgtctaaagccattttatattacttttcaataaaaagaatatcatggtcaaaaaaaaaaa

SEQ ID NO: 377328 - DNA, 2514 bp, Homo sapiens
aagtagcgctgcggttggcagcggcgggatggagaagctgggggtggagccggaggaggaaggcggcggcgacgacgaggaagacgccgaggcctgggccatggaactggcggacgtgggggcggcagccagctcgcagggagttcatgatcaagtgttgcccacaccaaatgcttcatccagagtcatagtacatgtggatctggattgcttttatgcacaagtagaaatgatctcaaatccagagctaaaagacaaacctttaggggttcaacagaaatatttggtggttacctgcaactatgaagctaggaaacttggagttaagaaacttatgaatgtcagagatgcaaaagaaaagtgtccacagttggtattagttaatggagaagacctgacccgctacagagaaatgtcttataaggttacagaattactggaagaatttagtccagttgttgagagacttggatttgatgaaaattttgtggatctaacagaaatggttgagaagagactacagcagctgcaaagtgatgaactttctgcggtgactgtgtcgggtcatgtatacaataatcagtctataaacctgcttgacgtcttgcacatcagactacttgttggatctcagattgcagcagagatgcgggaagccatgtataatcagttggggctcactggctgtgctggagtggcttctaataaactgttggcaaaattagtttctggtgtctttaaaccaaatcaacaaacagtcttattacctgaaagttgtcaacatcttattcatagtttgaatcacataaaggaaatacctggtattggctataaaactgccaaatgtcttgaagcactgggtatcaatagtgtgcgtgatctccaaaccttttcacccaaaattttagaaaaagaattaggaatttcagttgctcagcgtatccaaaagctcagttttggagaggataactcccctgtgatactctcaggaccacctcagtcctttagtgaagaagattcatttaaaaaatgttcatctgaagttgaagctaaaaataagattgaagaactacttgctagtcttttaaacagagtatgccaagatggaaggaagcctcatacagtgagattaataatccgtcggtattcctctgagaagcactatggtcgtgagagtcgtcagtgccctattccttcacatgtaattcagaaattagggacaggaaattatgatgtgatgaccccaatggttgatatacttatgaaactttttcgaaatatggtgaatgtgaagatgccatttcaccttacccttctaagtgtgtgcttctgcaaccttaaagcactaaatactgctaagaaagggcttattgattattatttaatgccatcattatcaactacttcacgctctggcaagcacagttttaaaatgaaagacactcatatggaagattttcccaaagacaaagaaacaaaccgggatttcctaccaagtggaagaattgaaagtacaagaactagggagtctccactagataccacaaatttttctaaagaaaaagacattaatgaattcccactctgttcacttcctgaaggtgttgaccaagaagtcttcaagcagcttccagtagatattcaagaagaaatcctttctggaaaatctagggaaaaatttcaagggaaaggaagtgtgagttgtccattacatgcctctagaggagtattatctttcttttctaaaaaacaaatgcaagatattcccataaatcctagagatcatttatccagtagcaaacaggtatcctctgtatctccttgtgaaccgggaacatcaggctttaatagcagtagttcttcttacatgtctagccaaaaggattattcatattatttagataatagattaaaagatgaacgaataagtcaaggacctaaagaacctcaaggattccactttacaaattcaaaccctgctgtgtctgcttttcattcatttccaaacttgcagagtgagcaacttttctccagaaaccacactacagatagccataagcaaacagtagcaacagactctcatgaaggacttacagaaaatagagagccagattctgttgatgagaaaattactttcccttctgacattgatcctcaagttttctatgaactaccagaagcagtacaaaaggaactgctggcagagtggaagagaacaggatcagatttccacattggacataaataagcatattcagcaaaaaggtctgaaaagcaagggaataccattattttcggattagcggtttattaagctcttctatattaaacactaatagatattcaataacggagtaaactgttccagataaagcaagaatagttgcaagaagtaaattctggcacaaagcgtaaaaatataacagaagaaataatgtaaaatactatcttttatgtctaaagccattttatattacttttcaataaaaagaatatcatggtcaaaaaaaaaaa

SEQ ID NO: 377329 - DNA, 743 bp, Homo sapiens
aagtagcgctgcggttggcagcggcgggatggagaagctgggggtggagccggaggaggaaggcggcggcgacgacgaggaagacgccgaggcctgggccatggaactggcggacgtgggggcggcagccagctcgcagggagttcatgatcaagtgttgcccacaccaaatgcttcatccagagtcatagtacatgtggatctggattgcttttatgcacaagtagaaatgatctcaaatccagagctaaaagacaaacctttaggggttcaacagaaatatttggtggttacctgcaactatgaagctaggaaacttggagttaagaaacttatgaatgtcagagatgcaaaagaaaagtgtccacagttggtattagttaatggagaagacctgacccgctacagagaaatgtcttataaggttacagaattactggaagaatttagtccagttgttgagagacttggatttgatgaaaattttgtggatctaacagaaatggttgagaagagactacagcagctgcaaagtgatgaactttctgcggtgactgtgtcgggtcatgtatacaataatcagtctataaacctgcttgacgtcttgcacatcagactacttgttggatctcagattgcagcagagatgcgggaagccatgattatgtggaagaggttcgaaatgatgacggacaaggtaattcggttccattgtaaattatgccgagtggcagttgatgatc

SEQ ID NO: 377330 - DNA, 638 bp, Homo sapiens
tttaaaaaaattttatttacagcaccattgaacatctttgaaaggtatgctcatgtacatacattactgggggattcacatgcaattattaatgagttatttaaactttatgtcttagagttttgacagttctctcaaatgtgaggattgcaactctagcaaaattgcctgtgaggacaggaggagaattttaagcaacaaaactccacaatactgtaacataacctcagatctccaggaagaggtcactctcccttgaaaatcatcctttccggattgttctcattagagtgcagagtaggtgcagtgtctggcatggctttgtactaagaggtgacagttgatcatctagcaaacattcaagaaagttccatgtaaacaaaaaggtacgaaataaaacacatgaaaagagaagcaccagaaaatgactcgtctgcattatctaaactccagatgggtaagaacatgcagattacattgaggattatctttcaatgcaatttccacttgagaaactaaattcctggtttgacaacctcatttctacctgtggctactcaagggtaaataaactaagaagcacaaatacgtgacactttatcaggtgcatgacttctatagagcaggcatgcagtttc

SEQ ID NO: 377331 - DNA, 183 bp, Homo sapiens
ttcctgaagccaagtacataggaagcatttattccgacagaattaccataaaaattaccaaataaccaacactgcatatactgattctatttctgaaataataaatttgcctaaattttaccaattccagaaaaaagaaaccaaggtaacatatttctaaggagaaatgccttctataaccac

SEQ ID NO: 377332 - DNA, 3299 bp, Homo sapiens
agcggaatggcgggagcaggcacggaaccggcttttcctccttcctgcagcgtgatggcccgcggctcagggaggcgaccaatgagtgctctcgcggagagcgacggggcaggccaatatggcttcctgcacctggtgacgcttggcgaaactgaggtctcatggagaagccccggagtattgaggagaccccatcttcagaaccaatggaggaagaggaagatgacgacttggagctgtttggtggctatgatagtttccggagttataacagcagtgtgggcagtgagagcagctcctatctggaggagtcaagtgaagcagaaaatgaggatcgggaagcaggggaactgccgacctccccgctgcatttgctcagccctgggactcctcgctccttggatggcagtggttctgagccagctgtctgtgagatgtgtggtatcgtgggtacaagggaagccttcttctccaagaccaagaggttctgcagcgtctcctgctccaggagctactcctccaactccaagaaagccagtatcttggctaggttacagggaaaaccaccgaccaaaaaagccaaagtcctgcacaaggctgcctggtctgccaaaattggagccttcctccactctcaagggacaggacagctggcagatgggacaccaacaggacaagacgctctggtcttgggcttcgactgggggaagttcctgaaggatcacagttacaaggctgctcccgtcagctgtttcaagcacgtcccactctatgaccagtgggaggatgtgatgaaagggatgaaggtggaggtgctcaacagtgatgctgtgctccccagccgggtgtactggatcgcctctgtcatccagacagcagggtatcgggtgctgcttcggtatgaaggctttgaaaatgacgccagccatgacttctggtgcaacctgggaacagtggatgtccaccccattggctggtgtgccatcaacagcaagatcctagtgcccccacggaccatccatgccaagttcaccgactggaagggctacctcatgaaacggctggtgggctccaggacgcttcccgtggatttccacatcaagatggtggagagcatgaagtacccctttaggcagggcatgcggctggaagtggtggacaagtcccaggtgtcacgcactcgcatggctgtggtggacacagtaatcgggggtcgcctacggctcctctacgaggatggtgacagtgacgacgacttctggtgccacatgtggagccccctgatccacccagtgggttggtcacgacgtgtgggccacggcatcaagatgtcagagaggcgaagtgacatggcccatcaccccaccttccggaagatctactgtgatgccgttccttacctcttcaagaaggtacgagcagtctacacagaaggcggttggtttgaggaagggatgaagctggaggccattgaccccctgaatctgggcaacatctgcgtggcaactgtctgtaaggttctcctggatggatacctgatgatctgtgtggacggggggccctccacagatggcttggactggttctgctaccatgcctcttcccacgccatcttcccggccaccttctgtcagaagaatgacattgagctcacaccgccaaaaggttatgaggcacagactttcaactgggagaactacttggagaagaccaagtcgaaagccgctccatcgagactctttaacatggattgcccaaaccatggcttcaaggtgggcatgaagctggaggccgtggacctgatggagccccggctcatctgtgtggccacggtgaaacgagtggtgcatcggctcctcagcatccactttgacggctgggacagcgagtacgaccagtgggtggactgcgagtccccagacatctaccccgtcggctggtgtgagctcaccggctaccagctccagcctcctgtggccgcagaaccggccacaccgctgaaggccaaagaggccacaaagaagaaaaagaaacagtttgggaagaaaaggaaaagaatcccgcccactaagacgcgacccctcagacaggggtccaagaagcccctgctggaggacgaccctcagggtgccaggaagatctcgtcggagcctgttcctggcgagatcattgctgtgcgtgtgaaggaagagcatctagacgtggcctcgcccgacaaggcttcaagtccagagctgcctgtctccgtcgagaacatcaagcaggaaacagacgactgagccttcctgcctccagcctggcttctagctggaagccagcccagcgtttctctaccaccaccaccatgcctccacctgactttggcttggagactgatcctctctgtgtaaattctgcccggtgctgtgaaggctggacggtggaggacctgctggggtctcctgggacccgcctgttgcttctgccctcccctgtggaaaggtctatatgacgggccgcctgaggccccagaactcgtctgtgaaccaccttttccagccagagttcccaaagctggaacgctagctgcctgctcttccttaagatggcctccccccgacccgccacggccctcagttgccagggatggggccaccactgtcacactgtggaatacaagacagtgaactctgtctgcctgaacgagtcatgtaaattaagttctagagcagctctctgagcaggataaggtcccctgacagtgagttgtgtggtgggggcagcctctgcctcaaaaattcaccaagcagaatgcctctcagcctcatgtgttggtcctctgctcctcctagctccccagggatgttggggacccagcttgtctcggcagctaagaagcagtgaccaggatgtggattttggcgacctgtgtggtggccttgagctgctttctgtgtttgtgaggactgactcccatttcctaaaggaaatgcccccggggaggacattgggaggaagatggcctgagtgtgcactttggctctgctacctgctcctgaagccccgctaaaaataattcatccaagattcctttgtagttaaagggtccagttctgactggagcctctagagagctgggcttgtatgttcttttggccttttgttcctacctaaatgaagaaaccatgcctggaggggccgtgaacacagaaccctcaagacaaggatgacagagctggaggacacatctagctgccattgcaacctcactgggctccccagactctgtgtgtgagaaattaaaccccctgcttgcttga

SEQ ID NO: 377333 - DNA, 3404 bp, Homo sapiens
agcggaatggcgggagcaggcacggaaccggcttttcctccttcctgcagcgtgatggcccgcggctcagggaggcgaccaatgagtgctctcgcggagagcgacggggcaggccaatatggcttcctgcacctggtgacgcttggcgaaactgaggtctcatggagaagccccggagtattgaggagaccccatcttcagaaccaatggaggaagaggaagatgacgacttggagctgtttggtggctatgatagtttccggagttataacagcagtgtgggcagtgagagcagctcctatctggaggagtcaagtgaagcagaaaatgaggatcgggaagcaggggaactgccgacctccccgctgcatttgctcagccctgggactcctcgctccttggatggcagtggttctgagccagctgtctgtgagatgtgtggtatcgtgggtacaagggaagccttcttctccaagaccaagaggttctgcagcgtctcctgctccaggagctactcctccaactccaagaaagccagtatcttggctaggttacagggaaaaccaccgaccaaaaaagccaaagtcctgcacaaggctgcctggtctgccaaaattggagccttcctccactctcaagggacaggacagctggcagatgggacaccaacaggacaagacgctctggtcttgggcttcgactgggggaagttcctgaaggatcacagttacaaggctgctcccgtcagctgtttcaagcacgtcccactctatgaccagtgggaggatgtgatgaaagggatgaaggtggaggtgctcaacagtgatgctgtgctccccagccgggtgtactggatcgcctctgtcatccagacagcagggtatcgggtgctgcttcggtatgaaggctttgaaaatgacgccagccatgacttctggtgcaacctgggaacagtggatgtccaccccattggctggtgtgccatcaacagcaagatcctagtgcccccacggaccatccatgccaagttcaccgactggaagggctacctcatgaaacggctggtgggctccaggacgcttcccgtggatttccacatcaagatggtggagagcatgaagtacccctttaggcagggcatgcggctggaagtggtggacaagtcccaggtgtcacgcactcgcatggctgtggtggacacagtaatcgggggtcgcctacggctcctctacgaggatggtgacagtgacgacgacttctggtgccacatgtggagccccctgatccacccagtgggttggtcacgacgtgtgggccacggcatcaagatgtcagagaggcgaagtgacatggcccatcaccccaccttccggaagatctactgtgatgccgttccttacctcttcaagaaggtacgagcagtctacacagaaggcggttggtttgaggaagggatgaagctggaggccattgaccccctgaatctgggcaacatctgcgtggcaactgtctgtaaggttctcctggatggatacctgatgatctgtgtggacggggggccctccacagatggcttggactggttctgctaccatgcctcttcccacgccatcttcccggccaccttctgtcagaagaatgacattgagctcacaccgccaaaaggttatgaggcacagactttcaactgggagaactacttggagaagaccaagtcgaaagccgctccatcgagactctttaacatggattgcccaaaccatggcttcaaggtgggcatgaagctggaggccgtggacctgatggagccccggctcatctgtgtggccacggtgaaacgagtggtgcatcggctcctcagcatccactttgacggctgggacagcgagtacgaccagtgggtggactgcgagtccccagacatctaccccgtcggctggtgtgagctcaccggctaccagctccagcctcctgtggccgcaggtaaactacccaggtccctctgagcagccctggtaacaagggtgggaagaagggacagctgttctccggcccctcctccagccccgccctctcctcattgcccagaaccggccacaccgctgaaggccaaagaggccacaaagaagaaaaagaaacagtttgggaagaaaaggaaaagaatcccgcccactaagacgcgacccctcagacaggggtccaagaagcccctgctggaggacgaccctcagggtgccaggaagatctcgtcggagcctgttcctggcgagatcattgctgtgcgtgtgaaggaagagcatctagacgtggcctcgcccgacaaggcttcaagtccagagctgcctgtctccgtcgagaacatcaagcaggaaacagacgactgagccttcctgcctccagcctggcttctagctggaagccagcccagcgtttctctaccaccaccaccatgcctccacctgactttggcttggagactgatcctctctgtgtaaattctgcccggtgctgtgaaggctggacggtggaggacctgctggggtctcctgggacccgcctgttgcttctgccctcccctgtggaaaggtctatatgacgggccgcctgaggccccagaactcgtctgtgaaccaccttttccagccagagttcccaaagctggaacgctagctgcctgctcttccttaagatggcctccccccgacccgccacggccctcagttgccagggatggggccaccactgtcacactgtggaatacaagacagtgaactctgtctgcctgaacgagtcatgtaaattaagttctagagcagctctctgagcaggataaggtcccctgacagtgagttgtgtggtgggggcagcctctgcctcaaaaattcaccaagcagaatgcctctcagcctcatgtgttggtcctctgctcctcctagctccccagggatgttggggacccagcttgtctcggcagctaagaagcagtgaccaggatgtggattttggcgacctgtgtggtggccttgagctgctttctgtgtttgtgaggactgactcccatttcctaaaggaaatgcccccggggaggacattgggaggaagatggcctgagtgtgcactttggctctgctacctgctcctgaagccccgctaaaaataattcatccaagattcctttgtagttaaagggtccagttctgactggagcctctagagagctgggcttgtatgttcttttggccttttgttcctacctaaatgaagaaaccatgcctggaggggccgtgaacacagaaccctcaagacaaggatgacagagctggaggacacatctagctgccattgcaacctcactgggctccccagactctgtgtgtgagaaattaaaccccctgcttgcttga

SEQ ID NO: 377334 - DNA, 3182 bp, Homo sapiens
agcggaatggcgggagcaggcacggaaccggcttttcctccttcctgcagcgtgatggcccgcggctcagggaggcgaccaatgagtgctctcgcggagagcgacggggcaggccaatatggcttcctgcacctggtgacgcttggcgaaactgaggtctcatggagaagccccggagtattgaggagaccccatcttcagaaccaatggaggaagaggaagatgacgacttggagctgtttggtggctatgatagtttccggagttataacagcagtgtgggcagtgagagcagctcctatctggaggagtcaagtgaagcagaaaatgaggatcgggaagcaggggaactgccgacctccccgctgcatttgctcagccctgggactcctcgctccttggatggcagtggttctgagccagctgtctgtgagatgtgtggtatcgtgggtacaagggaagccttcttctccaagaccaagaggttctgcagcgtctcctgctccaggagctactcctccaactccaagaaagccagtatcttggctaggttacagggaaaaccaccgaccaaaaaagccaaagtcctgcacaaggctgcctggtctgccaaaattggagccttcctccactctcaagggacaggacagctggcagatgggacaccaacaggacaagacgctctggtcttgggcttcgactgggggaagttcctgaaggatcacagttacaaggctgctcccgtcagctgtttcaagcacgtcccactctatgaccagtgggaggatgtgatgaaagggatgaaggtggaggtgctcaacagtgatgctgtgctccccagccgggtgtactggatcgcctctgtcatccagacagcagggtatcgggtgctgcttcggtatgaaggctttgaaaatgacgccagccatgacttctggtgcaacctgggaacagtggatgtccaccccattggctggtgtgccatcaacagcaagatcctagtgcccccacggaccatccatgccaagttcaccgactggaagggctacctcatgaaacggctggtgggctccaggacgcttcccgtggatttccacatcaagatggtggagagcatgaagtacccctttaggcagggcatgcggctggaagtggtggacaagtcccaggtgtcacgcactcgcatggctgtggtggacacagtaatcgggggtcgcctacggctcctctacgaggatggtgacagtgacgacgacttctggtgccacatgtggagccccctgatccacccagtgggttggtcacgacgtgtgggccacggcatcaagatgtcagagaggcgaagtgacatggcccatcaccccaccttccggaagatctactgtgatgccgttccttacctcttcaagaaggtacgagcagtctacacagaaggcggttggtttgaggaagggatgaagctggaggccattgaccccctgaatctgggcaacatctgcgtggcaactgtctgtaaggttctcctggatggatacctgatgatctgtgtggacggggggccctccacagatggcttggactggttctgctaccatgcctcttcccacgccatcttcccggccaccttctgtcagaagaatgacattgagctcacaccgccaaaaggttatgaggcacagactttcaactgggagaactacttggagaagaccaagtcgaaagccgctccatcgagactctttaacatggattgcccaaaccatggcttcaaggtgggcatgaagctggaggccgtggacctgatggagccccggctcatctgtgtggccacggtgaaacgagtggtgcatcggctcctcagcatccactttgacggctgggacagcgagtacgaccagtgggtggactgcgagtccccagacatctaccccgtcggctggtgtgagctcaccggctaccagctccagcctcctgtggccgcagaaccggccacaccgctgaaggccaaagaggccacaaagaagaaaaagaaacagtttgggaagaaaatcattgctgtgcgtgtgaaggaagagcatctagacgtggcctcgcccgacaaggcttcaagtccagagctgcctgtctccgtcgagaacatcaagcaggaaacagacgactgagccttcctgcctccagcctggcttctagctggaagccagcccagcgtttctctaccaccaccaccatgcctccacctgactttggcttggagactgatcctctctgtgtaaattctgcccggtgctgtgaaggctggacggtggaggacctgctggggtctcctgggacccgcctgttgcttctgccctcccctgtggaaaggtctatatgacgggccgcctgaggccccagaactcgtctgtgaaccaccttttccagccagagttcccaaagctggaacgctagctgcctgctcttccttaagatggcctccccccgacccgccacggccctcagttgccagggatggggccaccactgtcacactgtggaatacaagacagtgaactctgtctgcctgaacgagtcatgtaaattaagttctagagcagctctctgagcaggataaggtcccctgacagtgagttgtgtggtgggggcagcctctgcctcaaaaattcaccaagcagaatgcctctcagcctcatgtgttggtcctctgctcctcctagctccccagggatgttggggacccagcttgtctcggcagctaagaagcagtgaccaggatgtggattttggcgacctgtgtggtggccttgagctgctttctgtgtttgtgaggactgactcccatttcctaaaggaaatgcccccggggaggacattgggaggaagatggcctgagtgtgcactttggctctgctacctgctcctgaagccccgctaaaaataattcatccaagattcctttgtagttaaagggtccagttctgactggagcctctagagagctgggcttgtatgttcttttggccttttgttcctacctaaatgaagaaaccatgcctggaggggccgtgaacacagaaccctcaagacaaggatgacagagctggaggacacatctagctgccattgcaacctcactgggctccccagactctgtgtgtgagaaattaaaccccctgcttgcttga

SEQ ID NO: 377335 - DNA, 3418 bp, Homo sapiens
agcggaatggcgggagcaggcacggaaccggcttttcctccttcctgcagcgtgatggcccgcggctcagggaggcgaccaatgagtgctctcgcggagagcgacggggcaggccaatatggcttcctgcacctggtgacgcttggcgaaactgaggtctcatggagaagccccggagtattgagacggagtcttgctctgtcacctaggctggagtgcagtggcgcgatctcggctcactgcaacctccgtctcccgggttcaagcaattctgtctccatctcccatgttcctgggattacaggagaccccatcttcagaaccaatggaggaagaggaagatgacgacttggagctgtttggtggctatgatagtttccggagttataacagcagtgtgggcagtgagagcagctcctatctggaggagtcaagtgaagcagaaaatgaggatcgggaagcaggggaactgccgacctccccgctgcatttgctcagccctgggactcctcgctccttggatggcagtggttctgagccagctgtctgtgagatgtgtggtatcgtgggtacaagggaagccttcttctccaagaccaagaggttctgcagcgtctcctgctccaggagctactcctccaactccaagaaagccagtatcttggctaggttacagggaaaaccaccgaccaaaaaagccaaagtcctgcacaaggctgcctggtctgccaaaattggagccttcctccactctcaagggacaggacagctggcagatgggacaccaacaggacaagacgctctggtcttgggcttcgactgggggaagttcctgaaggatcacagttacaaggctgctcccgtcagctgtttcaagcacgtcccactctatgaccagtgggaggatgtgatgaaagggatgaaggtggaggtgctcaacagtgatgctgtgctccccagccgggtgtactggatcgcctctgtcatccagacagcagggtatcgggtgctgcttcggtatgaaggctttgaaaatgacgccagccatgacttctggtgcaacctgggaacagtggatgtccaccccattggctggtgtgccatcaacagcaagatcctagtgcccccacggaccatccatgccaagttcaccgactggaagggctacctcatgaaacggctggtgggctccaggacgcttcccgtggatttccacatcaagatggtggagagcatgaagtacccctttaggcagggcatgcggctggaagtggtggacaagtcccaggtgtcacgcactcgcatggctgtggtggacacagtaatcgggggtcgcctacggctcctctacgaggatggtgacagtgacgacgacttctggtgccacatgtggagccccctgatccacccagtgggttggtcacgacgtgtgggccacggcatcaagatgtcagagaggcgaagtgacatggcccatcaccccaccttccggaagatctactgtgatgccgttccttacctcttcaagaaggtacgagcagtctacacagaaggcggttggtttgaggaagggatgaagctggaggccattgaccccctgaatctgggcaacatctgcgtggcaactgtctgtaaggttctcctggatggatacctgatgatctgtgtggacggggggccctccacagatggcttggactggttctgctaccatgcctcttcccacgccatcttcccggccaccttctgtcagaagaatgacattgagctcacaccgccaaaaggttatgaggcacagactttcaactgggagaactacttggagaagaccaagtcgaaagccgctccatcgagactctttaacatggattgcccaaaccatggcttcaaggtgggcatgaagctggaggccgtggacctgatggagccccggctcatctgtgtggccacggtgaaacgagtggtgcatcggctcctcagcatccactttgacggctgggacagcgagtacgaccagtgggtggactgcgagtccccagacatctaccccgtcggctggtgtgagctcaccggctaccagctccagcctcctgtggccgcagaaccggccacaccgctgaaggccaaagaggccacaaagaagaaaaagaaacagtttgggaagaaaaggaaaagaatcccgcccactaagacgcgacccctcagacaggggtccaagaagcccctgctggaggacgaccctcagggtgccaggaagatctcgtcggagcctgttcctggcgagatcattgctgtgcgtgtgaaggaagagcatctagacgtggcctcgcccgacaaggcttcaagtccagagctgcctgtctccgtcgagaacatcaagcaggaaacagacgactgagccttcctgcctccagcctggcttctagctggaagccagcccagcgtttctctaccaccaccaccatgcctccacctgactttggcttggagactgatcctctctgtgtaaattctgcccggtgctgtgaaggctggacggtggaggacctgctggggtctcctgggacccgcctgttgcttctgccctcccctgtggaaaggtctatatgacgggccgcctgaggccccagaactcgtctgtgaaccaccttttccagccagagttcccaaagctggaacgctagctgcctgctcttccttaagatggcctccccccgacccgccacggccctcagttgccagggatggggccaccactgtcacactgtggaatacaagacagtgaactctgtctgcctgaacgagtcatgtaaattaagttctagagcagctctctgagcaggataaggtcccctgacagtgagttgtgtggtgggggcagcctctgcctcaaaaattcaccaagcagaatgcctctcagcctcatgtgttggtcctctgctcctcctagctccccagggatgttggggacccagcttgtctcggcagctaagaagcagtgaccaggatgtggattttggcgacctgtgtggtggccttgagctgctttctgtgtttgtgaggactgactcccatttcctaaaggaaatgcccccggggaggacattgggaggaagatggcctgagtgtgcactttggctctgctacctgctcctgaagccccgctaaaaataattcatccaagattcctttgtagttaaagggtccagttctgactggagcctctagagagctgggcttgtatgttcttttggccttttgttcctacctaaatgaagaaaccatgcctggaggggccgtgaacacagaaccctcaagacaaggatgacagagctggaggacacatctagctgccattgcaacctcactgggctccccagactctgtgtgtgagaaattaaaccccctgcttgcttga

SEQ ID NO: 377336 - DNA, 3181 bp, Homo sapiens
agcggaatggcgggagcaggcacggaaccggcttttcctccttcctgcagcgtgatggcccgcggctcagggaggcgaccaatgagtgctctcgcggagagcgacggggcaggccaatatggcttcctgcacctggtgacgcttggcgaaactgaggtctcatggagaagccccggagtattgaggagaccccatcttcagaaccaatggaggaagaggaagatgacgacttggagctgtttggtggctatgatagtttccggagttataacagcagtgtgggcagtgagagcagctcctatctggaggagtcaagtgaagcagaaaatgaggatcgggaagcaggggaactgccgacctccccgctgcatttgctcagccctgggactcctcgctccttggatggcagtggttctgagccagctgtctgtgagatgtgtggtatcgtgggtacaagggaagccttcttctccaagaccaagaggttctgcagcgtctcctgctccaggagctactcctccaactccaagaaagccagtatcttggctaggttacagggaaaaccaccgaccaaaaaagccaaagtcctgcacaaggctgcctggtctgccaaaattggagccttcctccactctcaagggacaggacagctggcagatgggacaccaacaggacaagacgctctggtcttgggcttcgactgggggaagttcctgaaggatcacagttacaaggctgctcccgtcagctgtttcaagcacggtatcgggtgctgcttcggtatgaaggctttgaaaatgacgccagccatgacttctggtgcaacctgggaacagtggatgtccaccccattggctggtgtgccatcaacagcaagatcctagtgcccccacggaccatccatgccaagttcaccgactggaagggctacctcatgaaacggctggtgggctccaggacgcttcccgtggatttccacatcaagatggtggagagcatgaagtacccctttaggcagggcatgcggctggaagtggtggacaagtcccaggtgtcacgcactcgcatggctgtggtggacacagtaatcgggggtcgcctacggctcctctacgaggatggtgacagtgacgacgacttctggtgccacatgtggagccccctgatccacccagtgggttggtcacgacgtgtgggccacggcatcaagatgtcagagaggcgaagtgacatggcccatcaccccaccttccggaagatctactgtgatgccgttccttacctcttcaagaaggtacgagcagtctacacagaaggcggttggtttgaggaagggatgaagctggaggccattgaccccctgaatctgggcaacatctgcgtggcaactgtctgtaaggttctcctggatggatacctgatgatctgtgtggacggggggccctccacagatggcttggactggttctgctaccatgcctcttcccacgccatcttcccggccaccttctgtcagaagaatgacattgagctcacaccgccaaaaggttatgaggcacagactttcaactgggagaactacttggagaagaccaagtcgaaagccgctccatcgagactctttaacatggattgcccaaaccatggcttcaaggtgggcatgaagctggaggccgtggacctgatggagccccggctcatctgtgtggccacggtgaaacgagtggtgcatcggctcctcagcatccactttgacggctgggacagcgagtacgaccagtgggtggactgcgagtccccagacatctaccccgtcggctggtgtgagctcaccggctaccagctccagcctcctgtggccgcagaaccggccacaccgctgaaggccaaagaggccacaaagaagaaaaagaaacagtttgggaagaaaaggaaaagaatcccgcccactaagacgcgacccctcagacaggggtccaagaagcccctgctggaggacgaccctcagggtgccaggaagatctcgtcggagcctgttcctggcgagatcattgctgtgcgtgtgaaggaagagcatctagacgtggcctcgcccgacaaggcttcaagtccagagctgcctgtctccgtcgagaacatcaagcaggaaacagacgactgagccttcctgcctccagcctggcttctagctggaagccagcccagcgtttctctaccaccaccaccatgcctccacctgactttggcttggagactgatcctctctgtgtaaattctgcccggtgctgtgaaggctggacggtggaggacctgctggggtctcctgggacccgcctgttgcttctgccctcccctgtggaaaggtctatatgacgggccgcctgaggccccagaactcgtctgtgaaccaccttttccagccagagttcccaaagctggaacgctagctgcctgctcttccttaagatggcctccccccgacccgccacggccctcagttgccagggatggggccaccactgtcacactgtggaatacaagacagtgaactctgtctgcctgaacgagtcatgtaaattaagttctagagcagctctctgagcaggataaggtcccctgacagtgagttgtgtggtgggggcagcctctgcctcaaaaattcaccaagcagaatgcctctcagcctcatgtgttggtcctctgctcctcctagctccccagggatgttggggacccagcttgtctcggcagctaagaagcagtgaccaggatgtggattttggcgacctgtgtggtggccttgagctgctttctgtgtttgtgaggactgactcccatttcctaaaggaaatgcccccggggaggacattgggaggaagatggcctgagtgtgcactttggctctgctacctgctcctgaagccccgctaaaaataattcatccaagattcctttgtagttaaagggtccagttctgactggagcctctagagagctgggcttgtatgttcttttggccttttgttcctacctaaatgaagaaaccatgcctggaggggccgtgaacacagaaccctcaagacaaggatgacagagctggaggacacatctagctgccattgcaacctcactgggctccccagactctgtgtgtgagaaattaaaccccctgcttgcttga

SEQ ID NO: 377337 - DNA, 3477 bp, Homo sapiens
agcggaatggcgggagcaggcacggaaccggcttttcctccttcctgcagcgtgatggcccgcggctcagggaggcgaccaatgagtgctctcgcggagagcgacggggcaggccaatatggcttcctgcacctggtgacgcttggcgaaactgaggtctcatggagaagccccggagtattgaggagaccccatcttcagaaccaatggaggaagaggaagatgacgacttggagctgtttggtggctatgatagtttccggagttataacagcagtgtgggcagtgagagcagctcctatctggaggagtcaagtgaagcagaaaatgaggatcgggaagcaggggaactgccgacctccccgctgcatttgctcagccctgggactcctcgctccttggatggcagtggttctgagccagctgtctgtgagatgtgtggtatcgtgggtacaagggaagccttcttctccaagaccaagaggttctgcagcgtctcctgctccaggagctactcctccaactccaagaaagccagtatcttggctaggttacagggaaaaccaccgaccaaaaaagccaaagtcctgcacaaggctgcctggtctgccaaaattggagccttcctccactctcaagggacaggacagctggcagatgggacaccaacaggacaagacgctctggtcttgggcttcgactgggggaagttcctgaaggatcacagttacaaggctgctcccgtcagctgtttcaagcacgtcccactctatgaccagtgggaggatgtgatgaaagggatgaaggtggaggtgctcaacagtgatgctgtgctccccagccgggtgtactggatcgcctctgtcatccagacagcagggtatcgggtgctgcttcggtatgaaggctttgaaaatgacgccagccatgacttctggtgcaacctgggaacagtggatgtccaccccattggctggtgtgccatcaacagcaagatcctagtgcccccacggaccatccatgccaagttcaccgactggaagggctacctcatgaaacggctggtgggctccaggacgcttcccgtggatttccacatcaagatggtggagagcatgaagtacccctttaggcagggcatgcggctggaagtggtggacaagtcccaggtgtcacgcactcgcatggctgtggtggacacagtaatcgggggtcgcctacggctcctctacgaggatggtgacagtgacgacgacttctggtgccacatgtggagccccctgatccacccagtgggttggtcacgacgtgtgggccacggcatcaagatgtcagagaggcgaagtgacatggcccatcaccccaccttccggaagatctactgtgatgccgttccttacctcttcaagaaggtacgagcagtctacacagaaggcggttggtttgaggaagggatgaagctggaggccattgaccccctgaatctgggcaacatctgcgtggcaactgtctgtaaggttctcctggatggatacctgatgatctgtgtggacggggggccctccacagatggcttggactggttctgctaccatgcctcttcccacgccatcttcccggccaccttctgtcagaagaatgacattgagctcacaccgccaaaaggttatgaggcacagactttcaactgggagaactacttggagaagaccaagtcgaaagccgctccatcgagactctttaacatggattgcccaaaccatggcttcaaggtgggcatgaagctggaggccgtggacctgatggagccccggctcatctgtgtggccacggtgaaacgagtggtgcatcggctcctcagcatccactttgacggctgggacagcgagtacgaccagtgggtggactgcgagtccccagacatctaccccgtcggctggtgtgagctcaccggctaccagctccagcctcctgtggccgcagaaccggccacaccgctgaaggccaaagaggccacaaagaagaaaaagaaacagtttgggaagaaaaggaaaagaatcccgcccactaagacgcgacccctcagacaggggtccaagaagcccctgctggaggacgaccctcagggtgccaggaagatctcgtcggagcctgttcctggcgagatcattgctgtgcgtgtgaaggaagagcatctagacgtggcctcgcccgacaaggcttcaagtccagagctgcctgtctccgtcgagaacatcaagcaggaaacagacgactgagccttcctgcctccagcctggcttctagctggaagccagcccagcgtttctctaccaccaccaccatgcctccacctgactttggcttggagactgatcctctctgtgtaaattctgcccggtgctgtgaaggctggacggtggaggacctgctggggtctcctgggacccgcctgttgcttctgccctcccctgtggaaaggtctatatgacgggccgcctgaggccccagaactcgtctgtgaaccaccttttccagccagagttcccaaagctggaacgctagctgcctgctcttccttaagatggcctccccccgacccgccacggccctcagttgccagggatggggccaccactgtcacactgtggaatacaagacagtgaactctgtctgcctgaacgagtcatgtaaattaagttctagagcagctctctgagcaggataaggtcccctgacagtgagttgtgtggtgggggcagcctctgcctcaaaaattcaccaagcagaatgcctctcagcctcatgtgttggtcctctgctcctcctagctccccagggatgttggggacccagcttgtctcggcagctaagaagcagtgaccaggatgtggattttggcgacctgtgtggtggccttgagctgctttctgtgtttgtgaggactgactcccatttcctaaaggaaatgcccccggggaggacattgggaggaagatggcctgagtgtgcactttggctctgctacctgctcctgaagccccgctaaaaataattcatccaagattcctttgtagttaaagggtccagttctgactggagcctctagagagctgggcttgtatgttcttttggccttttgttcctacctaaatgaagaaaccatgcctggaggggccgtgaacacagaaccctcaagacaaggatgacagagctggaggacacatctagctgccattgcaacctcactgggctccccagactctgtgtgtgagaaattaaaccccctgcttgcttgagtcccgtttgttagatctctattccttgcagattgtgttctgaccccacccccccacctcgtggtatcgatcatgaaggccacgtgagtcaagacacgagtgtgcagggccgtaaagaaatgtcgcctgtcatcagctcaagttccctgtcttagccacatgctgtcattctttacgg

SEQ ID NO: 377338 - DNA, 3320 bp, Homo sapiens
  misc_feature (3305)..(3305): n is a, c, g, or t
agcggaatggcgggagcaggcacggaaccggcttttcctccttcctgcagcgtgatggcccgcggctcagggaggcgaccaatgagtgctctcgcggagagcgacggggcaggccaatatggcttcctgcacctggtgacgcttggcgaaactgaggtctcatggagaagccccggagtattgaggagaccccatcttcagaaccaatggaggaagaggaagatgacgacttggagctgtttggtggctatgatagtttccggagttataacagcagtgtgggcagtgagagcagctcctatctggaggagtcaagtgaagcagaaaatgaggatcgggaagcaggggaactgccgacctccccgctgcatttgctcagccctgggactcctcgctccttggatggcagtggttctgagccagctgtctgtgagatgtgtggtatcgtgggtacaagggaagccttcttctccaagaccaagaggttctgcagcgtctcctgctccaggagctactcctccaactccaagaaagccagtatcttggctaggttacagggaaaaccaccgaccaaaaaagccaaagtcctgcacaaggctgcctggtctgccaaaattggagccttcctccactctcaagggacaggacagctggcagatgggacaccaacaggacaagacgctctggtcttgggcttcgactgggggaagttcctgaaggatcacagttacaaggctgctcccgtcagctgtttcaagcacgtcccactctatgaccagtgggaggatgtgatgaaagggatgaaggtggaggtgctcaacagtgatgctgtgctccccagccgggtgtactggatcgcctctgtcatccagacagcagggtatcgggtgctgcttcggtatgaaggctttgaaaatgacgccagccatgacttctggtgcaacctgggaacagtggatgtccaccccattggctggtgtgccatcaacagcaagatcctagtgcccccacggaccatccatgccaagttcaccgactggaagggctacctcatgaaacggctggtgggctccaggacgcttcccgtggatttccacatcaagatggtggagagcatgaagtacccctttaggcagggcatgcggctggaagtggtggacaagtcccaggtgtcacgcactcgcatggctgtggtggacacagtaatcgggggtcgcctacggctcctctacgaggatggtgacagtgacgacgacttctggtgccacatgtggagccccctgatccacccagtgggttggtcacgacgtgtgggccacggcatcaagatgtcagagaggcgaagtgacatggcccatcaccccaccttccggaagatctactgtgatgccgttccttacctcttcaagaaggtacgagcagtctacacagaaggcggttggtttgaggaagggatgaagctggaggccattgaccccctgaatctgggcaacatctgcgtggcaactgtctgtaaggttctcctggatggatacctgatgatctgtgtggacggggggccctccacagatggcttggactggttctgctaccatgcctcttcccacgccatcttcccggccaccttctgtcagaagaatgacattgagctcacaccgccaaaaggttatgaggcacagactttcaactgggagaactacttggagaagaccaagtcgaaagccgctccatcgagactctttaacatggattgcccaaaccatggcttcaaggtgggcatgaagctggaggccgtggacctgatggagccccggctcatctgtgtggccacggtgaaacgagtggtgcatcggctcctcagcatccactttgacggctgggacagcgagtacgaccagtgggtggactgcgagtccccagacatctaccccgtcggctggtgtgagctcaccggctaccagctccagcctcctgtggccgcagaaccggccacaccgctgaaggccaaagaggccacaaagaagaaaaagaaacagtttgggaagaaaaggaaaagaatcccgcccactaagacgcgacccctcagacaggggtccaagaagcccctgctggaggacgaccctcagggtgccaggaagatctcgtcggagcctgttcctggcgagatcattgctgtgcgtgtgaaggaagagcatctagacgtggcctcgcccgacaaggcttcaagtccagagctgcctgtctccgtcgagaacatcaagcaggaaacagacgactgagccttcctgcctccagcctggcttctagctggaagccagcccagcgtttctctaccaccaccaccatgcctccacctgactttggcttggagactgatcctctctgtgtaaattctgcccggtgctgtgaaggctggacggtggaggacctgctggggtctcctgggacccgcctgttgcttctgccctcccctgtggaaaggtctatatgacgggccgcctgaggccccagaactcgtctgtgaaccaccttttccagccagagttcccaaagctggaacgctagctgcctgctcttccttaagatggcctccccccgacccgccacggccctcagttgccagggatggggccaccactgtcacactgtggaatacaagacagtgaactctgtctgcctgaacgagtcatgtaaattaagttctagagcagctctctgagcaggataaggtcccctgacagtgagttgtgtggtgggggcagcctctgcctcaaaaattcaccaagcagaatgcctctcagcctcatgtgttggtcctctgctcctcctagctccccagggatgttggggacccagcttgtctcggcagctaagaagcagtgaccaggatgtggattttggcgacctgtgtggtggccttgagctgctttctgtgtttgtgaggactgactcccatttcctaaaggaaatgcccccggggaggacattgggaggaagatggcctgagtgtgcactttggctctgctacctgctcctgaagccccgctaaaaataattcatccaagattcctttgtagttaaagggtccagttctgactggagcctctagagagctgggcttgtatgttcttttggccttttgttcctacctaaatgaagaaaccatgcctggaggggccgtgaacacagaaccctcaagacaaggatgacagagctggaggacacatctagctgccattgcaacctcactgggctccccagactctgtgtgtgagaaattaaaccccctgcttgcttgaaaaaanaaaagaaaaaaaaag

SEQ ID NO: 377339 - DNA, 716 bp, Homo sapiens
ttacatgactcgttcaggcagacagagttcactgtcttgtattccacagtgtgacagtggtggccccactccctggcaactgagggccgtggcgggtcggggggaggccatcttaagttctagagcagctctctgagcaggataaggtcccctgacagtgagttgtgtggtgggggcagcctctgcctcaaaaattcaccaagcagaatgcctctcagcctcatgtgttggtcctctgctcctcctagctccccagggatgttggggacccagcttgtctcggcagctaagaagcagtgaccaggatgtggattttggcgacctgtgtggtggccttgagctgctttctgtgtttgtgaggactgactcccatttcctaaaggaaatgcccccggggaggacattgggaggaagatggcctgagtgtgcactttggctctgctacctgctcctgaagccccgctaaaaataattcatccaagattcctttgtagttaaagggtccagttctgactggagcctctagagagctgggcttgtatgttcttttggccttttgttcctacctaaatgaagaaaccatgcctggaggggccgtgaacacagaaccctcaagacaaggatgacagagctggaggacacatctagctgccattgcaacctcactgggctccccagactctgtgtgtgagaaattaaaccccctgcttgcttga

SEQ ID NO: 377340 - DNA, 989 bp, Homo sapiens
tgggcaacaaggtcttgctatgttgcccaggatggtctcaaattcttgccctcaagcaatcctccctccttggcctcccaaactgccgggattacagacaggagctaccatgcctagtttcttctcactttcctctgacaaacttttcaacactcacctgttcccccagtcgtcctcatggatttccattagcccctctgttgacatctgtagccaagggaggccaagcagcagcacttcattcaggtagattcaggatatacacaccagtacctcccattcctcctcttattccattagcctttgtgggggcaggggctcacctggttaatgcagtgccccaggttttgaagggcccatcactttgtttgctttgaggtggtcatatcgggtgagtcatgtgctaagttctcttcccagctgtctgtgagatgtgtggtatcgtgggtacaagggaagccttcttctccaagaccaagaggttctgcagcgtctcctgctccaggagctactcctccaactccaagaaagccagtatcttggctaggttacaggtgagaggcaatcacttggatccttcccggtgcctttggtgctgagacaggaaccaccaagtgactgaaggccagggccaggaaagtttgaaaaggtccttgcttgtggccagctggtatttattatgttctcaaacttcacaggacagtagaatccatttgtggagctttttaaattataggttcctgaagctacgctccattacctaccgtcatcccccagagtctggtgtattcagtacattttaaacaagaactatgggggagtctgacacccttggtcttcaccccacacttttataaatcctttcaaaggaagttgggaaacaggcccaaggttcaccagccacggtggcttcaagaagaccatgcctcgtcggactccatgtcacaggcagctacctagaaagtcttgccagttttctaaattactga

SEQ ID NO: 377341 - DNA, 3180 bp, Homo sapiens
agcggaatggcgggagcaggcacggaaccggcttttcctccttcctgcagcgtgatggcccgcggctcagggaggcgaccaatgagtgctctcgcggagagcgacggggcaggccaatatggcttcctgcacctggtgacgcttggcgaaactgaggtctcatggagaagccccggagtattgaggagaccccatcttcagaaccaatggaggaagaggaagatgacgacttggagctgtttggtggctatgatagtttccggagttataacagcagtgtgggcagtgagagcagctcctatctggaggagtcaagtgaagcagaaaatgaggatcgggaagcaggggaactgccgacctccccgctgcatttgctcagccctgggactcctcgctccttggatggcagtggttctgagccagctgtctgtgagatgtgtggtatcgtgggtacaagggaagccttcttctccaagaccaagaggttctgcagcgtctcctgctccaggagctactcctccaactccaagaaagccagtatcttggctaggttacagggaaaaccaccgaccaaaaaagccaaagtcctgcacaaggctgcctggtctgccaaaattggagccttcctccactctcaagggacaggacagctggcagatgggacaccaacaggacaagacgctctggtcttgggcttcgactgggggaagttcctgaaggatcacagttacaaggctgctcccgtcagctgtttcaagcacgtcccactctatgaccagtgggaggatgtgatgaaagggatgaaggtggaggtgctcaacagtgatgctgtgctccccagccgggtgtactggatcgcctctgtcatccagacagcagggtatcgggtgctgcttcggtatgaaggctttgaaaatgacgccagccatgacttctggtgcaacctgggaacagtggatgtccaccccattggctggtgtgccatcaacagcaagatcctagtgcccccacggaccatccatgccaagttcaccgactggaagggctacctcatgaaacggctggtgggctccaggacgcttcccgtggatttccacatcaagatggtggagagcatgaagtacccctttaggcagggcatgcggctggaagtggtggacaagtcccaggtgtcacgcactcgcatggctgtggtggacacagtaatcgggggtcgcctacggctcctctacgaggatggtgacagtgacgacgacttctggtgccacatgtggagccccctgatccacccagtgggttggtcacgacgtgtgggccacggcatcaagatgtcagagaggcgaagtgacatggcccatcaccccaccttccggaagatctactgtgatgccgttccttacctcttcaagaaggtacgagcagtctacacagaaggcggttggtttgaggaagggatgaagctggaggccattgaccccctgaatctgggcaacatctgcgtggcaactgtctgtaaggttctcctggatggatacctgatgatctgtgtggacggggggccctccacagatggcttggactggttctgctaccatgcctcttcccacgccatcttcccggccaccttctgtcagaagaatgacattgagctcacaccgccaaaaggttatgaggcacagactttcaactgggagaactacttggagaagaccaagtcgaaagccgctccatcgagactctttaacatggattgcccaaaccatggcttcaaggtgggcatgaagctggaggccgtggacctgatggagccccggctcatctgtgtggccacggtgaaacgagtggtgcatcggctcctcagcatccactttgacggctgggacagcgagtacgaccagtgggtggactgcgagtccccagacatctaccccgtcggctggtgtgagctcaccggctaccagctccagcctcctgtggccgcaggtgtgggctctcgtggccctaagaggctctgactttctttcctcttcttttttccttcttcccccgcccctgtgcccatctccgttctttggcatgaggtggagatgtctcatggaccactttaagtagagagtgagccccgtcacccagcccctgctcctgacttctctgtctccctttccctctggcctgcagagctccttccttcatcttgcccactctgtcatatgttcgtgcccttgtgcacccaggtaaactacccaggtccctctgagcagccctggtaacaagggtgggaagaagggacagctgttctccggcccctcctccagccccgccctctcctcattgcccaggtttggcttcctgtcttggggtgtctcgtgtgggagggtggatggggtctcgggatgcgcctgtgccctgtgtcctcccagggaccctcttctcatctctttcacccttgtctttcaacaacagaaccggccacaccgctgaaggccaaagaggccacaaagaagaaaaagaaacagtttgggaagaaaaggaaaagaatcccgcccactaagacgcgacccctcagacaggggtccaagaagcccctgctggaggacgaccctcagggtgccaggaagatctcgtcggagcctgttcctggcgagatcattgctgtgcgtgtgaaggaagagcatctagacgtggcctcgcccgacaaggcttcaagtccagagctgcctgtctccgtcgagaacatcaagcaggaaacagacgactgagccttcctgcctccagcctggcttctagctggaagccagcccagcgtttctctaccaccaccaccatgcctccacctgactttggcttggagactgatcctctctgtgtaaattctgcccggtgctgtgaaggctggacggtggaggacctgctggggtctcctgggacccgcctgttgcttctgccctcccctgtggaaaggtctatatgacgggccgcctgaggccccagaactcgtctgtgaaccaccttttccagccagagttcccaaagctggaacgctagctgcctgctcttccttaagatggcctccccccgacccgccacggccctcagttgccagggatggggccaccactgtcacactgtggaatacaagacagtgaactctgtctgcctgaacgagtcatgtaaattaag

SEQ ID NO: 377342 - DNA, 3584 bp, Homo sapiens
agcggaatggcgggagcaggcacggaaccggcttttcctccttcctgcagcgtgatggcccgcggctcagggaggcgaccaatgagtgctctcgcggagagcgacggggcaggccaatatggcttcctgcacctggtgacgcttggcgaaactgaggtctcatggagaagccccggagtattgaggagaccccatcttcagaaccaatggaggaagaggaagatgacgacttggagctgtttggtggctatgatagtttccggagttataacagcagtgtgggcagtgagagcagctcctatctggaggagtcaagtgaagcagaaaatgaggatcgggaagcaggggaactgccgacctccccgctgcatttgctcagccctgggactcctcgctccttggatggcagtggttctgagccagctgtctgtgagatgtgtggtatcgtgggtacaagggaagccttcttctccaagaccaagaggttctgcagcgtctcctgctccaggagctactcctccaactccaagaaagccagtatcttggctaggttacagggaaaaccaccgaccaaaaaagccaaagtcctgcacaaggctgcctggtctgccaaaattggagccttcctccactctcaagggacaggacagctggcagatgggacaccaacaggacaagacgctctggtcttgggcttcgactgggggaagttcctgaaggatcacagttacaaggctgctcccgtcagctgtttcaagcacgtcccactctatgaccagtgggaggatgtgatgaaagggatgaaggtggaggtgctcaacagtgatgctgtgctccccagccgggtgtactggatcgcctctgtcatccagacagcagggtatcgggtgctgcttcggtatgaaggctttgaaaatgacgccagccatgacttctggtgcaacctgggaacagtggatgtccaccccattggctggtgtgccatcaacagcaagatcctagtgcccccacggaccatccatgccaagttcaccgactggaagggctacctcatgaaacggctggtgggctccaggacgcttcccgtggatttccacatcaagatggtggagagcatgaagtacccctttaggcagggcatgcggctggaagtggtggacaagtcccaggtgtcacgcactcgcatggctgtggtggacacagtaatcgggggtcgcctacggctcctctacgaggatggtgacagtgacgacgacttctggtgccacatgtggagccccctgatccacccagtgggttggtcacgacgtgtgggccacggcatcaagatgtcagagaggcgaagtgacatggcccatcaccccaccttccggaagatctactgtgatgccgttccttacctcttcaagaaggtacgagcagtctacacagaaggcggttggtttgaggaagggatgaagctggaggccattgaccccctgaatctgggcaacatctgcgtggcaactgtctgtaaggttctcctggatggatacctgatgatctgtgtggacggggggccctccacagatggcttggactggttctgctaccatgcctcttcccacgccatcttcccggccaccttctgtcagaagaatgacattgagctcacaccgccaaaaggttatgaggcacagactttcaactgggagaactacttggagaagaccaagtcgaaagccgctccatcgagactctttaacatggattgcccaaaccatggcttcaaggtgggcatgaagctggaggccgtggacctgatggagccccggctcatctgtgtggccacggtgaaacgagtggtgcatcggctcctcagcatccactttgacggctgggacagcgagtacgaccagtgggtggactgcgagtccccagacatctaccccgtcggctggtgtgagctcaccggctaccagctccagcctcctgtggccgcagagctccttccttcatcttgcccactctgtcatatgttcgtgcccttgtgcacccaggtaaactacccaggtccctctgagcagccctggtaacaagggtgggaagaagggacagctgttctccggcccctcctccagccccgccctctcctcattgcccaggtttggcttcctgtcttggggtgtctcgtgtgggagggtggatggggtctcgggatgcgcctgtgccctgtgtcctcccagggaccctcttctcatctctttcacccttgtctttcaacaacagaaccggccacaccgctgaaggccaaagaggccacaaagaagaaaaagaaacagtttgggaagaaaaggaaaagaatcccgcccactaagacgcgacccctcagacaggggtccaagaagcccctgctggaggacgaccctcagggtgccaggaagatctcgtcggagcctgttcctggcgagatcattgctgtgcgtgtgaaggaagagcatctagacgtggcctcgcccgacaaggcttcaagtccagagctgcctgtctccgtcgagaacatcaagcaggaaacagacgactgagccttcctgcctccagcctggcttctagctggaagccagcccagcgtttctctaccaccaccaccatgcctccacctgactttggcttggagactgatcctctctgtgtaaattctgcccggtgctgtgaaggctggacggtggaggacctgctggggtctcctgggacccgcctgttgcttctgccctcccctgtggaaaggtctatatgacgggccgcctgaggccccagaactcgtctgtgaaccaccttttccagccagagttcccaaagctggaacgctagctgcctgctcttccttaagatggcctccccccgacccgccacggccctcagttgccagggatggggccaccactgtcacactgtggaatacaagacagtgaactctgtctgcctgaacgagtcatgtaaattaagttctagagcagctctctgagcaggataaggtcccctgacagtgagttgtgtggtgggggcagcctctgcctcaaaaattcaccaagcagaatgcctctcagcctcatgtgttggtcctctgctcctcctagctccccagggatgttggggacccagcttgtctcggcagctaagaagcagtgaccaggatgtggattttggcgacctgtgtggtggccttgagctgctttctgtgtttgtgaggactgactcccatttcctaaaggaaatgcccccggggaggacattgggaggaagatggcctgagtgtgcactttggctctgctacctgctcctgaagccccgctaaaaataattcatccaagattcctttgtagttaaagggtccagttctgactggagcctctagagagctgggcttgtatgttcttttggccttttgttcctacctaaatgaagaaaccatgcctggaggggccgtgaacacagaaccctcaagacaaggatgacagagctggaggacacatctagctgccattgcaacctcactgggctccccagactctgtgtgtgagaaattaaaccccctgcttgcttga

SEQ ID NO: 377343 - DNA, 3427 bp, Homo sapiens
ggcatgagccaccgcacctggcccacattgttatacagtattctatttgaaccatgttaaaatatcatgcatttgtaaatccacagaggagcctggtgaattcctaacacatattttctgtcttgttaagctgttgaattgcatcatggtggagaaatgtgtaaatagaagtaatgatcttggtgtttgtaaaaggggtatttgaaaggttcccgaaagtgtgagggggctgatagcagatctgcagcttctccccccgtgcactaaagccaatcataattctttctacctggtttgtgtcatcctccattaggagaccccatcttcagaaccaatggaggaagaggaagatgacgacttggagctgtttggtggctatgatagtttccggagttataacagcagtgtgggcagtgagagcagctcctatctggaggagtcaagtgaagcagaaaatgaggatcgggaagcaggggaactgccgacctccccgctgcatttgctcagccctgggactcctcgctccttggatggcagtggttctgagccagctgtctgtgagatgtgtggtatcgtgggtacaagggaagccttcttctccaagaccaagaggttctgcagcgtctcctgctccaggagctactcctccaactccaagaaagccagtatcttggctaggttacagggaaaaccaccgaccaaaaaagccaaagtcctgcacaaggctgcctggtctgccaaaattggagccttcctccactctcaagggacaggacagctggcagatgggacaccaacaggacaagacgctctggtcttgggcttcgactgggggaagttcctgaaggatcacagttacaaggctgctcccgtcagctgtttcaagcacgtcccactctatgaccagtgggaggatgtgatgaaagggatgaaggtggaggtgctcaacagtgatgctgtgctccccagccgggtgtactggatcgcctctgtcatccagacagcagggtatcgggtgctgcttcggtatgaaggctttgaaaatgacgccagccatgacttctggtgcaacctgggaacagtggatgtccaccccattggctggtgtgccatcaacagcaagatcctagtgcccccacggaccatccatgccaagttcaccgactggaagggctacctcatgaaacggctggtgggctccaggacgcttcccgtggatttccacatcaagatggtggagagcatgaagtacccctttaggcagggcatgcggctggaagtggtggacaagtcccaggtgtcacgcactcgcatggctgtggtggacacagtaatcgggggtcgcctacggctcctctacgaggatggtgacagtgacgacgacttctggtgccacatgtggagccccctgatccacccagtgggttggtcacgacgtgtgggccacggcatcaagatgtcagagaggcgaagtgacatggcccatcaccccaccttccggaagatctactgtgatgccgttccttacctcttcaagaaggtacgagcagtctacacagaaggcggttggtttgaggaagggatgaagctggaggccattgaccccctgaatctgggcaacatctgcgtggcaactgtctgtaaggttctcctggatggatacctgatgatctgtgtggacggggggccctccacagatggcttggactggttctgctaccatgcctcttcccacgccatcttcccggccaccttctgtcagaagaatgacattgagctcacaccgccaaaaggttatgaggcacagactttcaactgggagaactacttggagaagaccaagtcgaaagccgctccatcgagactctttaacatggattgcccaaaccatggcttcaaggtgggcatgaagctggaggccgtggacctgatggagccccggctcatctgtgtggccacggtgaaacgagtggtgcatcggctcctcagcatccactttgacggctgggacagcgagtacgaccagtgggtggactgcgagtccccagacatctaccccgtcggctggtgtgagctcaccggctaccagctccagcctcctgtggccgcagaaccggccacaccgctgaaggccaaagaggccacaaagaagaaaaagaaacagtttgggaagaaaaggaaaagaatcccgcccactaagacgcgacccctcagacaggggtccaagaagcccctgctggaggacgaccctcagggtgccaggaagatctcgtcggagcctgttcctggcgagatcattgctgtgcgtgtgaaggaagagcatctagacgtggcctcgcccgacaaggcttcaagtccagagctgcctgtctccgtcgagaacatcaagcaggaaacagacgactgagccttcctgcctccagcctggcttctagctggaagccagcccagcgtttctctaccaccaccaccatgcctccacctgactttggcttggagactgatcctctctgtgtaaattctgcccggtgctgtgaaggctggacggtggaggacctgctggggtctcctgggacccgcctgttgcttctgccctcccctgtggaaaggtctatatgacgggccgcctgaggccccagaactcgtctgtgaaccaccttttccagccagagttcccaaagctggaacgctagctgcctgctcttccttaagatggcctccccccgacccgccacggccctcagttgccagggatggggccaccactgtcacactgtggaatacaagacagtgaactctgtctgcctgaacgagtcatgtaaattaagttctagagcagctctctgagcaggataaggtcccctgacagtgagttgtgtggtgggggcagcctctgcctcaaaaattcaccaagcagaatgcctctcagcctcatgtgttggtcctctgctcctcctagctccccagggatgttggggacccagcttgtctcggcagctaagaagcagtgaccaggatgtggattttggcgacctgtgtggtggccttgagctgctttctgtgtttgtgaggactgactcccatttcctaaaggaaatgcccccggggaggacattgggaggaagatggcctgagtgtgcactttggctctgctacctgctcctgaagccccgctaaaaataattcatccaagattcctttgtagttaaagggtccagttctgactggagcctctagagagctgggcttgtatgttcttttggccttttgttcctacctaaatgaagaaaccatgcctggaggggccgtgaacacagaaccctcaagacaaggatgacagagctggaggacacatctagctgccattgcaacctcactgggctccccagactctgtgtgtgagaaattaaaccccctgcttgcttga

SEQ ID NO: 377344 - DNA, 3296 bp, Homo sapiens
tgggcaacaaggtcttgctatgttgcccaggatggtctcaaattcttgccctcaagcaatcctccctccttggcctcccaaactgccgggattacagacaggagctaccatgcctagtttcttctcactttcctctgacaaacttttcaacactcacctgttcccccagtcgtcctcatggatttccattagcccctctgttgacatctgtagccaagggaggccaagcagcagcacttcattcaggtagattcaggatatacacaccagtacctcccattcctcctcttattccattagcctttgtgggggcaggggctcacctggttaatgcagtgccccaggttttgaagggcccatcactttgtttgctttgaggtggtcatatcgggtgagtcatgtgctaagttctcttcccagctgtctgtgagatgtgtggtatcgtgggtacaagggaagccttcttctccaagaccaagaggttctgcagcgtctcctgctccaggagctactcctccaactccaagaaagccagtatcttggctaggttacagggaaaaccaccgaccaaaaaagccaaagtcctgcacaaggctgcctggtctgccaaaattggagccttcctccactctcaagggacaggacagctggcagatgggacaccaacaggacaagacgctctggtcttgggcttcgactgggggaagttcctgaaggatcacagttacaaggctgctcccgtcagctgtttcaagcacgtcccactctatgaccagtgggaggatgtgatgaaagggatgaaggtggaggtgctcaacagtgatgctgtgctccccagccgggtgtactggatcgcctctgtcatccagacagcagggtatcgggtgctgcttcggtatgaaggctttgaaaatgacgccagccatgacttctggtgcaacctgggaacagtggatgtccaccccattggctggtgtgccatcaacagcaagatcctagtgcccccacggaccatccatgccaagttcaccgactggaagggctacctcatgaaacggctggtgggctccaggacgcttcccgtggatttccacatcaagatggtggagagcatgaagtacccctttaggcagggcatgcggctggaagtggtggacaagtcccaggtgtcacgcactcgcatggctgtggtggacacagtaatcgggggtcgcctacggctcctctacgaggatggtgacagtgacgacgacttctggtgccacatgtggagccccctgatccacccagtgggttggtcacgacgtgtgggccacggcatcaagatgtcagagaggcgaagtgacatggcccatcaccccaccttccggaagatctactgtgatgccgttccttacctcttcaagaaggtacgagcagtctacacagaaggcggttggtttgaggaagggatgaagctggaggccattgaccccctgaatctgggcaacatctgcgtggcaactgtctgtaaggttctcctggatggatacctgatgatctgtgtggacggggggccctccacagatggcttggactggttctgctaccatgcctcttcccacgccatcttcccggccaccttctgtcagaagaatgacattgagctcacaccgccaaaaggttatgaggcacagactttcaactgggagaactacttggagaagaccaagtcgaaagccgctccatcgagactctttaacatggattgcccaaaccatggcttcaaggtgggcatgaagctggaggccgtggacctgatggagccccggctcatctgtgtggccacggtgaaacgagtggtgcatcggctcctcagcatccactttgacggctgggacagcgagtacgaccagtgggtggactgcgagtccccagacatctaccccgtcggctggtgtgagctcaccggctaccagctccagcctcctgtggccgcagaaccggccacaccgctgaaggccaaagaggccacaaagaagaaaaagaaacagtttgggaagaaaaggaaaagaatcccgcccactaagacgcgacccctcagacaggggtccaagaagcccctgctggaggacgaccctcagggtgccaggaagatctcgtcggagcctgttcctggcgagatcattgctgtgcgtgtgaaggaagagcatctagacgtggcctcgcccgacaaggcttcaagtccagagctgcctgtctccgtcgagaacatcaagcaggaaacagacgactgagccttcctgcctccagcctggcttctagctggaagccagcccagcgtttctctaccaccaccaccatgcctccacctgactttggcttggagactgatcctctctgtgtaaattctgcccggtgctgtgaaggctggacggtggaggacctgctggggtctcctgggacccgcctgttgcttctgccctcccctgtggaaaggtctatatgacgggccgcctgaggccccagaactcgtctgtgaaccaccttttccagccagagttcccaaagctggaacgctagctgcctgctcttccttaagatggcctccccccgacccgccacggccctcagttgccagggatggggccaccactgtcacactgtggaatacaagacagtgaactctgtctgcctgaacgagtcatgtaaattaagttctagagcagctctctgagcaggataaggtcccctgacagtgagttgtgtggtgggggcagcctctgcctcaaaaattcaccaagcagaatgcctctcagcctcatgtgttggtcctctgctcctcctagctccccagggatgttggggacccagcttgtctcggcagctaagaagcagtgaccaggatgtggattttggcgacctgtgtggtggccttgagctgctttctgtgtttgtgaggactgactcccatttcctaaaggaaatgcccccggggaggacattgggaggaagatggcctgagtgtgcactttggctctgctacctgctcctgaagccccgctaaaaataattcatccaagattcctttgtagttaaagggtccagttctgactggagcctctagagagctgggcttgtatgttcttttggccttttgttcctacctaaatgaagaaaccatgcctggaggggccgtgaacacagaaccctcaagacaaggatgacagagctggaggacacatctagctgccattgcaacctcactgggctccccagactctgtgtgtgagaaattaaaccccctgcttgcttga

SEQ ID NO: 377345 - DNA, 2443 bp, Homo sapiens
agcggaatggcgggagcaggcacggaaccggcttttcctccttcctgcagcgtgatggcccgcggctcagggaggcgaccaatgagtgctctcgcggagagcgacggggcaggccaatatggcttcctgcacctggtgacgcttggcgaaactgaggtctcatggagaagccccggagtattgaggagaccccatcttcagaaccaatggaggaagaggaagatgacgacttggagctgtttggtggctatgatagtttccggagttataacagcagtgtgggcagtgagagcagctcctatctggaggagtcaagtgaagcagaaaatgaggatcgggaagcaggggaactgccgacctccccgctgcatttgctcagccctgggactcctcgctccttggatggcagtggttctgagccagctgtctgtgagatgtgtggtatcgtgggtacaagggaagccttcttctccaagaccaagaggttctgcagcgtctcctgctccaggagctactcctccaactccaagaaagccagtatcttggctaggttacagggaaaaccaccgaccaaaaaagccaaagtcctgcacaaggctgcctggtctgccaaaattggagccttcctccactctcaagggacaggacagctggcagatgggacaccaacaggacaagacgctctggtcttgggcttcgactgggggaagttcctgaaggatcacagttacaaggctgctcccgtcagctgtttcaagcacgtcccactctatgaccagtgggaggatgtgatgaaagggatgaaggtggaggtgctcaacagtgatgctgtgctccccagccgggtgtactggatcgcctctgtcatccagacagcagggtatcgggtgctgcttcggtatgaaggctttgaaaatgacgccagccatgacttctggtgcaacctgggaacagtggatgtccaccccattggctggtgtgccatcaacagcaagatcctagtgcccccacggaccatccatgccaagttcaccgactggaagggctacctcatgaaacggctggtgggctccaggacgcttcccgtggatttccacatcaagatggtggagagcatgaagtacccctttaggcagggcatgcggctggaagtggtggacaagtcccaggtgtcacgcactcgcatggctgtggtggacacagtaatcgggggtcgcctacggctcctctacgaggatggtgacagtgacgacgacttctggtgccacatgtggagccccctgatccacccagtgggttggtcacgacgtgtgggccacggcatcaagatgtcagagaggcgaagtgacatggcccatcaccccaccttccggaagatctactgtgatgccgttccttacctcttcaagaaggtacgagcagtctacacagaaggcggttggtttgaggaagggatgaagctggaggccattgaccccctgaatctgggcaacatctgcgtggcaactgtctgtaaggttctcctggatggatacctgatgatctgtgtggacggggggccctccacagatggcttggactggttctgctaccatgcctcttcccacgccatcttcccggccaccttctgtcagaagaatgacattgagctcacaccgccaaaaggttatgaggcacagactttcaactgggagaactacttggagaagaccaagtcgaaagccgctccatcgagactctttaacatggattgcccaaaccatggcttcaaggtgggcatgaagctggaggccgtggacctgatggagccccggctcatctgtgtggccacggtgaaacgagtggtgcatcggctcctcagcatccactttgacggctgggacagcgagtacgaccagtgggtggactgcgagtccccagacatctaccccgtcggctggtgtgagctcaccggctaccagctccagcctcctgtggccgcagaaccggccacaccgctgaaggccaaagaggccacaaagaagaaaaagaaacagtttgggaagaaaaggaaaagaatcccgcccactaagacgcgacccctcagacaggggtccaagaagcccctgctggaggacgaccctcagggtgccaggaagatctcgtcggagcctgttcctggcgagatcattgctgtgcgtgtgaaggaagagcatctagacgtggcctcgcccgacaaggcttcaagtccagagctgcctgtctccgtcgagaacatcaagcaggaaacagacgactgagccttcctgcctccagcctggcttctagctggaagccagcccagcgtttctctaccaccaccaccatgcctccacctgactttggcttggagactgatcctctctgtgtaaattctgcccgggggctgcccgtcttgcgggggctgcccgtcttgcgggggctg

SEQ ID NO: 377346 - DNA, 127 bp, Homo sapiens
cccactaagacgcgacccctcagacaggggtccaagaagcccctgctggaggacgaccctcagggtgccaggaagatctcgtcggagcctgttcctggcgagagtaagagccaccgggctgggtcaa

SEQ ID NO: 377347 - DNA, 462 bp, Homo sapiens
gtctcttctgttccagggtcagaagcccctgtggtccccaggcaatcccagggaacccagatacctctttatttctctttgttcacagcttagtttatttttaataagatagctgttttaggatcctatgtggaggatgttgaatcagtttctggcttaggcatcaactttttctcacttcaattctatttgcctttttgtcaaatgacaataaactttcttctctcatgagttgagtcacattgtttagtggtgattttatataaaaatatgtttcaccagatgggtgatgatttcctaagcattttgttctagcacagtgacataacagtgctatatcatatgtcattgatatctttgaccatcacttgtgacaattcgttttcttaatttgggggaggatttttaaaatctcagtagaattattgtcctcaccactacttagactacttaaacaagtaa

SEQ ID NO: 377348 - DNA, 1951 bp, Homo sapiens
ggccggggccgggccggggcggcgcgagcggctggagcaacgggccccgcggcagctgcgggcgacgcggtcgatggacatgggcacccagggatcggggcgcaagcggctccccaaccgggagcggctcacggcggaggacgacgcgctcaaccagatcgcgcgggaggcggaagcccggctcgctgcaaaacgggcggcccgcgcggaggctcgcgagatccgcatgaaggagctggagcggcagcagaaggagatctatcaggtccaaaagaaatattatgggctggatacaaaatggggtgacatcgagcagtggatggaagacagtgagcgctactctcgtagatccagaagaaacacatcggcttctgatgaagacgagcgcatgtcagtgggtagtcgtggaagcctgaggtcgcagcctgacttggagtatgggggtccttacgcctggacaaatggttatgatggagaattgtatggatcacagtccctgaatagaagatctggcaggccctcctgtctgtacagcgctgcccggccttcggggagttaccgggcgtctgtgttggatgaaggcagcttcggtgggacccgacggggcagcacctccggctcccgtgctccctcggagtacagcggccacctcaactccagctcccgcgcctcctccagggccagctcggcccgggccagccctgtggtagaagagagaccagaaaaagattttactgagaaggggtctcgtaacatgccgggcctgtctgcagccacgctggcctctctgggtgggacttcctctcggagaggcagcggagacacctccatctccatcgacaccgaggcatccatcagggaaatcaaggaactcaatgagttaaaggaccagattcaggatgtagaaggcaaatacatgcagggattgaaagagatgaaggactctctagcagaagttgaagagaaatataagaaggctatggtttccaatgctcagctagacaatgaaaagacaaacttcatgtaccaggttgataccctaaaagatatgttgctggagcttgaagaacagctggctgaatctaggcggcagtacgaagagaaaaacaaagaatttgaaagggaaaaacacgcccacagtatactgcaatttcagtttgctgaagtcaaggaggccctgaagcaaagagaggaaatgctcgaggaaatccgacagctacagcagaaacaggcgagttctatcagggagatttctgatcttcaggaaacaatagagtggaaagacaaaaagataggggcattagagaggcagaaagagttctttgattccgtaaggagtgaacgggatgatcttagagaagaagtagtcatgctgaaagaggaattaaagaaacatggaataatcctaaattcagaaatagctaccaatggagagacttccgacaccctcaataatgttggataccaaggtcctaccaagatgacaaaagaagagttaaatgccctcaagtcgacaggggatgggaccctagatattaggttgaaaaagctggttgatgaacgggaatgcttattggaacagattaagaaactcaaagggcagctggaggagagacagaagattggcaaactagacaatcttcgatctgaagatgatgtcttggaaaacgggacagacatgcatgtaatggacctacaaagggatgccaacagacagatcagcgacctcaaatttaaacttgcaaaatctgagcaagagataactgcattagaacaaaatgtaataaggttagagagtcaagtatcacgttacaaatcagcggctgaaaatgcagaaaaaatagaagatgaacttaaggcagaaaaacggaaactccaaagagagctccgctctgcattggataaaacagaagagctcgaggtgagcaacggccacttagtgaagcgtctg

SEQ ID NO: 377349 - DNA, 588 bp, Homo sapiens
taggaccacttcatttatctgagatgatggataccaagaatcagtgtataaaaatagtctaaatggctacaacagccgtcctgggaggtgcttaagcaatcccttttctttactgacccctcattcaagtggagactttgcgtaactctaacgcagctgtgaacacgcagacaaagctagaaagtgatgcaaatatagtaacctctggggccccgtgctgtgtccgtgtgcttcaagatgcgcatgtctttcatggagtatgaacagtaacatttcttggattatatatactaagcgaaaagcttaatacttggattttgttagtatctttaggcagagtctctttaatgtctagagtccactagtgttttagatggtagaagcctccttctggttcctgcttctgaagtaacttgctcatctgtgcaaatcttcttctttctcttggctctgctgcacactcaggcattagagaggcagaaagagttctttgattccgtaaggagtgaacgggatgatcttagagaagaagtagtcatgctgaaagaggaattaaaggtatgaagccaaactacagttttatttaaa

SEQ ID NO: 377350 - DNA, 743 bp, Homo sapiens
acccaacaggcgccgcggctgctccggtggcgccactgactcggaggcggctgcggagagcggggcgctggcccgtggaggcggcagcggcggcggctttctagcggatccgagattatatatctttgaatgatgcaggccactgcagtggtggagacagcatctggtaaaggctaccacagtaatggaggcaacctccaaaaagggaatttcaactttttaaagatacagagaaggatttgccatcaatgtgctgtcagaagataatgcagagagccataaaagcagagctgcaccttttaaatgttcactatcagatgtgtcgtcgccattgttgtgatatttacaaacttgtcatggaaaataggaatttatcaagtaattctgctaagaaggaattgggatcagcactactgtctcttttgggggacttaaaagttagatatgtgactttgaaagaaaaaatacacaaaggcataccactggaagagctgcccccactgtcactagaatcaaaattattatctaccttctctacttttgcttccaggctaatgaaaaaagaaacacatgtcttttcagaagcagatgctgaacaagataatcagagggctcatgatgttgatgtttcttcaaacctaaaaaagacactctctcaaatgtctttatcatctgacaatagtcatgctacacaaaacatatcacccaagaaagatgactttaaaaatggtgatataaatgca

SEQ ID NO: 377351 - DNA, 4331 bp, Homo sapiens
ccgtgggacgggcggaggcgcccgagtcccgcttccccggcgcccttccaccccgagcccgactcagcccgcggccacctgcgccccgcccctgtcggccgcgcccgagcccagcgccgcgagccgctccccggcgggctggctcctggccccggaagcgcgagcgttcacttagcggcgagtggctccgtctccgcggacagagcgcgcgccccctggcccggcccgcgaggggctcccggcgcggtccccgagcatttcccgccgggtggagcgggccgagcccggcaggatgaccagccccgcggccgctcaaagccgggagatcgactgtttgagcccggaagcgcagaagctggcggaagcccggctcgctgcaaaacgggcggcccgcgcggaggctcgcgagatccgcatgaaggagctggagcggcagcagaaggaggtagaagagagaccagaaaaagattttactgagaaggggtctcgtaacatgccgggcctgtctgcagccacgctggcctctctgggtgggacttcctctcggagaggcagcggagacacctccatctccatcgacaccgaggcatccatcagggaaatcaaggactctctagcagaagttgaagagaaatataagaaggctatggtttccaatgctcagctagacaatgaaaagacaaacttcatgtaccaggttgataccctaaaagatatgttgctggagcttgaagaacagctggctgaatctaggcggcagtacgaagagaaaaacaaagaatttgaaagggaaaaacacgcccacagtatactgcaatttcagtttgctgaagtcaaggaggccctgaagcaaagagaggaaatgctcgagaaacatggaataatcctaaattcagaaatagctaccaatggagagacttccgacaccctcaataatgttggataccaaggtcctaccaagatgacaaaagaagagttaaatgccctcaagtcgacaggggatgggaccctaggaagagccagtgaagtggaggtgaaaaatgaaatcgtggcgaatgtggggaaaagagaaatcttgcacaatactgagaaagaacaacacacagaggacacagtgaaggactgtgtggacatagaggtattccctgctggtgagaataccgaggaccagaaatcctctgaagacactgccccattcctaggaaccttagcaggtgctacctatgaggaacaggttcaaagccaaattcttgagagcagttctctccctgaaaacacagtacaggttgagtcaaatgaggtcatgggtgcaccagatgacaggaccagaactccccttgagccatccaactgttggagtgacttagatggtgggaaccacacagagaatgtgggagaggcagcagtgactcaggttgaagagcaggcaggcacagtggcctcgtgtcctttagggcatagtgatgacacagtttatcatgatgacaaatgtatggtagaggtcccccaagagttagagacaagcacagggcatagtttagagaaagaattcaccaaccaggaagcagctgagcccaaggaggttccagcgcacagtacagaagtaggtagggatcacaacgaagaagagggtgaagaaacaggattaagggacgagaaaccaatcaagacagaagttcctggttctccagcaggaactgagggcaactgtcaggaagcgacaggtccaagtacagtagacactcaaaatgaacccttagatatgaaagagcccgatgaagaaaagagtgaccaacagggagaggcattggactcatcgcagaagaagacaaagaacaagaaaaagaaaaacaagaagaaaaaatccccagtacccgtagaaacccttaaagatgttaaaaaagagttaacgtatcagaacacagatttaagtgaaattaaggaagaagagcaggtaaagtctactgacagaaagtcagcagtggaagcccaaaacgaggtgactgaaaatccaaaacagaaaattgcagcagaaagcagtgaaaatgttgattgtccggagaatcctaaaattaagttggatggaaaacttgaccaagaaggtgatgatgtacaaacagcagctgaggaggtactagctgatggagacacattagattttgaggatgacaccgttcaatcatcaggcccgagggctggtggtgaagaattagatgaaggtgttgcaaaagataatgctaaaatagatggtgccactcaaagcagtcctgcagaaccaaagagcgaagacgcagatcgctgcaccctgcccgaacatgaaagtccctcacaggacattagtgatgcctgtgaagcagaaagtacagagaggtgtgagatgtcagaacatccaagtcagaccgtcaggaaagctttagacagcaatagcctagagaacgatgacttgtcggcaccaggaagagagccagggcacttcaatccagaaagcagagaagataccagaggagggaatgagaagggcaaaagcaaagaagactgtaccatgtcctaagctgaggcaggcggcaggcgcggtgcacaggaagtctcagtgtgaaggggtcttttctctccactgccaatgtaagtagaatgttctaaattcatagagaggcactgtatgacaattaccaggtgctctactgctttaagttatagactgttacttgtagatttccatgtaatcattgaggttatcacccagattagaaagacatatttgttatcagtgtacgttctaattgagagcattccagtagtatcaaacaataatgtctactgtttatagtccacttaataaaaatagaggcatttactatttgccttaggctgataggaatgtgggttttcttgaccaaatatatcagcatctaattgaaatgaccaaatagcattcttagacttctgtattatgaatataattgatatttaaattaatgtcttgttcacatatgtgtactttcatatttgattttaaaatgtacattataacctgtatggtattttatttaaaggagataaacagccaaatagcaaataggtcactgaatgataagatttgcaccttagaacaataatcattttaaggataacaagtaaatgtctgaaagcatgaggggctttatttgcctttacctcatatgagtctttgatcttgaaccgatacttttggatctcattgttgatatacctgaatttactttgtaagagattttaacttcacttcatgctgatgatgtatcaaattcattttatagaaagatttaaagtttttttctggaagtgatatatgtcaaattacatttcctactgcagtatttgagcagggacagtcattttttaaatgtttttggccgggcgtggtggctcatgcctgtaatctcagtacattgggaggccaaggcaggtggatcacctgaggtcaagagttcgaggccagcctggccaacatggtgaaaccctgtctctactaaaaatacaaaaaattggccgggcgtgatggtgggcgcctgtaatcccagccactccagaggctgaggcaggagaatcgcttgaacctgcgaggcagagattgcagtgagccaagatcaagccattgtactccagcctggacaacaagagcgaaactctgtctaaaaaaaaaaaaaaacacacacacacacaacacaatgttttcacgcctgtaaacctagcacattgggaagccaaggtgggaggattgcttgaggccaggagttcaaggctgcagtgagctatgattgcacactgtactctagcctgggagacagagtgagacactgtctctaaaaaaaaaaaaaaaaaaaaaaaaagtttttgaaccttaaaatactttgtttgaatttctaatcatcattcaaaagagcagtaaaaaatggttacttgttcttgtacaagctactaattagactatagtaggatattttaaagagctgaatcacttttggtattttggtataaatattttcatttgttatgtcccagtatattcttactggaaaattcttgttttgatctgcctgaagaaaatatctgttttctatataaaaaaattttttaaaataattgtaaagttagatttaaaattgtaaaatataaaatcacaaaggaatgtaccttatgaatgttgttgacattttatgaaattatgtggattcatattactgttacaagatagaattgaatgcaaaaagaccaaaacctcaataaaatttgaggaaaacgtgttattatgtaattgaaataaaaacattttataattgtgaaaaaaaaag

SEQ ID NO: 377352 - DNA, 4267 bp, Homo sapiens
ccgtgggacgggcggaggcgcccgagtcccgcttccccggcgcccttccaccccgagcccgactcagcccgcggccacctgcgccccgcccctgtcggccgcgcccgagcccagcgccgcgagccgctccccggcgggctggctcctggccccggaagcgcgagcgttcacttagcggcgagtggctccgtctccgcggacagagcgcgcgccccctggcccggcccgcgaggggctcccggcgcggtccccgagcatttcccgccgggtggagcgggccgagcccggcaggatgaccagccccgcggccgctcaaagccgggagatcgactgtttgagcccggaagcgcagaagctggcggaagcccggctcgctgcaaaacgggcggcccgcgcggaggctcgcgagatccgcatgaaggagctggagcggcagcagaaggaggtagaagagagaccagaaaaagattttactgagaaggggtctcgtaacatgccgggcctgtctgcagccacgctggcctctctgggtgggacttcctctcggagaggcagcggagacacctccatctccatcgacaccgaggcatccatcagggaaatcaaggactctctagcagaagttgaagagaaatataagaaggctatggtttccaatgctcagctagacaatgaaaagacaaacttcatgtaccaggttgataccctaaaagatatgttgctggagcttgaagaacagctggctgaatctaggcggcagtacgaagagaaaaacaaagaatttgaaagggaaaaacacgcccacagtatactgcaatttcagtttgctgaagtcaaggaggccctgaagcaaagagaggaaatgctcgagaaacatggaataatcctaaattcagaaatagctaccaatggagagacttccgacaccctcaataatgttggataccaaggtcctaccaagatgacaaaagaagagttaaatgccctcaagtcgacaggggatgggaccctaggaagagccagtgaagtggaggtgaaaaatgaaatcgtggcgaatgtggggaaaagagaaatcttgcacaatactgagaaagaacaacacacagaggacacagtgaaggactgtgtggacatagaggtattccctgctggtgagaataccgaggaccagaaatcctctgaagacactgccccattcctaggaaccttagcaggtgctacctatgaggaacaggttcaaagccaaattcttgagagcagttctctccctgaaaacacagtacaggttgagtcaaatgaggtcatgggtgcaccagatgacaggaccagaactccccttgagccatccaactgttggagtgacttagatggtgggaaccacacagagaatgtgggagaggcagcagtgactcaggttgaagagcaggcaggcacagtggcctcgtgtcctttagggcatagtgatgacacagtttatcatgatgacaaatgtatggtagaggtcccccaagagttagagacaagcacagggcatagtttagagaaagaattcaccaaccaggaagcagctgagcccaaggaggttccagcgcacagtacagaagtaggtagggatcacaacgaagaagagggtgaagaaacaggattaagggacgagaaaccaatcaagacagaagttcctggttctccagcaggaactgagggcaactgtcaggaagcgacaggtccaagtacagtagacactcaaaatgaacccttagatatgaaagagcccgatgaagaaaagagtgaccaacagggagaggcattggactcatcgcagaagaagacaaagaacaagaaaaagaaaaacaagaagaaaaaatccccagtacccgtagaaacccttaaagatgttaaaaaagagttaacgtatcagaacacagatttaagtgaaattaaggaagaagagcaggtaaagtctactgacagaaagtcagcagtggaagcccaaaacgaggtgactgaaaatccaaaacagaaaattgcagcagaaagcagtgaaaatgttgattgtccggagaatcctaaaattaagttggatggaaaacttgaccaagaaggtgatgatgtacaaacagcagctgaggaggtactagctgatggagacatgaaggtgttgcaaaagataatgctaaaatagatggtgccactcaaagcagtcctgcagaaccaaagagcgaagacgcagatcgctgcaccctgcccgaacatgaaagtccctcacaggacattagtgatgcctgtgaagcagaaagtacagagaggtgtgagatgtcagaacatccaagtcagaccgtcaggaaagctttagacagcaatagcctagagaacgatgacttgtcggcaccaggaagagagccagggcacttcaatccagaaagcagagaagataccagaggagggaatgagaagggcaaaagcaaagaagactgtaccatgtcctaagctgaggcaggcggcaggcgcggtgcacaggaagtctcagtgtgaaggggtcttttctctccactgccaatgtaagtagaatgttctaaattcatagagaggcactgtatgacaattaccaggtgctctactgctttaagttatagactgttacttgtagatttccatgtaatcattgaggttatcacccagattagaaagacatatttgttatcagtgtacgttctaattgagagcattccagtagtatcaaacaataatgtctactgtttatagtccacttaataaaaatagaggcatttactatttgccttaggctgataggaatgtgggttttcttgaccaaatatatcagcatctaattgaaatgaccaaatagcattcttagacttctgtattatgaatataattgatatttaaattaatgtcttgttcacatatgtgtactttcatatttgattttaaaatgtacattataacctgtatggtattttatttaaaggagataaacagccaaatagcaaataggtcactgaatgataagatttgcaccttagaacaataatcattttaaggataacaagtaaatgtctgaaagcatgaggggctttatttgcctttacctcatatgagtctttgatcttgaaccgatacttttggatctcattgttgatatacctgaatttactttgtaagagattttaacttcacttcatgctgatgatgtatcaaattcattttatagaaagatttaaagtttttttctggaagtgatatatgtcaaattacatttcctactgcagtatttgagcagggacagtcattttttaaatgtttttggccgggcgtggtggctcatgcctgtaatctcagtacattgggaggccaaggcaggtggatcacctgaggtcaagagttcgaggccagcctggccaacatggtgaaaccctgtctctactaaaaatacaaaaaattggccgggcgtgatggtgggcgcctgtaatcccagccactccagaggctgaggcaggagaatcgcttgaacctgcgaggcagagattgcagtgagccaagatcaagccattgtactccagcctggacaacaagagcgaaactctgtctaaaaaaaaaaaaaaacacacacacacacaacacaatgttttcacgcctgtaaacctagcacattgggaagccaaggtgggaggattgcttgaggccaggagttcaaggctgcagtgagctatgattgcacactgtactctagcctgggagacagagtgagacactgtctctaaaaaaaaaaaaaaaaaaaaaaaaagtttttgaaccttaaaatactttgtttgaatttctaatcatcattcaaaagagcagtaaaaaatggttacttgttcttgtacaagctactaattagactatagtaggatattttaaagagctgaatcacttttggtattttggtataaatattttcatttgttatgtcccagtatattcttactggaaaattcttgttttgatctgcctgaagaaaatatctgttttctatataaaaaaattttttaaaataattgtaaagttagatttaaaattgtaaaatataaaatcacaaaggaatgtaccttatgaatgttgttgacattttatgaaattatgtggattcatattactgttacaagatagaattgaatgcaaaaagaccaaaacctcaataaaatttgaggaaaacgtgttattatgtaattgaaataaaaacattttataattgtgaaaaaaaaag

SEQ ID NO: 377353 - DNA, 4278 bp, Homo sapiens
ccgtgggacgggcggaggcgcccgagtcccgcttccccggcgcccttccaccccgagcccgactcagcccgcggccacctgcgccccgcccctgtcggccgcgcccgagcccagcgccgcgagccgctccccggcgggctggctcctggccccggaagcgcgagcgttcacttagcggcgagtggctccgtctccgcggacagagcgcgcgccccctggcccggcccgcgaggggctcccggcgcggtccccgagcatttcccgccgggtggagcgggccgagcccggcaggatgaccagccccgcggccgctcaaagccgggagatcgactgtttgagcccggaagcgcagaagctggcggaagcccggctcgctgcaaaacgggcggcccgcgcggaggctcgcgagatccgcatgaaggagctggagcggcagcagaaggaggtagaagagagaccagaaaaagattttactgagaaggggtctcgtaacatgccgggcctgtctgcagccacgctggcctctctgggtgggacttcctctcggagaggcagcggagacacctccatctccatcgacaccgaggcatccatcagggaaatcaaggactctctagcagaagttgaagagaaatataagaaggctatggtttccaatgctcagctagacaatgaaaagacaaacttcatgtaccaggttgataccctaaaagatatgttgctggagcttgaagaacagctggctgaatctaggcggcagtacgaagagaaaaacaaagaatttgaaagggaaaaacacgcccacagtatactgcaatttcagtttgctgaagtcaaggaggccctgaagcaaagagaggaaatgctcgagaaacatggaataatcctaaattcagaaatagctaccaatggagagacttccgacaccctcaataatgttggataccaaggtcctaccaagatgacaaaagaagagttaaatgccctcaagtcgacaggggatgggaccctaggaagagccagtgaagtggaggtgaaaaatgaaatcgtggcgaatgtggggaaaagagaaatcttgcacaatactgagaaagaacaacacacagaggacacagtgaaggactgtgtggacatagaggtattccctgctggtgagaataccgaggaccagaaatcctctgaagacactgccccattcctaggaaccttagcaggtgctacctatgaggaacaggttcaaagccaaattcttgagagcagttctctccctgaaaacacagtacaggttgagtcaaatgaggtcatgggtgcaccagatgacaggaccagaactccccttgagccatccaactgttggagtgacttagatggtgggaaccacacagagaatgtgggagaggcagcagtgactcaggttgaagagcaggcaggcacagtggcctcgtgtcctttagggcatagtgatgacacagtttatcatgatgacaaatgtatggtagaggtcccccaagagttagagacaagcacagggcatagtttagagaaagaattcaccaaccaggaagcagctgagcccaaggaggttccagcgcacagtacagaagtaggtagggatcacaacgaagaagagggtgaagaaacaggattaagggacgagaaaccaatcaagacagaagttcctggttctccagcaggaactgagggcaactgtcaggaagcgacaggtccaagtacagtagacactcaaaatgaacccttagatatgaaagagcccgatgaagaaaagagtgaccaacagggagaggcattggactcatcgcagaagaagacaaagaacaagaaaaagaaaaacaagaagaaaaaatccccagtacccgtagaaacccttaaagatgttaaaaaagagttaacgtatcagaacacagatttaagtgaaattaaggaagaagagcaggtaaagtctactgacagaaagtcagcagtggaagcccaaaacgaggtgactgaaaatccaaaacagaaaattgcagcagaaagcagtgaaaatgttgattgtccggagaatcctaaaattaagttggatggaaaacttgaccaagaaggtgatgatgtacaaacagcagctgaggaggtactagctgatggagacacattagattttgaggatgacaccgttcaatcatcaggcccgagggctggtggtgaagaattagatgaaggtgttgcaaaagataatgctaaaatagatggtgccactcaaagcagtcctgcagaaccaaagagcgaagacgcagatcgctgcaccctgcccgaacatgaaagtccctcacaggacattagtgatgcctgtgaagcagaaagtacagagaggtgtgagatgtcagaacatccaagtcagaccgtcaggaaagctttagacagcaatagcctagagaacgatgacttgtcggcaccaggaagagagccagggcacttcaatccagaaagcagagaagataccagaggagggaatgagaagggcaaaagcaaagaagactgtaccatgtcctaagctgaggcaggcggcaggcgcggtgcacaggaagtctcagtgtgaaggggtcttttctctccactgccaatgtaagtagaatgttctaaattcatagagaggcactgtatgacaattaccaggtgctctactgctttaagttatagactgttacttgtagatttccatgtaatcattgaggttatcacccagattagaaagacatatttgttatcagtgtacgttctaattgagagcattccagtagtatcaaacaataatgtctactgtttatagtccacttaataaaaatagaggcatttactatttgccttaggctgataggaatgtgggttttcttgaccaaatatatcagcatctaattgaaatgaccaaatagcattcttagacttctgtattatgaatataattgatatttaaattaatgtcttgttcacatatgtgtactttcatatttgattttaaaatcaaataggtcactgaatgataagatttgcaccttagaacaataatcattttaaggataacaagtaaatgtctgaaagcatgaggggctttatttgcctttacctcatatgagtctttgatcttgaaccgatacttttggatctcattgttgatatacctgaatttactttgtaagagattttaacttcacttcatgctgatgatgtatcaaattcattttatagaaagatttaaagtttttttctggaagtgatatatgtcaaattacatttcctactgcagtatttgagcagggacagtcattttttaaatgtttttggccgggcgtggtggctcatgcctgtaatctcagtacattgggaggccaaggcaggtggatcacctgaggtcaagagttcgaggccagcctggccaacatggtgaaaccctgtctctactaaaaatacaaaaaattggccgggcgtgatggtgggcgcctgtaatcccagccactccagaggctgaggcaggagaatcgcttgaacctgcgaggcagagattgcagtgagccaagatcaagccattgtactccagcctggacaacaagagcgaaactctgtctaaaaaaaaaaaaaaacacacacacacacaacacaatgttttcacgcctgtaaacctagcacattgggaagccaaggtgggaggattgcttgaggccaggagttcaaggctgcagtgagctatgattgcacactgtactctagcctgggagacagagtgagacactgtctctaaaaaaaaaaaaaaaaaaaaaaaaagtttttgaaccttaaaatactttgtttgaatttctaatcatcattcaaaagagcagtaaaaaatggttacttgttcttgtacaagctactaattagactatagtaggatattttaaagagctgaatcacttttggtattttggtataaatattttcatttgttatgtcccagtatattcttactggaaaattcttgttttgatctgcctgaagaaaatatctgttttctatataaaaaaattttttaaaataattgtaaagttagatttaaaattgtaaaatataaaatcacaaaggaatgtaccttatgaatgttgttgacattttatgaaattatgtggattcatattactgttacaagatagaattgaatgcaaaaagaccaaaacctcaataaaatttgaggaaaacgtgttattatgtaattgaaataaaaacattttataattgtgaaaaaaaaag

SEQ ID NO: 377354 - DNA, 4142 bp, Homo sapiens
ggccggggccgggccggggcggcgcgagcggctggagcaacgggccccgcggcagctgcgggcgacgcggtcgatggacatgggcacccagggatcggggcgcaagcggctccccaaccgggagcggctcacggcggaggacgacgcgctcaaccagatcgcgcgggaggcggaagcccggctcgctgcaaaacgggcggcccgcgcggaggctcgcgagatccgcatgaaggagctggagcggcagcagaaggaggtagaagagagaccagaaaaagattttactgagaaggggtctcgtaacatgccgggcctgtctgcagccacgctggcctctctgggtgggacttcctctcggagaggcagcggagacacctccatctccatcgacaccgaggcatccatcagggaaatcaaggactctctagcagaagttgaagagaaatataagaaggctatggtttccaatgctcagctagacaatgaaaagacaaacttcatgtaccaggttgataccctaaaagatatgttgctggagcttgaagaacagctggctgaatctaggcggcagtacgaagagaaaaacaaagaatttgaaagggaaaaacacgcccacagtatactgcaatttcagtttgctgaagtcaaggaggccctgaagcaaagagaggaaatgctcgagaaacatggaataatcctaaattcagaaatagctaccaatggagagacttccgacaccctcaataatgttggataccaaggtcctaccaagatgacaaaagaagagttaaatgccctcaagtcgacaggggatgggaccctaggaagagccagtgaagtggaggtgaaaaatgaaatcgtggcgaatgtggggaaaagagaaatcttgcacaatactgagaaagaacaacacacagaggacacagtgaaggactgtgtggacatagaggtattccctgctggtgagaataccgaggaccagaaatcctctgaagacactgccccattcctaggaaccttagcaggtgctacctatgaggaacaggttcaaagccaaattcttgagagcagttctctccctgaaaacacagtacaggttgagtcaaatgaggtcatgggtgcaccagatgacaggaccagaactccccttgagccatccaactgttggagtgacttagatggtgggaaccacacagagaatgtgggagaggcagcagtgactcaggttgaagagcaggcaggcacagtggcctcgtgtcctttagggcatagtgatgacacagtttatcatgatgacaaatgtatggtagaggtcccccaagagttagagacaagcacagggcatagtttagagaaagaattcaccaaccaggaagcagctgagcccaaggaggttccagcgcacagtacagaagtaggtagggatcacaacgaagaagagggtgaagaaacaggattaagggacgagaaaccaatcaagacagaagttcctggttctccagcaggaactgagggcaactgtcaggaagcgacaggtccaagtacagtagacactcaaaatgaacccttagatatgaaagagcccgatgaagaaaagagtgaccaacagggagaggcattggactcatcgcagaagaagacaaagaacaagaaaaagaaaaacaagaagaaaaaatccccagtacccgtagaaacccttaaagatgttaaaaaagagttaacgtatcagaacacagatttaagtgaaattaaggaagaagagcaggtaaagtctactgacagaaagtcagcagtggaagcccaaaacgaggtgactgaaaatccaaaacagaaaattgcagcagaaagcagtgaaaatgttgattgtccggagaatcctaaaattaagttggatggaaaacttgaccaagaaggtgatgatgtacaaacagcagctgaggaggtactagctgatggagacacattagattttgaggatgacaccgttcaatcatcaggcccgagggctggtggtgaagaattagatgaaggtgttgcaaaagataatgctaaaatagatggtgccactcaaagcagtcctgcagaaccaaagagcgaagacgcagatcgctgcaccctgcccgaacatgaaagtccctcacaggacattagtgatgcctgtgaagcagaaagtacagagaggtgtgagatgtcagaacatccaagtcagaccgtcaggaaagctttagacagcaatagcctagagaacgatgacttgtcggcaccaggaagagagccagggcacttcaatccagaaagcagagaagataccagaggagggaatgagaagggcaaaagcaaagaagactgtaccatgtcctaagctgaggcaggcggcaggcgcggtgcacaggaagtctcagtgtgaaggggtcttttctctccactgccaatgtaagtagaatgttctaaattcatagagaggcactgtatgacaattaccaggtgctctactgctttaagttatagactgttacttgtagatttccatgtaatcattgaggttatcacccagattagaaagacatatttgttatcagtgtacgttctaattgagagcattccagtagtatcaaacaataatgtctactgtttatagtccacttaataaaaatagaggcatttactatttgccttaggctgataggaatgtgggttttcttgaccaaatatatcagcatctaattgaaatgaccaaatagcattcttagacttctgtattatgaatataattgatatttaaattaatgtcttgttcacatatgtgtactttcatatttgattttaaaatgtacattataacctgtatggtattttatttaaaggagataaacagccaaatagcaaataggtcactgaatgataagatttgcaccttagaacaataatcattttaaggataacaagtaaatgtctgaaagcatgaggggctttatttgcctttacctcatatgagtctttgatcttgaaccgatacttttggatctcattgttgatatacctgaatttactttgtaagagattttaacttcacttcatgctgatgatgtatcaaattcattttatagaaagatttaaagtttttttctggaagtgatatatgtcaaattacatttcctactgcagtatttgagcagggacagtcattttttaaatgtttttggccgggcgtggtggctcatgcctgtaatctcagtacattgggaggccaaggcaggtggatcacctgaggtcaagagttcgaggccagcctggccaacatggtgaaaccctgtctctactaaaaatacaaaaaattggccgggcgtgatggtgggcgcctgtaatcccagccactccagaggctgaggcaggagaatcgcttgaacctgcgaggcagagattgcagtgagccaagatcaagccattgtactccagcctggacaacaagagcgaaactctgtctaaaaaaaaaaaaaaacacacacacacacaacacaatgttttcacgcctgtaaacctagcacattgggaagccaaggtgggaggattgcttgaggccaggagttcaaggctgcagtgagctatgattgcacactgtactctagcctgggagacagagtgagacactgtctctaaaaaaaaaaaaaaaaaaaaaaaaagtttttgaaccttaaaatactttgtttgaatttctaatcatcattcaaaagagcagtaaaaaatggttacttgttcttgtacaagctactaattagactatagtaggatattttaaagagctgaatcacttttggtattttggtataaatattttcatttgttatgtcccagtatattcttactggaaaattcttgttttgatctgcctgaagaaaatatctgttttctatataaaaaaattttttaaaataattgtaaagttagatttaaaattgtaaaatataaaatcacaaaggaatgtaccttatgaatgttgttgacattttatgaaattatgtggattcatattactgttacaagatagaattgaatgcaaaaagaccaaaacctcaataaaatttgaggaaaacgtgttattatgtaattgaaataaaaacattttataattgtgaaaaaaaaag

SEQ ID NO: 377355 - DNA, 4517 bp, Homo sapiens
ccgtgggacgggcggaggcgcccgagtcccgcttccccggcgcccttccaccccgagcccgactcagcccgcggccacctgcgccccgcccctgtcggccgcgcccgagcccagcgccgcgagccgctccccggcgggctggctcctggccccggaagcgcgagcgttcacttagcggcgagtggctccgtctccgcggacagagcgcgcgccccctggcccggcccgcgaggggctcccggcgcggtccccgagcatttcccgccgggtggagcgggccgagcccggcaggatgaccagccccgcggccgctcaaagccgggagatcgactgtttgagcccggaagcgcagaagctggcggaagcccggctcgctgcaaaacgggcggcccgcgcggaggctcgcgagatccgcatgaaggagctggagcggcagcagaaggaggtagaagagagaccagaaaaagattttactgagaaggggtctcgtaacatgccgggcctgtctgcagccacgctggcctctctgggtgggacttcctctcggagaggcagcggagacacctccatctccatcgacaccgaggcatccatcagggaaatcaaggactctctagcagaagttgaagagaaatataagaaggctatggtttccaatgctcagctagacaatgaaaagacaaacttcatgtaccaggttgataccctaaaagatatgttgctggagcttgaagaacagctggctgaatctaggcggcagtacgaagagaaaaacaaagaatttgaaagggaaaaacacgcccacagtatactgcaatttcagtttgctgaagtcaaggaggccctgaagcaaagagaggaaatgctcgaggaaatccgacagctacagcagaaacaggcgagttctatcagggagatttctgatcttcaggaaacaatagagtggaaagacaaaaagataggggcattagagaggcagaaagagttctttgattccgtaaggagtgaacgggatgatcttagagaagaagtagtcatgctgaaagaggaattaaagaaacatggaataatcctaaattcagaaatagctaccaatggagagacttccgacaccctcaataatgttggataccaaggtcctaccaagatgacaaaagaagagttaaatgccctcaagtcgacaggggatgggaccctaggaagagccagtgaagtggaggtgaaaaatgaaatcgtggcgaatgtggggaaaagagaaatcttgcacaatactgagaaagaacaacacacagaggacacagtgaaggactgtgtggacatagaggtattccctgctggtgagaataccgaggaccagaaatcctctgaagacactgccccattcctaggaaccttagcaggtgctacctatgaggaacaggttcaaagccaaattcttgagagcagttctctccctgaaaacacagtacaggttgagtcaaatgaggtcatgggtgcaccagatgacaggaccagaactccccttgagccatccaactgttggagtgacttagatggtgggaaccacacagagaatgtgggagaggcagcagtgactcaggttgaagagcaggcaggcacagtggcctcgtgtcctttagggcatagtgatgacacagtttatcatgatgacaaatgtatggtagaggtcccccaagagttagagacaagcacagggcatagtttagagaaagaattcaccaaccaggaagcagctgagcccaaggaggttccagcgcacagtacagaagtaggtagggatcacaacgaagaagagggtgaagaaacaggattaagggacgagaaaccaatcaagacagaagttcctggttctccagcaggaactgagggcaactgtcaggaagcgacaggtccaagtacagtagacactcaaaatgaacccttagatatgaaagagcccgatgaagaaaagagtgaccaacagggagaggcattggactcatcgcagaagaagacaaagaacaagaaaaagaaaaacaagaagaaaaaatccccagtacccgtagaaacccttaaagatgttaaaaaagagttaacgtatcagaacacagatttaagtgaaattaaggaagaagagcaggtaaagtctactgacagaaagtcagcagtggaagcccaaaacgaggtgactgaaaatccaaaacagaaaattgcagcagaaagcagtgaaaatgttgattgtccggagaatcctaaaattaagttggatggaaaacttgaccaagaaggtgatgatgtacaaacagcagctgaggaggtactagctgatggagacacattagattttgaggatgacaccgttcaatcatcaggcccgagggctggtggtgaagaattagatgaaggtgttgcaaaagataatgctaaaatagatggtgccactcaaagcagtcctgcagaaccaaagagcgaagacgcagatcgctgcaccctgcccgaacatgaaagtccctcacaggacattagtgatgcctgtgaagcagaaagtacagagaggtgtgagatgtcagaacatccaagtcagaccgtcaggaaagctttagacagcaatagcctagagaacgatgacttgtcggcaccaggaagagagccagggcacttcaatccagaaagcagagaagataccagaggagggaatgagaagggcaaaagcaaagaagactgtaccatgtcctaagctgaggcaggcggcaggcgcggtgcacaggaagtctcagtgtgaaggggtcttttctctccactgccaatgtaagtagaatgttctaaattcatagagaggcactgtatgacaattaccaggtgctctactgctttaagttatagactgttacttgtagatttccatgtaatcattgaggttatcacccagattagaaagacatatttgttatcagtgtacgttctaattgagagcattccagtagtatcaaacaataatgtctactgtttatagtccacttaataaaaatagaggcatttactatttgccttaggctgataggaatgtgggttttcttgaccaaatatatcagcatctaattgaaatgaccaaatagcattcttagacttctgtattatgaatataattgatatttaaattaatgtcttgttcacatatgtgtactttcatatttgattttaaaatgtacattataacctgtatggtattttatttaaaggagataaacagccaaatagcaaataggtcactgaatgataagatttgcaccttagaacaataatcattttaaggataacaagtaaatgtctgaaagcatgaggggctttatttgcctttacctcatatgagtctttgatcttgaaccgatacttttggatctcattgttgatatacctgaatttactttgtaagagattttaacttcacttcatgctgatgatgtatcaaattcattttatagaaagatttaaagtttttttctggaagtgatatatgtcaaattacatttcctactgcagtatttgagcagggacagtcattttttaaatgtttttggccgggcgtggtggctcatgcctgtaatctcagtacattgggaggccaaggcaggtggatcacctgaggtcaagagttcgaggccagcctggccaacatggtgaaaccctgtctctactaaaaatacaaaaaattggccgggcgtgatggtgggcgcctgtaatcccagccactccagaggctgaggcaggagaatcgcttgaacctgcgaggcagagattgcagtgagccaagatcaagccattgtactccagcctggacaacaagagcgaaactctgtctaaaaaaaaaaaaaaacacacacacacacaacacaatgttttcacgcctgtaaacctagcacattgggaagccaaggtgggaggattgcttgaggccaggagttcaaggctgcagtgagctatgattgcacactgtactctagcctgggagacagagtgagacactgtctctaaaaaaaaaaaaaaaaaaaaaaaaagtttttgaaccttaaaatactttgtttgaatttctaatcatcattcaaaagagcagtaaaaaatggttacttgttcttgtacaagctactaattagactatagtaggatattttaaagagctgaatcacttttggtattttggtataaatattttcatttgttatgtcccagtatattcttactggaaaattcttgttttgatctgcctgaagaaaatatctgttttctatataaaaaaattttttaaaataattgtaaagttagatttaaaattgtaaaatataaaatcacaaaggaatgtaccttatgaatgttgttgacattttatgaaattatgtggattcatattactgttacaagatagaattgaatgcaaaaagaccaaaacctcaataaaatttgaggaaaacgtgttattatgtaattgaaataaaaacattttataattgtgaaaaaaaaag

SEQ ID NO: 377356 - DNA, 4055 bp, Homo sapiens
ggccggggccgggccggggcggcgcgagcggctggagcaacgggccccgcggcagctgcgggcgacgcggtcgatggacatgggcacccagggatcggggcgcaagcggctccccaaccgggagcggctcacggcggaggacgacgcgctcaaccagatcgcgcgggaggtagaagagagaccagaaaaagattttactgagaaggggtctcgtaacatgccgggcctgtctgcagccacgctggcctctctgggtgggacttcctctcggagaggcagcggagacacctccatctccatcgacaccgaggcatccatcagggaaatcaaggactctctagcagaagttgaagagaaatataagaaggctatggtttccaatgctcagctagacaatgaaaagacaaacttcatgtaccaggttgataccctaaaagatatgttgctggagcttgaagaacagctggctgaatctaggcggcagtacgaagagaaaaacaaagaatttgaaagggaaaaacacgcccacagtatactgcaatttcagtttgctgaagtcaaggaggccctgaagcaaagagaggaaatgctcgagaaacatggaataatcctaaattcagaaatagctaccaatggagagacttccgacaccctcaataatgttggataccaaggtcctaccaagatgacaaaagaagagttaaatgccctcaagtcgacaggggatgggaccctaggaagagccagtgaagtggaggtgaaaaatgaaatcgtggcgaatgtggggaaaagagaaatcttgcacaatactgagaaagaacaacacacagaggacacagtgaaggactgtgtggacatagaggtattccctgctggtgagaataccgaggaccagaaatcctctgaagacactgccccattcctaggaaccttagcaggtgctacctatgaggaacaggttcaaagccaaattcttgagagcagttctctccctgaaaacacagtacaggttgagtcaaatgaggtcatgggtgcaccagatgacaggaccagaactccccttgagccatccaactgttggagtgacttagatggtgggaaccacacagagaatgtgggagaggcagcagtgactcaggttgaagagcaggcaggcacagtggcctcgtgtcctttagggcatagtgatgacacagtttatcatgatgacaaatgtatggtagaggtcccccaagagttagagacaagcacagggcatagtttagagaaagaattcaccaaccaggaagcagctgagcccaaggaggttccagcgcacagtacagaagtaggtagggatcacaacgaagaagagggtgaagaaacaggattaagggacgagaaaccaatcaagacagaagttcctggttctccagcaggaactgagggcaactgtcaggaagcgacaggtccaagtacagtagacactcaaaatgaacccttagatatgaaagagcccgatgaagaaaagagtgaccaacagggagaggcattggactcatcgcagaagaagacaaagaacaagaaaaagaaaaacaagaagaaaaaatccccagtacccgtagaaacccttaaagatgttaaaaaagagttaacgtatcagaacacagatttaagtgaaattaaggaagaagagcaggtaaagtctactgacagaaagtcagcagtggaagcccaaaacgaggtgactgaaaatccaaaacagaaaattgcagcagaaagcagtgaaaatgttgattgtccggagaatcctaaaattaagttggatggaaaacttgaccaagaaggtgatgatgtacaaacagcagctgaggaggtactagctgatggagacacattagattttgaggatgacaccgttcaatcatcaggcccgagggctggtggtgaagaattagatgaaggtgttgcaaaagataatgctaaaatagatggtgccactcaaagcagtcctgcagaaccaaagagcgaagacgcagatcgctgcaccctgcccgaacatgaaagtccctcacaggacattagtgatgcctgtgaagcagaaagtacagagaggtgtgagatgtcagaacatccaagtcagaccgtcaggaaagctttagacagcaatagcctagagaacgatgacttgtcggcaccaggaagagagccagggcacttcaatccagaaagcagagaagataccagaggagggaatgagaagggcaaaagcaaagaagactgtaccatgtcctaagctgaggcaggcggcaggcgcggtgcacaggaagtctcagtgtgaaggggtcttttctctccactgccaatgtaagtagaatgttctaaattcatagagaggcactgtatgacaattaccaggtgctctactgctttaagttatagactgttacttgtagatttccatgtaatcattgaggttatcacccagattagaaagacatatttgttatcagtgtacgttctaattgagagcattccagtagtatcaaacaataatgtctactgtttatagtccacttaataaaaatagaggcatttactatttgccttaggctgataggaatgtgggttttcttgaccaaatatatcagcatctaattgaaatgaccaaatagcattcttagacttctgtattatgaatataattgatatttaaattaatgtcttgttcacatatgtgtactttcatatttgattttaaaatgtacattataacctgtatggtattttatttaaaggagataaacagccaaatagcaaataggtcactgaatgataagatttgcaccttagaacaataatcattttaaggataacaagtaaatgtctgaaagcatgaggggctttatttgcctttacctcatatgagtctttgatcttgaaccgatacttttggatctcattgttgatatacctgaatttactttgtaagagattttaacttcacttcatgctgatgatgtatcaaattcattttatagaaagatttaaagtttttttctggaagtgatatatgtcaaattacatttcctactgcagtatttgagcagggacagtcattttttaaatgtttttggccgggcgtggtggctcatgcctgtaatctcagtacattgggaggccaaggcaggtggatcacctgaggtcaagagttcgaggccagcctggccaacatggtgaaaccctgtctctactaaaaatacaaaaaattggccgggcgtgatggtgggcgcctgtaatcccagccactccagaggctgaggcaggagaatcgcttgaacctgcgaggcagagattgcagtgagccaagatcaagccattgtactccagcctggacaacaagagcgaaactctgtctaaaaaaaaaaaaaaacacacacacacacaacacaatgttttcacgcctgtaaacctagcacattgggaagccaaggtgggaggattgcttgaggccaggagttcaaggctgcagtgagctatgattgcacactgtactctagcctgggagacagagtgagacactgtctctaaaaaaaaaaaaaaaaaaaaaaaaagtttttgaaccttaaaatactttgtttgaatttctaatcatcattcaaaagagcagtaaaaaatggttacttgttcttgtacaagctactaattagactatagtaggatattttaaagagctgaatcacttttggtattttggtataaatattttcatttgttatgtcccagtatattcttactggaaaattcttgttttgatctgcctgaagaaaatatctgttttctatataaaaaaattttttaaaataattgtaaagttagatttaaaattgtaaaatataaaatcacaaaggaatgtaccttatgaatgttgttgacattttatgaaattatgtggattcatattactgttacaagatagaattgaatgcaaaaagaccaaaacctcaataaaatttgaggaaaacgtgttattatgtaattgaaataaaaacattttataattgtgaaaaaaaaag

SEQ ID NO: 377357 - DNA, 4559 bp, Homo sapiens
ccgtgggacgggcggaggcgcccgagtcccgcttccccggcgcccttccaccccgagcccgactcagcccgcggccacctgcgccccgcccctgtcggccgcgcccgagcccagcgccgcgagccgctccccggcgggctggctcctggccccggaagcgcgagcgttcacttagcggcgagtggctccgtctccgcggacagagcgcgcgccccctggcccggcccgcgaggggctcccggcgcggtccccgagcatttcccgccgggtggagcgggccgagcccggcaggatgaccagccccgcggccgctcaaagccgggagatcgactgtttgagcccggaagcgcagaagctggcggaagcccggctcgctgcaaaacgggcggcccgcgcggaggctcgcgagatccgcatgaaggagctggagcggcagcagaaggaggaagacagtgagcgctactctcgtagatccagaagaaacacatcggcttctgatgaagacgagcgcatgtcagtgggtagtcgtggaagcctgaggacaaatggttatgatggagaattgtatggatcacagtccctgaatagaagatctggcagggtagaagagagaccagaaaaagattttactgagaaggggtctcgtaacatgccgggcctgtctgcagccacgctggcctctctgggtgggacttcctctcggagaggcagcggagacacctccatctccatcgacaccgaggcatccatcagggaaatcaaggaactcaatgagttaaaggaccagattcaggatgtagaaggcaaatacatgcagggattgaaagagatgaaggactctctagcagaagttgaagagaaatataagaaggctatggtttccaatgctcagctagacaatgaaaagacaaacttcatgtaccaggttgataccctaaaagatatgttgctggagcttgaagaacagctggctgaatctaggcggcagtacgaagagaaaaacaaagaatttgaaagggaaaaacacgcccacagtatactgcaatttcagtttgctgaagtcaaggaggccctgaagcaaagagaggaaatgctcgagaaacatggaataatcctaaattcagaaatagctaccaatggagagacttccgacaccctcaataatgttggataccaaggtcctaccaagatgacaaaagaagagttaaatgccctcaagtcgacaggggatgggaccctaggaagagccagtgaagtggaggtgaaaaatgaaatcgtggcgaatgtggggaaaagagaaatcttgcacaatactgagaaagaacaacacacagaggacacagtgaaggactgtgtggacatagaggtattccctgctggtgagaataccgaggaccagaaatcctctgaagacactgccccattcctaggaaccttagcaggtgctacctatgaggaacaggttcaaagccaaattcttgagagcagttctctccctgaaaacacagtacaggttgagtcaaatgaggtcatgggtgcaccagatgacaggaccagaactccccttgagccatccaactgttggagtgacttagatggtgggaaccacacagagaatgtgggagaggcagcagtgactcaggttgaagagcaggcaggcacagtggcctcgtgtcctttagggcatagtgatgacacagtttatcatgatgacaaatgtatggtagaggtcccccaagagttagagacaagcacagggcatagtttagagaaagaattcaccaaccaggaagcagctgagcccaaggaggttccagcgcacagtacagaagtaggtagggatcacaacgaagaagagggtgaagaaacaggattaagggacgagaaaccaatcaagacagaagttcctggttctccagcaggaactgagggcaactgtcaggaagcgacaggtccaagtacagtagacactcaaaatgaacccttagatatgaaagagcccgatgaagaaaagagtgaccaacagggagaggcattggactcatcgcagaagaagacaaagaacaagaaaaagaaaaacaagaagaaaaaatccccagtacccgtagaaacccttaaagatgttaaaaaagagttaacgtatcagaacacagatttaagtgaaattaaggaagaagagcaggtaaagtctactgacagaaagtcagcagtggaagcccaaaacgaggtgactgaaaatccaaaacagaaaattgcagcagaaagcagtgaaaatgttgattgtccggagaatcctaaaattaagttggatggaaaacttgaccaagaaggtgatgatgtacaaacagcagctgaggaggtactagctgatggagacacattagattttgaggatgacaccgttcaatcatcaggcccgagggctggtggtgaagaattagatgaaggtgttgcaaaagataatgctaaaatagatggtgccactcaaagcagtcctgcagaaccaaagagcgaagacgcagatcgctgcaccctgcccgaacatgaaagtccctcacaggacattagtgatgcctgtgaagcagaaagtacagagaggtgtgagatgtcagaacatccaagtcagaccgtcaggaaagctttagacagcaatagcctagagaacgatgacttgtcggcaccaggaagagagccagggcacttcaatccagaaagcagagaagataccagaggagggaatgagaagggcaaaagcaaagaagactgtaccatgtcctaagctgaggcaggcggcaggcgcggtgcacaggaagtctcagtgtgaaggggtcttttctctccactgccaatgtaagtagaatgttctaaattcatagagaggcactgtatgacaattaccaggtgctctactgctttaagttatagactgttacttgtagatttccatgtaatcattgaggttatcacccagattagaaagacatatttgttatcagtgtacgttctaattgagagcattccagtagtatcaaacaataatgtctactgtttatagtccacttaataaaaatagaggcatttactatttgccttaggctgataggaatgtgggttttcttgaccaaatatatcagcatctaattgaaatgaccaaatagcattcttagacttctgtattatgaatataattgatatttaaattaatgtcttgttcacatatgtgtactttcatatttgattttaaaatgtacattataacctgtatggtattttatttaaaggagataaacagccaaatagcaaataggtcactgaatgataagatttgcaccttagaacaataatcattttaaggataacaagtaaatgtctgaaagcatgaggggctttatttgcctttacctcatatgagtctttgatcttgaaccgatacttttggatctcattgttgatatacctgaatttactttgtaagagattttaacttcacttcatgctgatgatgtatcaaattcattttatagaaagatttaaagtttttttctggaagtgatatatgtcaaattacatttcctactgcagtatttgagcagggacagtcattttttaaatgtttttggccgggcgtggtggctcatgcctgtaatctcagtacattgggaggccaaggcaggtggatcacctgaggtcaagagttcgaggccagcctggccaacatggtgaaaccctgtctctactaaaaatacaaaaaattggccgggcgtgatggtgggcgcctgtaatcccagccactccagaggctgaggcaggagaatcgcttgaacctgcgaggcagagattgcagtgagccaagatcaagccattgtactccagcctggacaacaagagcgaaactctgtctaaaaaaaaaaaaaaacacacacacacacaacacaatgttttcacgcctgtaaacctagcacattgggaagccaaggtgggaggattgcttgaggccaggagttcaaggctgcagtgagctatgattgcacactgtactctagcctgggagacagagtgagacactgtctctaaaaaaaaaaaaaaaaaaaaaaaaagtttttgaaccttaaaatactttgtttgaatttctaatcatcattcaaaagagcagtaaaaaatggttacttgttcttgtacaagctactaattagactatagtaggatattttaaagagctgaatcacttttggtattttggtataaatattttcatttgttatgtcccagtatattcttactggaaaattcttgttttgatctgcctgaagaaaatatctgttttctatataaaaaaattttttaaaataattgtaaagttagatttaaaattgtaaaatataaaatcacaaaggaatgtaccttatgaatgttgttgacattttatgaaattatgtggattcatattactgttacaagatagaattgaatgcaaaaagaccaaaacctcaataaaatttgaggaaaacgtgttattatgtaattgaaataaaaacattttataattgtgaaaaaaaaag

SEQ ID NO: 377358 - DNA, 4381 bp, Homo sapiens
caagggtgtgaggcacgtgagggcatcgccatgcgtattttacaggcctctttctctggactgtccttcaaagggaatgacctttgtctttccaggacctacccagtgagatctgcctgccattttcctatgagtcaaaaatctgaactcactactgctcctttcctggttcataagccagagtagggctggttggcagtcactggcttgtggccctatgtaattatctcagccatcacacactggctctttcacaagggctggtcacacgcctcgagtgattcttcagaaatctgttgaacagcctgacacccagccctaggacgctgtgctggggggattccccagctactgagtggggccagagactctactgcctctgtgaccacatccctttccatactggtatctcgtttgttctaatgagtgtgtccattgcttttaatagtgaattttctgagcaatgagaatttgaccaaattgaaaagggggatttccatgcatttgaaattgccatgtgtttcttcttctgatccatttgctctaagaaatatagtctaagtttaggactgagggtttttttttaacagaatactgaatgattctttgttttgatttttttattgcaatttcaaaaatatgacctgctttccacaggactctctagcagaagttgaagagaaatataagaaggctatggtttccaatgctcagctagacaatgaaaagacaaacttcatgtaccaggttgataccctaaaagatatgttgctggagcttgaagaacagctggctgaatctaggcggcagtacgaagagaaaaacaaagaatttgaaagggaaaaacacgcccacagtatactgcaatttcagtttgctgaagtcaaggaggccctgaagcaaagagaggaaatgctcgagaaacatggaataatcctaaattcagaaatagctaccaatggagagacttccgacaccctcaataatgttggataccaaggtcctaccaagatgacaaaagaagagttaaatgccctcaagtcgacaggggatgggaccctaggaagagccagtgaagtggaggtgaaaaatgaaatcgtggcgaatgtggggaaaagagaaatcttgcacaatactgagaaagaacaacacacagaggacacagtgaaggactgtgtggacatagaggtattccctgctggtgagaataccgaggaccagaaatcctctgaagacactgccccattcctaggaaccttagcaggtgctacctatgaggaacaggttcaaagccaaattcttgagagcagttctctccctgaaaacacagtacaggttgagtcaaatgaggtcatgggtgcaccagatgacaggaccagaactccccttgagccatccaactgttggagtgacttagatggtgggaaccacacagagaatgtgggagaggcagcagtgactcaggttgaagagcaggcaggcacagtggcctcgtgtcctttagggcatagtgatgacacagtttatcatgatgacaaatgtatggtagaggtcccccaagagttagagacaagcacagggcatagtttagagaaagaattcaccaaccaggaagcagctgagcccaaggaggttccagcgcacagtacagaagtaggtagggatcacaacgaagaagagggtgaagaaacaggattaagggacgagaaaccaatcaagacagaagttcctggttctccagcaggaactgagggcaactgtcaggaagcgacaggtccaagtacagtagacactcaaaatgaacccttagatatgaaagagcccgatgaagaaaagagtgaccaacagggagaggcattggactcatcgcagaagaagacaaagaacaagaaaaagaaaaacaagaagaaaaaatccccagtacccgtagaaacccttaaagatgttaaaaaagagttaacgtatcagaacacagatttaagtgaaattaaggaagaagagcaggtaaagtctactgacagaaagtcagcagtggaagcccaaaacgaggtgactgaaaatccaaaacagaaaattgcagcagaaagcagtgaaaatgttgattgtccggagaatcctaaaattaagttggatggaaaacttgaccaagaaggtgatgatgtacaaacagcagctgaggaggtactagctgatggagacacattagattttgaggatgacaccgttcaatcatcaggcccgagggctggtggtgaagaattagatgaaggtgttgcaaaagataatgctaaaatagatggtgccactcaaagcagtcctgcagaaccaaagagcgaagacgcagatcgctgcaccctgcccgaacatgaaagtccctcacaggacattagtgatgcctgtgaagcagaaagtacagagaggtgtgagatgtcagaacatccaagtcagaccgtcaggaaagctttagacagcaatagcctagagaacgatgacttgtcggcaccaggaagagagccagggcacttcaatccagaaagcagagaagataccagaggagggaatgagaagggcaaaagcaaagaagactgtaccatgtcctaagctgaggcaggcggcaggcgcggtgcacaggaagtctcagtgtgaaggggtcttttctctccactgccaatgtaagtagaatgttctaaattcatagagaggcactgtatgacaattaccaggtgctctactgctttaagttatagactgttacttgtagatttccatgtaatcattgaggttatcacccagattagaaagacatatttgttatcagtgtacgttctaattgagagcattccagtagtatcaaacaataatgtctactgtttatagtccacttaataaaaatagaggcatttactatttgccttaggctgataggaatgtgggttttcttgaccaaatatatcagcatctaattgaaatgaccaaatagcattcttagacttctgtattatgaatataattgatatttaaattaatgtcttgttcacatatgtgtactttcatatttgattttaaaatgtacattataacctgtatggtattttatttaaaggagataaacagccaaatagcaaataggtcactgaatgataagatttgcaccttagaacaataatcattttaaggataacaagtaaatgtctgaaagcatgaggggctttatttgcctttacctcatatgagtctttgatcttgaaccgatacttttggatctcattgttgatatacctgaatttactttgtaagagattttaacttcacttcatgctgatgatgtatcaaattcattttatagaaagatttaaagtttttttctggaagtgatatatgtcaaattacatttcctactgcagtatttgagcagggacagtcattttttaaatgtttttggccgggcgtggtggctcatgcctgtaatctcagtacattgggaggccaaggcaggtggatcacctgaggtcaagagttcgaggccagcctggccaacatggtgaaaccctgtctctactaaaaatacaaaaaattggccgggcgtgatggtgggcgcctgtaatcccagccactccagaggctgaggcaggagaatcgcttgaacctgcgaggcagagattgcagtgagccaagatcaagccattgtactccagcctggacaacaagagcgaaactctgtctaaaaaaaaaaaaaaacacacacacacacaacacaatgttttcacgcctgtaaacctagcacattgggaagccaaggtgggaggattgcttgaggccaggagttcaaggctgcagtgagctatgattgcacactgtactctagcctgggagacagagtgagacactgtctctaaaaaaaaaaaaaaaaaaaaaaaaagtttttgaaccttaaaatactttgtttgaatttctaatcatcattcaaaagagcagtaaaaaatggttacttgttcttgtacaagctactaattagactatagtaggatattttaaagagctgaatcacttttggtattttggtataaatattttcatttgttatgtcccagtatattcttactggaaaattcttgttttgatctgcctgaagaaaatatctgttttctatataaaaaaattttttaaaataattgtaaagttagatttaaaattgtaaaatataaaatcacaaaggaatgtaccttatgaatgttgttgacattttatgaaattatgtggattcatattactgttacaagatagaattgaatgcaaaaagaccaaaacctcaataaaatttgaggaaaacgtgttattatgtaattgaaataaaaacattttataattgtgaaaaaaaaag

SEQ ID NO: 377359 - DNA, 2998 bp, Homo sapiens
  misc_feature (2825)..(2825): n is a, c, g, or t
  misc_feature (2866)..(2866): n is a, c, g, or t
ccgtgggacgggcggaggcgcccgagtcccgcttccccggcgcccttccaccccgagcccgactcagcccgcggccacctgcgccccgcccctgtcggccgcgcccgagcccagcgccgcgagccgctccccggcgggctggctcctggccccggaagcgcgagcgttcacttagcggcgagtggctccgtctccgcggacagagcgcgcgccccctggcccggcccgcgaggggctcccggcgcggtccccgagcatttcccgccgggtggagcgggccgagcccggcaggatgaccagccccgcggccgctcaaagccgggagatcgactgtttgagcccggaagcgcagaagctggcggaagcccggctcgctgcaaaacgggcggcccgcgcggaggctcgcgagatccgcatgaaggagctggagcggcagcagaaggaggtagaagagagaccagaaaaagattttactgagaaggggtctcgtaacatgccgggcctgtctgcagccacgctggcctctctgggtgggacttcctctcggagaggcagcggagacacctccatctccatcgacaccgaggcatccatcagggaaatcaaggactctctagcagaagttgaagagaaatataagaaggctatggtttccaatgctcagctagacaatgaaaagacaaacttcatgtaccaggttgataccctaaaagatatgttgctggagcttgaagaacagctggctgaatctaggcggcagtacgaagagaaaaacaaagaatttgaaagggaaaaacacgcccacagtatactgcaatttcagtttgctgaagtcaaggaggccctgaagcaaagagaggaaatgctcgagaaacatggaataatcctaaattcagaaatagctaccaatggagagacttccgacaccctcaataatgttggataccaaggtcctaccaagatgacaaaagaagagttaaatgccctcaagtcgacaggggatgggaccctaggaagagccagtgaagtggaggtgaaaaatgaaatcgtggcgaatgtggggaaaagagaaatcttgcacaatactgagaaagaacaacacacagaggacacagtgaaggactgtgtggacatagaggtattccctgctggtgagaataccgaggaccagaaatcctctgaagacactgccccattcctaggaaccttagcaggtgctacctatgaggaacaggttcaaagccaaattcttgagagcagttctctccctgaaaacacagtacaggttgagtcaaatgaggtcatgggtgcaccagatgacaggaccagaactccccttgagccatccaactgttggagtgacttagatggtgggaaccacacagagaatgtgggagaggcagcagtgactcaggttgaagagcaggcaggcacagtggcctcgtgtcctttagggcatagtgatgacacagtttatcatgatgacaaatgtatggtagaggtcccccaagagttagagacaagcacagggcatagtttagagaaagaattcaccaaccaggaagcagctgagcccaaggaggttccagcgcacagtacagaagtaggtagggatcacaacgaagaagagggtgaagaaacaggattaagggacgagaaaccaatcaagacagaagttcctggttctccagcaggaactgagggcaactgtcaggaagcgacaggtccaagtacagtagacactcaaaatgaacccttagatatgaaagagcccgatgaagaaaagagtgaccaacagggagaggcattggactcatcgcagaagaagacaaagaacaagaaaaagaaaaacaagaagaaaaaatccccagtacccgtagaaacccttaaagatgttaaaaaagagttaacgtatcagaacacagatttaagtgaaattaaggaagaagagcaggtaaagtctactgacagaaagtcagcagtggaagcccaaaacgaggtgactgaaaatccaaaacagaaaattgcagcagaaagcagtgaaaatgttgattgtccggagaatcctaaaattaagttggatggaaaacttgaccaagaaggtgatgatgtacaaacagcagctgaggaggtactagctgatggagacacattagattttgaggatgacaccgttcaatcatcaggcccgagggctggtggtgaagaattagatgaaggtgttgcaaaagataatgctaaaatagatggtgccactcaaagcagtcctgcagaaccaaagagcgaagacgcagatcgctgcaccctgcccgaacatgaaagtccctcacaggacattagtgatgcctgtgaagcagaaagtacagagaggtgtgagatgtcagaacatccaagtcagaccgtcaggaaagctttagacagcaatagcctagagaacgatgacttgtcggcaccaggaagagagccagggcacttcaatccagaaagcagagaagataccagaggagggaatgagaagggcaaaagcaaagaagactgtaccatgtcctaagctgaggcaggcggcaggcgcggtgcacaggaagtctcagtgtgaaggggtcttttctctccactgccaatgtaagtagaatgttctaaattcatagagaggcactgtatgacaattaccaggtgctctactgctttaagttatagactgttacttgtagatttccatgtaatcattgaggttatcacccagattagaaagacatatttgttatcagtgtacgttctaattgagagcattctacttacattggcagtggagacgaaaagacccncttcacactgtagacttcctgctgcaccgcggcctgccgcnctgcctctagcttaggacatggtacacgtcttctttgcgttttgccacttctcattcccatcctctgagtatctatctctcgctttcacgcaatctgccggcggatcctcctagaagtcgacctcgcgaggc

SEQ ID NO: 377360 - DNA, 2770 bp, Homo sapiens
ccgtgggacgggcggaggcgcccgagtcccgcttccccggcgcccttccaccccgagcccgactcagcccgcggccacctgcgccccgcccctgtcggccgcgcccgagcccagcgccgcgagccgctccccggcgggctggctcctggccccggaagcgcgagcgttcacttagcggcgagtggctccgtctccgcggacagagcgcgcgccccctggcccggcccgcgaggggctcccggcgcggtccccgagcatttcccgccgggtggagcgggccgagcccggcaggatgaccagccccgcggccgctcaaagccgggagatcgactgtttgagcccggaagcgcagaagctggcggaagcccggctcgctgcaaaacgggcggcccgcgcggaggctcgcgagatccgcatgaaggagctggagcggcagcagaaggaggtagaagagagaccagaaaaagattttactgagaaggggtctcgtaacatgccgggcctgtctgcagccacgctggcctctctgggtgggacttcctctcggagaggcagcggagacacctccatctccatcgacaccgaggcatccatcagggaaatcaaggactctctagcagaagttgaagagaaatataagaaggctatggtttccaatgctcagctagacaatgaaaagacaaacttcatgtaccaggttgataccctaaaagatatgttgctggagcttgaagaacagctggctgaatctaggcggcagtacgaagagaaaaacaaagaatttgaaagggaaaaacacgcccacagtatactgcaatttcagtttgctgaagtcaaggaggccctgaagcaaagagaggaaatgctcgagaaacatggaataatcctaaattcagaaatagctaccaatggagagacttccgacaccctcaataatgttggataccaaggtcctaccaagatgacaaaagaagagttaaatgccctcaagtcgacaggggatgggaccctaggaagagccagtgaagtggaggtgaaaaatgaaatcgtggcgaatgtggggaaaagagaaatcttgcacaatactgagaaagaacaacacacagaggacacagtgaaggactgtgtggacatagaggtattccctgctggtgagaataccgaggaccagaaatcctctgaagacactgccccattcctaggaaccttagcaggtgctacctatgaggaacaggttcaaagccaaattcttgagagcagttctctccctgaaaacacagtacaggttgagtcaaatgaggtcatgggtgcaccagatgacaggaccagaactccccttgagccatccaactgttggagtgacttagatggtgggaaccacacagagaatgtgggagaggcagcagtgactcaggttgaagagcaggcaggcacagtggcctcgtgtcctttagggcatagtgatgacacagtttatcatgatgacaaatgtatggtagaggtcccccaagagttagagacaagcacagggcatagtttagagaaagaattcaccaaccaggaagcagctgagcccaaggaggttccagcgcacagtacagaagtaggtagggatcacaacgaagaagagggtgaagaaacaggattaagggacgagaaaccaatcaagacagaagttcctggttctccagcaggaactgagggcaactgtcaggaagcgacaggtccaagtacagtagacactcaaaatgaacccttagatatgaaagagcccgatgaagaaaagagtgaccaacagggagaggcattggactcatcgcagaagaagacaaagaacaagaaaaagaaaaacaagaagaaaaaatccccagtacccgtagaaacccttaaagatgttaaaaaagagttaacgtatcagaacacagatttaagtgaaattaaggaagaagagcaggtaaagtctactgacagaaagtcagcagtggaagcccaaaacgaggtgactgaaaatccaaaacagaaaattgcagcagaaagcagtgaaaatgttgattgtccggagaatcctaaaattaagttggatggaaaacttgaccaagaaggtgatgatgtacaaacagcagctgaggaggtactagctgatggagacacattagattttgaggatgacaccgttcaatcatcaggcccgagggctggtggtgaagaattagatgaaggtgttgcaaaagataatgctaaaatagatggtgccactcaaagcagtcctgcagaaccaaagagcgaagacgcagatcgctgcaccctgcccgaacatgaaagtccctcacaggacattagtgatgcctgtgaagcagaaagtacagagaggtgtgagatgtcagaacatccaagtcagaccgtcaggaaagctttagacagcaatagcctagagaacgatgacttgtcggcaccaggaagagagccagggcacttcaatccagaaagcagagaagataccagaggagggaatgagaagggcaaaagcaaagaagactgtaccatgtcctaagctgaggcaggcggcaggcgcggtgcacaggaagtctcagtgtgaaggggtcttttctctccactgccaatgtaagtagaatgttctaaattagaacgtacactgataacaaatatgtctttctaatctgggtgataacctcaatgattacatggaaatctacaagtaacagtctatactaagcagtagagcacctggtaatgtcatacagagcggagc

SEQ ID NO: 377361 - DNA, 2587 bp, Homo sapiens
  misc_feature (2546)..(2546): n is a, c, g, or t
ccgtgggacgggcggaggcgcccgagtcccgcttccccggcgcccttccaccccgagcccgactcagcccgcggccacctgcgccccgcccctgtcggccgcgcccgagcccagcgccgcgagccgctccccggcgggctggctcctggccccggaagcgcgagcgttcacttagcggcgagtggctccgtctccgcggacagagcgcgcgccccctggcccggcccgcgaggggctcccggcgcggtccccgagcatttcccgccgggtggagcgggccgagcccggcaggatgaccagccccgcggccgctcaaagccgggagatcgactgtttgagcccggaagcgcagaagctggcggaagcccggctcgctgcaaaacgggcggcccgcgcggaggctcgcgagatccgcatgaaggagctggagcggcagcagaaggaggtagaagagagaccagaaaaagattttactgagaaggggtctcgtaacatgccgggcctgtctgcagccacgctggcctctctgggtgggacttcctctcggagaggcagcggagacacctccatctccatcgacaccgaggcatccatcagggaaatcaaggactctctagcagaagttgaagagaaatataagaaggctatggtttccaatgctcagctagacaatgaaaagacaaacttcatgtaccaggttgataccctaaaagatatgttgctggagcttgaagaacagctggctgaatctaggcggcagtacgaagagaaaaacaaagaatttgaaagggaaaaacacgcccacagtatactgcaatttcagtttgctgaagtcaaggaggccctgaagcaaagagaggaaatgctcgagaaacatggaataatcctaaattcagaaatagctaccaatggagagacttccgacaccctcaataatgttggataccaaggtcctaccaagatgacaaaagaagagttaaatgccctcaagtcgacaggggatgggaccctaggaagagccagtgaagtggaggtgaaaaatgaaatcgtggcgaatgtggggaaaagagaaatcttgcacaatactgagaaagaacaacacacagaggacacagtgaaggactgtgtggacatagaggtattccctgctggtgagaataccgaggaccagaaatcctctgaagacactgccccattcctaggaaccttagcaggtgctacctatgaggaacaggttcaaagccaaattcttgagagcagttctctccctgaaaacacagtacaggttgagtcaaatgaggtcatgggtgcaccagatgacaggaccagaactccccttgagccatccaactgttggagtgacttagatggtgggaaccacacagagaatgtgggagaggcagcagtgactcaggttgaagagcaggcaggcacagtggcctcgtgtcctttagggcatagtgatgacacagtttatcatgatgacaaatgtatggtagaggtcccccaagagttagagacaagcacagggcatagtttagagaaagaattcaccaaccaggaagcagctgagcccaaggaggttccagcgcacagtacagaagtaggtagggatcacaacgaagaagagggtgaagaaacaggattaagggacgagaaaccaatcaagacagaagttcctggttctccagcaggaactgagggcaactgtcaggaagcgacaggtccaagtacagtagacactcaaaatgaacccttagatatgaaagagcccgatgaagaaaagagtgaccaacagggagaggcattggactcatcgcagaagaagacaaagaacaagaaaaagaaaaacaagaagaaaaaatccccagtacccgtagaaacccttaaagatgttaaaaaagagttaacgtatcagaacacagatttaagtgaaattaaggaagaagagcaggtaaagtctactgacagaaagtcagcagtggaagcccaaaacgaggtgactgaaaatccaaaacagaaaattgcagcagaaagcagtgaaaatgttgattgtccggagaatcctaaaattaagttggatggaaaacttgaccaagaaggtgatgatgtacaaacagcagctgaggaggtactagctgatggagacacattagattttgaggatgacaccgttcaatcatcaggcccgagggctggtggtgaagaattagatgaaggtgttgcaaaagataatgctaaaatagatggtgccactcaaagcagtcctgcagaaccaaagagcgaagacgcagatcgctgcaccctgcccgaacatgaaagtccctcacaggacattagtgatgcctgtgaagcagaaagtacagagaggtgtgagatgtcagaacatccaagtcagaccgtcaggaaagctttagacagcaatagcctagagaacgatgacttgtcggcaccaggaagagagccagggcacttcaatccatagcagtccagaggaggattggagggaaagcaagaaactgtccatgtctaactaagacgcggancccgggacggtgtgaattacaggcctctggttaacggctgg

SEQ ID NO: 377362 - DNA, 4018 bp, Homo sapiens
taggaccacttcatttatctgagatgatggataccaagaatcagtgtataaaaatagtctaaatggctacaacagccgtcctgggaggtgcttaagcaatcccttttctttactgacccctcattcaagtggagactttgcgtaactctaacgcagctgtgaacacgcagacaaagctagaaagtgatgcaaatatagtaacctctggggccccgtgctgtgtccgtgtgcttcaagatgcgcatgtctttcatggagtatgaacagtaacatttcttggattatatatactaagcgaaaagcttaatacttggattttgttagtatctttaggcagagtctctttaatgtctagagtccactagtgttttagatggtagaagcctccttctggttcctgcttctgaagtaacttgctcatctgtgcaaatcttcttctttctcttggctctgctgcacactcaggcattagagaggcagaaagagttctttgattccgtaaggagtgaacgggatgatcttagagaagaagtagtcatgctgaaagaggaattaaagaaacatggaataatcctaaattcagaaatagctaccaatggagagacttccgacaccctcaataatgttggataccaaggtcctaccaagatgacaaaagaagagttaaatgccctcaagtcgacaggggatgggaccctaggaagagccagtgaagtggaggtgaaaaatgaaatcgtggcgaatgtggggaaaagagaaatcttgcacaatactgagaaagaacaacacacagaggacacagtgaaggactgtgtggacatagaggtattccctgctggtgagaataccgaggaccagaaatcctctgaagacactgccccattcctaggaaccttagcaggtgctacctatgaggaacaggttcaaagccaaattcttgagagcagttctctccctgaaaacacagtacaggttgagtcaaatgaggtcatgggtgcaccagatgacaggaccagaactccccttgagccatccaactgttggagtgacttagatggtgggaaccacacagagaatgtgggagaggcagcagtgactcaggttgaagagcaggcaggcacagtggcctcgtgtcctttagggcatagtgatgacacagtttatcatgatgacaaatgtatggtagaggtcccccaagagttagagacaagcacagggcatagtttagagaaagaattcaccaaccaggaagcagctgagcccaaggaggttccagcgcacagtacagaagtaggtagggatcacaacgaagaagagggtgaagaaacaggattaagggacgagaaaccaatcaagacagaagttcctggttctccagcaggaactgagggcaactgtcaggaagcgacaggtccaagtacagtagacactcaaaatgaacccttagatatgaaagagcccgatgaagaaaagagtgaccaacagggagaggcattggactcatcgcagaagaagacaaagaacaagaaaaagaaaaacaagaagaaaaaatccccagtacccgtagaaacccttaaagatgttaaaaaagagttaacgtatcagaacacagatttaagtgaaattaaggaagaagagcaggtaaagtctactgacagaaagtcagcagtggaagcccaaaacgaggtgactgaaaatccaaaacagaaaattgcagcagaaagcagtgaaaatgttgattgtccggagaatcctaaaattaagttggatggaaaacttgaccaagaaggtgatgatgtacaaacagcagctgaggaggtactagctgatggagacacattagattttgaggatgacaccgttcaatcatcaggcccgagggctggtggtgaagaattagatgaaggtgttgcaaaagataatgctaaaatagatggtgccactcaaagcagtcctgcagaaccaaagagcgaagacgcagatcgctgcaccctgcccgaacatgaaagtccctcacaggacattagtgatgcctgtgaagcagaaagtacagagaggtgtgagatgtcagaacatccaagtcagaccgtcaggaaagctttagacagcaatagcctagagaacgatgacttgtcggcaccaggaagagagccagggcacttcaatccagaaagcagagaagataccagaggagggaatgagaagggcaaaagcaaagaagactgtaccatgtcctaagctgaggcaggcggcaggcgcggtgcacaggaagtctcagtgtgaaggggtcttttctctccactgccaatgtaagtagaatgttctaaattcatagagaggcactgtatgacaattaccaggtgctctactgctttaagttatagactgttacttgtagatttccatgtaatcattgaggttatcacccagattagaaagacatatttgttatcagtgtacgttctaattgagagcattccagtagtatcaaacaataatgtctactgtttatagtccacttaataaaaatagaggcatttactatttgccttaggctgataggaatgtgggttttcttgaccaaatatatcagcatctaattgaaatgaccaaatagcattcttagacttctgtattatgaatataattgatatttaaattaatgtcttgttcacatatgtgtactttcatatttgattttaaaatgtacattataacctgtatggtattttatttaaaggagataaacagccaaatagcaaataggtcactgaatgataagatttgcaccttagaacaataatcattttaaggataacaagtaaatgtctgaaagcatgaggggctttatttgcctttacctcatatgagtctttgatcttgaaccgatacttttggatctcattgttgatatacctgaatttactttgtaagagattttaacttcacttcatgctgatgatgtatcaaattcattttatagaaagatttaaagtttttttctggaagtgatatatgtcaaattacatttcctactgcagtatttgagcagggacagtcattttttaaatgtttttggccgggcgtggtggctcatgcctgtaatctcagtacattgggaggccaaggcaggtggatcacctgaggtcaagagttcgaggccagcctggccaacatggtgaaaccctgtctctactaaaaatacaaaaaattggccgggcgtgatggtgggcgcctgtaatcccagccactccagaggctgaggcaggagaatcgcttgaacctgcgaggcagagattgcagtgagccaagatcaagccattgtactccagcctggacaacaagagcgaaactctgtctaaaaaaaaaaaaaaacacacacacacacaacacaatgttttcacgcctgtaaacctagcacattgggaagccaaggtgggaggattgcttgaggccaggagttcaaggctgcagtgagctatgattgcacactgtactctagcctgggagacagagtgagacactgtctctaaaaaaaaaaaaaaaaaaaaaaaaagtttttgaaccttaaaatactttgtttgaatttctaatcatcattcaaaagagcagtaaaaaatggttacttgttcttgtacaagctactaattagactatagtaggatattttaaagagctgaatcacttttggtattttggtataaatattttcatttgttatgtcccagtatattcttactggaaaattcttgttttgatctgcctgaagaaaatatctgttttctatataaaaaaattttttaaaataattgtaaagttagatttaaaattgtaaaatataaaatcacaaaggaatgtaccttatgaatgttgttgacattttatgaaattatgtggattcatattactgttacaagatagaattgaatgcaaaaagaccaaaacctcaataaaatttgaggaaaacgtgttattatgtaattgaaataaaaacattttataattgtgaaaaaaaaag

SEQ ID NO: 377363 - DNA, 3755 bp, Homo sapiens
cacaggccactacctgtagttaaaaaggatgcctggtggaagtagcttgtcaccagcaaatgaaagcatggattggaacatctgagaaagaagtagcctttggaggacgatatcccagatttgtgtgtgttgaccgaatatttacgagtgctgcaccctagcatttctcttgtctctgtggagttaccctgtacttcaggaaaaaatggttttcttttttattattgtattaaaacagagtttaacctaatatcactgagtaaatattacgatgagcctatttttgttcccagaaaaacatggaataatcctaaattcagaaatagctaccaatggagagacttccgacaccctcaataatgttggataccaaggtcctaccaagatgacaaaagaagagttaaatgccctcaagtcgacaggggatgggaccctaggaagagccagtgaagtggaggtgaaaaatgaaatcgtggcgaatgtggggaaaagagaaatcttgcacaatactgagaaagaacaacacacagaggacacagtgaaggactgtgtggacatagaggtattccctgctggtgagaataccgaggaccagaaatcctctgaagacactgccccattcctaggaaccttagcaggtgctacctatgaggaacaggttcaaagccaaattcttgagagcagttctctccctgaaaacacagtacaggttgagtcaaatgaggtcatgggtgcaccagatgacaggaccagaactccccttgagccatccaactgttggagtgacttagatggtgggaaccacacagagaatgtgggagaggcagcagtgactcaggttgaagagcaggcaggcacagtggcctcgtgtcctttagggcatagtgatgacacagtttatcatgatgacaaatgtatggtagaggtcccccaagagttagagacaagcacagggcatagtttagagaaagaattcaccaaccaggaagcagctgagcccaaggaggttccagcgcacagtacagaagtaggtagggatcacaacgaagaagagggtgaagaaacaggattaagggacgagaaaccaatcaagacagaagttcctggttctccagcaggaactgagggcaactgtcaggaagcgacaggtccaagtacagtagacactcaaaatgaacccttagatatgaaagagcccgatgaagaaaagagtgaccaacagggagaggcattggactcatcgcagaagaagacaaagaacaagaaaaagaaaaacaagaagaaaaaatccccagtacccgtagaaacccttaaagatgttaaaaaagagttaacgtatcagaacacagatttaagtgaaattaaggaagaagagcaggtaaagtctactgacagaaagtcagcagtggaagcccaaaacgaggtgactgaaaatccaaaacagaaaattgcagcagaaagcagtgaaaatgttgattgtccggagaatcctaaaattaagttggatggaaaacttgaccaagaaggtgatgatgtacaaacagcagctgaggaggtactagctgatggagacacattagattttgaggatgacaccgttcaatcatcaggcccgagggctggtggtgaagaattagatgaaggtgttgcaaaagataatgctaaaatagatggtgccactcaaagcagtcctgcagaaccaaagagcgaagacgcagatcgctgcaccctgcccgaacatgaaagtccctcacaggacattagtgatgcctgtgaagcagaaagtacagagaggtgtgagatgtcagaacatccaagtcagaccgtcaggaaagctttagacagcaatagcctagagaacgatgacttgtcggcaccaggaagagagccagggcacttcaatccagaaagcagagaagataccagaggagggaatgagaagggcaaaagcaaagaagactgtaccatgtcctaagctgaggcaggcggcaggcgcggtgcacaggaagtctcagtgtgaaggggtcttttctctccactgccaatgtaagtagaatgttctaaattcatagagaggcactgtatgacaattaccaggtgctctactgctttaagttatagactgttacttgtagatttccatgtaatcattgaggttatcacccagattagaaagacatatttgttatcagtgtacgttctaattgagagcattccagtagtatcaaacaataatgtctactgtttatagtccacttaataaaaatagaggcatttactatttgccttaggctgataggaatgtgggttttcttgaccaaatatatcagcatctaattgaaatgaccaaatagcattcttagacttctgtattatgaatataattgatatttaaattaatgtcttgttcacatatgtgtactttcatatttgattttaaaatgtacattataacctgtatggtattttatttaaaggagataaacagccaaatagcaaataggtcactgaatgataagatttgcaccttagaacaataatcattttaaggataacaagtaaatgtctgaaagcatgaggggctttatttgcctttacctcatatgagtctttgatcttgaaccgatacttttggatctcattgttgatatacctgaatttactttgtaagagattttaacttcacttcatgctgatgatgtatcaaattcattttatagaaagatttaaagtttttttctggaagtgatatatgtcaaattacatttcctactgcagtatttgagcagggacagtcattttttaaatgtttttggccgggcgtggtggctcatgcctgtaatctcagtacattgggaggccaaggcaggtggatcacctgaggtcaagagttcgaggccagcctggccaacatggtgaaaccctgtctctactaaaaatacaaaaaattggccgggcgtgatggtgggcgcctgtaatcccagccactccagaggctgaggcaggagaatcgcttgaacctgcgaggcagagattgcagtgagccaagatcaagccattgtactccagcctggacaacaagagcgaaactctgtctaaaaaaaaaaaaaaacacacacacacacaacacaatgttttcacgcctgtaaacctagcacattgggaagccaaggtgggaggattgcttgaggccaggagttcaaggctgcagtgagctatgattgcacactgtactctagcctgggagacagagtgagacactgtctctaaaaaaaaaaaaaaaaaaaaaaaaagtttttgaaccttaaaatactttgtttgaatttctaatcatcattcaaaagagcagtaaaaaatggttacttgttcttgtacaagctactaattagactatagtaggatattttaaagagctgaatcacttttggtattttggtataaatattttcatttgttatgtcccagtatattcttactggaaaattcttgttttgatctgcctgaagaaaatatctgttttctatataaaaaaattttttaaaataattgtaaagttagatttaaaattgtaaaatataaaatcacaaaggaatgtaccttatgaatgttgttgacattttatgaaattatgtggattcatattactgttacaagatagaattgaatgcaaaaagaccaaaacctcaataaaatttgaggaaaacgtgttattatgtaattgaaataaaaacattttataattgtgaaaaaaaaag

SEQ ID NO: 377364 - DNA, 2181 bp, Homo sapiens
ccgtgggacgggcggaggcgcccgagtcccgcttccccggcgcccttccaccccgagcccgactcagcccgcggccacctgcgccccgcccctgtcggccgcgcccgagcccagcgccgcgagccgctccccggcgggctggctcctggccccggaagcgcgagcgttcacttagcggcgagtggctccgtctccgcggacagagcgcgcgccccctggcccggcccgcgaggggctcccggcgcggtccccgagcatttcccgccgggtggagcgggccgagcccggcaggatgaccagccccgcggccgctcaaagccgggagatcgactgtttgagcccggaagcgcagaagctggcggaagcccggctcgctgcaaaacgggcggcccgcgcggaggctcgcgagatccgcatgaaggagctggagcggcagcagaaggaggtagaagagagaccagaaaaagattttactgagaaggggtctcgtaacatgccgggcctgtctgcagccacgctggcctctctgggtgggacttcctctcggagaggcagcggagacacctccatctccatcgacaccgaggcatccatcagggaaatcaaggactctctagcagaagttgaagagaaatataagaaggctatggtttccaatgctcagctagacaatgaaaagacaaacttcatgtaccaggttgataccctaaaagatatgttgctggagcttgaagaacagctggctgaatctaggcggcagtacgaagagaaaaacaaagaatttgaaagggaaaaacacgcccacagtatactgcaatttcagtttgctgaagtcaaggaggccctgaagcaaagagaggaaatgctcgaggaaatccgacagctacagcagaaacaggcgagttctatcagggagatttctgatcttcaggaaacaatagagtggaaagacaaaaagataggggcattagagaggcagaaagagttctttgattccgtaaggagtgaacgggatgatcttagagaagaagtagtcatgctgaaagaggaattaaagaaacatggaataatcctaaattcagaaatagctaccaatggagagacttccgacaccctcaataatgttggataccaaggtcctaccaagatgacaaaagaagagttaaatgccctcaagtcgacaggggatgggaccctagatattaggttgaaaaagctggttgatgaacgggaatgcttattggaacagattaagaaactcaaagggcagctggaggagagacagaagattggcaaactagacaatcttcgatctgaagatgatgtcttggaaaacgggacagacatgcatgtaatggacctacaaagggatgccaacagacagatcagcgacctcaaatttaaacttgcaaaatctgagcaagagataactgcattagaacaaaatgtaataaggttagagagtcaagtatcacgttacaaatcagcggctgaaaatgcagaaaaaatagaagatgaacttaaggcagaaaaacggaaactccaaagagagattatatatctttgaatgatgcaggccactgcagtggtggagacagcatctggtaaaggctaccacagtaatggaggcaacctccaaaaagggaatttcaactttttaaagatacagagaaggatttgccatcaatgtgctgtcagaagataatgcagagagccataaaagcagagctgcaccttttaaatgttcactatcagatgtgtcgtcgccattgttgtgatatttacaaacttgtcatggaaaataggaatttatcaagtaattctgctaagaaggaattgggatcagcactactgtctcttttgggggacttaaaagttagatatgtgactttgaaagaaaaaatacacaaaggcataccactggaagagctgcccccactgtcactagaatcaaaattattatctaccttctctacttttgcttccaggctaatgaaaaaagaaacacatgtcttttcagaagcagatgctgaacaagataatcagagggctcatgatgttgatgtttcttcaaacctaaaaaagacactctctcaaatgtctttatcatctgacaatagtcatgctacacaaaacatatcacccaagaaagatgactttaaaaatggtgatataaatgca

SEQ ID NO: 377365 - DNA, 1140 bp, Homo sapiens
caagggtgtgaggcacgtgagggcatcgccatgcgtattttacaggcctctttctctggactgtccttcaaagggaatgacctttgtctttccaggacctacccagtgagatctgcctgccattttcctatgagtcaaaaatctgaactcactactgctcctttcctggttcataagccagagtagggctggttggcagtcactggcttgtggccctatgtaattatctcagccatcacacactggctctttcacaagggctggtcacacgcctcgagtgattcttcagaaatctgttgaacagcctgacacccagccctaggacgctgtgctggggggattccccagctactgagtggggccagagactctactgcctctgtgaccacatccctttccatactggtatctcgtttgttctaatgagtgtgtccattgcttttaatagtgaattttctgagcaatgagaatttgaccaaattgaaaagggggatttccatgcatttgaaattgccatgtgtttcttcttctgatccatttgctctaagaaatatagtctaagtttaggactgagggtttttttttaacagaatactgaatgattctttgttttgatttttttattgcaatttcaaaaatatgacctgctttccacaggactctctagcagaagttgaagagaaatataagaaggctatggtttccaatgctcagctagacaatgaaaagacaaacttcatgtaccaggttgataccctaaaagatatgttgctggagcttgaagaacagctggctgaatctaggcggcagtacgaagagaaaaacaaagtaagcattagtatgatacagaatgttaacaataggctgcgtgcagtggcccatgcctgtaattctggtactttgggaggccaaggtgggaggattacttgagcccaagagttcgagaccagcctgggcaacatggcgagacatcatttctaaaaagaattaaaacaattagccaggtggtacatggctgtagtcccagctacttgggaagctgaggtgggaggatcacctgagcctggaaggttgagactgcagtgagctgtgatgacaccactgcactccagcttgggcaacagagaagacactgtctca

SEQ ID NO: 377366 - DNA, 1171 bp, Homo sapiens
ccgtgggacgggcggaggcgcccgagtcccgcttccccggcgcccttccaccccgagcccgactcagcccgcggccacctgcgccccgcccctgtcggccgcgcccgagcccagcgccgcgagccgctccccggcgggctggctcctggccccggaagcgcgagcgttcacttagcggcgagtggctccgtctccgcggacagagcgcgcgccccctggcccggcccgcgaggggctcccggcgcggtccccgagcatttcccgccgggtggagcgggccgagcccggcaggatgaccagccccgcggccgctcaaagccgggagatcgactgtttgagcccggaagcgcagaagctggcggaagcccggctcgctgcaaaacgggcggcccgcgcggaggctcgcgagatccgcatgaaggagctggagcggcagcagaaggagatctatcaggtccaaaagaaatattatgggctggatacaaaatggggtgacatcgagcagtggatggaagacagtgagcgctactctcgtagatccagaagaaacacatcggcttctgatgaagacgagcgcatgtcagtgggtagtcgtggaagcctgaggccctcctgtctgtacagcgctgcccggccttcggggagttaccgggcgtctgtgttggatgaaggcagcttcggtgggacccgacggggcagcacctccggctcccgtgctcacgccaaccatactaacaggtggtgaaaccgtcttcggttaataaaaacgggaaaaggacaacttgacagaccacacatcattctcgtccctggatagttgaggaagaggaacaaattttaaaacttggaatgttacgcatatttcattccctgtttgtattttgttgtctctctacctctttcttcaatttgaaatgataggctcagctatgagggtaaagatgtaataggtgcaccataaacatttgtgaatgaatgcgtgagaaaagcaacaaggtagaaaaatgagatggaacccgtggaagtggggagacgaatttgcgtgtcccagggacctgtggaaacggagcgttcagtgctaaccggtgctccctggcggtggatctcctgtattcagaggctcctccccaatcctataaaaatgtcttcaagccctccaggaaatagaaag

SEQ ID NO: 377367 - DNA, 1419 bp, Homo sapiens
cacaggccactacctgtagttaaaaaggatgcctggtggaagtagcttgtcaccagcaaatgaaagcatggattggaacatctgagaaagaagtagcctttggaggacgatatcccagatttgtgtgtgttgaccgaatatttacgagtgctgcaccctagcatttctcttgtctctgtggagttaccctgtacttcaggaaaaaatggttttcttttttattattgtattaaaacagagtttaacctaatatcactgagtaaatattacgatgagcctatttttgttcccagaaaaacatggaataatcctaaattcagaaatagctaccaatggagagacttccgacaccctcaataatgttggataccaaggtcctaccaagatgacaaaagaagagttaaatgccctcaagtcgacaggggatgggaccctagatattaggttgaaaaagctggttgatgaacgggaatgcttattggaacagattaagaaactcaaagggcagctggaggagagacagaagattggcaaactagacaatcttcgatctgaagatgatgtcttggaaaacgggacagacatgcatgtaatggacctacaaagggatgccaacagacagatcagcgacctcaaatttaaacttgcaaaatctgagcaagagataactgcattagaacaaaatgtaataaggttagagagtcaagtatcacgttacaaatcagcggctgaaaatgcagaaaaaatagaagatgaacttaaggcagaaaaacggaaactccaaagagagattatatatctttgaatgatgcaggccactgcagtggtggagacagcatctggtaaaggctaccacagtaatggaggcaacctccaaaaagggaatttcaactttttaaagatacagagaaggatttgccatcaatgtgctgtcagaagataatgcagagagccataaaagcagagctgcaccttttaaatgttcactatcagatgtgtcgtcgccattgttgtgatatttacaaacttgtcatggaaaataggaatttatcaagtaattctgctaagaaggaattgggatcagcactactgtctcttttgggggacttaaaagttagatatgtgactttgaaagaaaaaatacacaaaggcataccactggaagagctgcccccactgtcactagaatcaaaattattatctaccttctctacttttgcttccaggctaatgaaaaaagaaacacatgtcttttcagaagcagatgctgaacaagataatcagagggctcatgatgttgatgtttcttcaaacctaaaaaagacactctctcaaatgtctttatcatctgacaatagtcatgctacacaaaacatatcacccaagaaagatgactttaaaaatggtgatataaatgca

SEQ ID NO: 377368 - DNA, 811 bp, Homo sapiens
ccgtgggacgggcggaggcgcccgagtcccgcttccccggcgcccttccaccccgagcccgactcagcccgcggccacctgcgccccgcccctgtcggccgcgcccgagcccagcgccgcgagccgctccccggcgggctggctcctggccccggaagcgcgagcgttcacttagcggcgagtggctccgtctccgcggacagagcgcgcgccccctggcccggcccgcgaggggctcccggcgcggtccccgagcatttcccgccgggtggagcgggccgagcccggcaggatgaccagccccgcggccgctcaaagccgggagatcgactgtttgagcccggaagcgcagaagctggtaagaggaaagcgcttccgaaactttctttcgtgactgcggcggggtttcaggggcttccagctcgttccgaggtcaatggcaggcgcaggtgcccgggaggcgtggggtgggctctggcgggaccccagcgcggtgggagcgggcgcagtgggcgcgggtccgtgagtggcccggcgagcggcgtccctcatgcgctaggaagcacgctttattgtgggacgccacctccaaggacgaaaaggcacatggtctctccccgcccgaggtgatgggctgcagacaggctctgaccaggtctgcgcctggcctggagtcacagggagctgctagtttgctattttacaaaatacagcatcaaggaccgggtggccagagccggtgccctcacccgctgttggaaccaccggggagcggctggggtgctttggagcactcaacccgctcagcacc

SEQ ID NO: 377369 - DNA, 344 bp, Homo sapiens
acctcccaccccagaaaaaaacatttttacccactggtttaattaaagcctttaaatgaaggcaaagaaaatatttatgtgacatttagatcagaactgctgtattatggtgcagtgggactacctaagcttttttaaagcacttttcctgtgtccatctgtctctaaccttttcatgctgtttcttcattgttaggaagacagtgagcgctactctcgtagatccagaagaaacacatcggttagtaccgtgttcattcattacttgggcaatttgattgaattctaatttatgcttgcagtggctgaagtatatataatatattcaatctcttaatgatgat

SEQ ID NO: 377370 - DNA, 366 bp, Homo sapiens
taaccctttatctgctttctgtctgttcctttcctcaggaaatccgacagctacagcagaaacaggcgagttctatcagggagatttctgatcttcaggaaacaatagagtggaaagacaaaaagataggggtaggattcccaagtcttgaaaatctactcaaatgggcagcctgcttagcaaatagagttttttcagagtctttagtttgcaaaaccgcttgtctgagtatgcatgcaactcccacgtgacacaaagtcgtattaatttatttaattttattaagtagtgaatacactaacttatccaaattgatatgaacttggattgtgacacggactctccatggagggtcttgtgaatgcg

SEQ ID NO: 377371 - DNA, 311 bp, Homo sapiens
aagacatgcgcatccttgaagcacacggacacagcacggggccccagaggttactatatttgcatcactttctagctttgtctgcgtgttcacagctgcgttagagcctccttctggttcctgcttctgaagtaacttgctcatctgtgcaaatcttcttctttctcttggctctgctgcacactcaggcattagagaggcagaaagagttctttgattccgtaaggagtgaacgggatgatcttagagaagaagtagtcatgctgaaagaggaattaaaggtatgaagccaaactacagttttatttaaa

SEQ ID NO: 377372 - DNA, 4427 bp, Homo sapiens
ccgtgggacgggcggaggcgcccgagtcccgcttccccggcgcccttccaccccgagcccgactcagcccgcggccacctgcgccccgcccctgtcggccgcgcccgagcccagcgccgcgagccgctccccggcgggctggctcctggccccggaagcgcgagcgttcacttagcggcgagtggctccgtctccgcggacagagcgcgcgccccctggcccggcccgcgaggggctcccggcgcggtccccgagcatttcccgccgggtggagcgggccgagcccggcaggatgaccagccccgcggccgctcaaagccgggagatcgactgtttgagcccggaagcgcagaagctggcggaagcccggctcgctgcaaaacgggcggcccgcgcggaggctcgcgagatccgcatgaaggagctggagcggcagcagaaggaggaagacagtgagcgctactctcgtagatccagaagaaacacatcggcttctgatgaagacgagcgcatgtcagtgggtagtcgtggaagcctgagggtagaagagagaccagaaaaagattttactgagaaggggtctcgtaacatgccgggcctgtctgcagccacgctggcctctctgggtgggacttcctctcggagaggcagcggagacacctccatctccatcgacaccgaggcatccatcagggaaatcaaggactctctagcagaagttgaagagaaatataagaaggctatggtttccaatgctcagctagacaatgaaaagacaaacttcatgtaccaggttgataccctaaaagatatgttgctggagcttgaagaacagctggctgaatctaggcggcagtacgaagagaaaaacaaagaatttgaaagggaaaaacacgcccacagtatactgcaatttcagtttgctgaagtcaaggaggccctgaagcaaagagaggaaatgctcgagaaacatggaataatcctaaattcagaaatagctaccaatggagagacttccgacaccctcaataatgttggataccaaggtcctaccaagatgacaaaagaagagttaaatgccctcaagtcgacaggggatgggaccctaggaagagccagtgaagtggaggtgaaaaatgaaatcgtggcgaatgtggggaaaagagaaatcttgcacaatactgagaaagaacaacacacagaggacacagtgaaggactgtgtggacatagaggtattccctgctggtgagaataccgaggaccagaaatcctctgaagacactgccccattcctaggaaccttagcaggtgctacctatgaggaacaggttcaaagccaaattcttgagagcagttctctccctgaaaacacagtacaggttgagtcaaatgaggtcatgggtgcaccagatgacaggaccagaactccccttgagccatccaactgttggagtgacttagatggtgggaaccacacagagaatgtgggagaggcagcagtgactcaggttgaagagcaggcaggcacagtggcctcgtgtcctttagggcatagtgatgacacagtttatcatgatgacaaatgtatggtagaggtcccccaagagttagagacaagcacagggcatagtttagagaaagaattcaccaaccaggaagcagctgagcccaaggaggttccagcgcacagtacagaagtaggtagggatcacaacgaagaagagggtgaagaaacaggattaagggacgagaaaccaatcaagacagaagttcctggttctccagcaggaactgagggcaactgtcaggaagcgacaggtccaagtacagtagacactcaaaatgaacccttagatatgaaagagcccgatgaagaaaagagtgaccaacagggagaggcattggactcatcgcagaagaagacaaagaacaagaaaaagaaaaacaagaagaaaaaatccccagtacccgtagaaacccttaaagatgttaaaaaagagttaacgtatcagaacacagatttaagtgaaattaaggaagaagagcaggtaaagtctactgacagaaagtcagcagtggaagcccaaaacgaggtgactgaaaatccaaaacagaaaattgcagcagaaagcagtgaaaatgttgattgtccggagaatcctaaaattaagttggatggaaaacttgaccaagaaggtgatgatgtacaaacagcagctgaggaggtactagctgatggagacacattagattttgaggatgacaccgttcaatcatcaggcccgagggctggtggtgaagaattagatgaaggtgttgcaaaagataatgctaaaatagatggtgccactcaaagcagtcctgcagaaccaaagagcgaagacgcagatcgctgcaccctgcccgaacatgaaagtccctcacaggacattagtgatgcctgtgaagcagaaagtacagagaggtgtgagatgtcagaacatccaagtcagaccgtcaggaaagctttagacagcaatagcctagagaacgatgacttgtcggcaccaggaagagagccagggcacttcaatccagaaagcagagaagataccagaggagggaatgagaagggcaaaagcaaagaagactgtaccatgtcctaagctgaggcaggcggcaggcgcggtgcacaggaagtctcagtgtgaaggggtcttttctctccactgccaatgtaagtagaatgttctaaattcatagagaggcactgtatgacaattaccaggtgctctactgctttaagttatagactgttacttgtagatttccatgtaatcattgaggttatcacccagattagaaagacatatttgttatcagtgtacgttctaattgagagcattccagtagtatcaaacaataatgtctactgtttatagtccacttaataaaaatagaggcatttactatttgccttaggctgataggaatgtgggttttcttgaccaaatatatcagcatctaattgaaatgaccaaatagcattcttagacttctgtattatgaatataattgatatttaaattaatgtcttgttcacatatgtgtactttcatatttgattttaaaatgtacattataacctgtatggtattttatttaaaggagataaacagccaaatagcaaataggtcactgaatgataagatttgcaccttagaacaataatcattttaaggataacaagtaaatgtctgaaagcatgaggggctttatttgcctttacctcatatgagtctttgatcttgaaccgatacttttggatctcattgttgatatacctgaatttactttgtaagagattttaacttcacttcatgctgatgatgtatcaaattcattttatagaaagatttaaagtttttttctggaagtgatatatgtcaaattacatttcctactgcagtatttgagcagggacagtcattttttaaatgtttttggccgggcgtggtggctcatgcctgtaatctcagtacattgggaggccaaggcaggtggatcacctgaggtcaagagttcgaggccagcctggccaacatggtgaaaccctgtctctactaaaaatacaaaaaattggccgggcgtgatggtgggcgcctgtaatcccagccactccagaggctgaggcaggagaatcgcttgaacctgcgaggcagagattgcagtgagccaagatcaagccattgtactccagcctggacaacaagagcgaaactctgtctaaaaaaaaaaaaaaacacacacacacacaacacaatgttttcacgcctgtaaacctagcacattgggaagccaaggtgggaggattgcttgaggccaggagttcaaggctgcagtgagctatgattgcacactgtactctagcctgggagacagagtgagacactgtctctaaaaaaaaaaaaaaaaaaaaaaaaagtttttgaaccttaaaatactttgtttgaatttctaatcatcattcaaaagagcagtaaaaaatggttacttgttcttgtacaagctactaattagactatagtaggatattttaaagagctgaatcacttttggtattttggtataaatattttcatttgttatgtcccagtatattcttactggaaaattcttgttttgatctgcctgaagaaaatatctgttttctatataaaaaaattttttaaaataattgtaaagttagatttaaaattgtaaaatataaaatcacaaaggaatgtaccttatgaatgttgttgacattttatgaaattatgtggattcatattactgttacaagatagaattgaatgcaaaaagaccaaaacctcaataaaatttgaggaaaacgtgttattatgtaattgaaataaaaacattttataattgtgaaaaaaaaag

SEQ ID NO: 377373 - DNA, 4280 bp, Homo sapiens
ccgtgggacgggcggaggcgcccgagtcccgcttccccggcgcccttccaccccgagcccgactcagcccgcggccacctgcgccccgcccctgtcggccgcgcccgagcccagcgccgcgagccgctccccggcgggctggctcctggccccggaagcgcgagcgttcacttagcggcgagtggctccgtctccgcggacagagcgcgcgccccctggcccggcccgcgaggggctcccggcgcggtccccgagcatttcccgccgggtggagcgggccgagcccggcaggatgaccagccccgcggccgctcaaagccgggagatcgactgtttgagcccggaagcgcagaagctggcggaagcccggctcgctgcaaaacgggcggcccgcgcggaggctcgcgagatccgcatgaaggagctggagcggcagcagaaggaggtagaagagagaccagaaaaagattttactgagaaggggtctcgtaacatgccgggcctgtctgcagccacgctggcctctctgggtgggacttcctctcggagaggcagcggagacacctccatctccatcgacaccgaggcatccatcagggaaatcaaggactctctagcagaagttgaagagaaatataagaaggctatggtttccaatgctcagctagacaatgaaaagacaaacttcatgtaccaggttgataccctaaaagatatgttgctggagcttgaagaacagctggctgaatctaggcggcagtacgaagagaaaaacaaagaatttgaaagggaaaaacacgcccacagtatactgcaatttcagtttgctgaagtcaaggaggccctgaagcaaagagaggaaatgctcgagaaacatggaataatcctaaattcagaaatagctaccaatggagagacttccgacaccctcaataatgttggataccaaggtcctaccaagatgacaaaagaagagttaaatgccctcaagtcgacaggggatgggaccctaggaagagccagtgaagtggaggtgaaaaatgaaatcgtggcgaatgtggggaaaagagaaatcttgcacaatactgagaaagaacaacacacagaggacacagtgaaggactgtgtggacatagaggtattccctgctggtgagaataccgaggaccagaaatcctctgaagacactgccccattcctaggaaccttagcaggtgctacctatgaggaacaggttcaaagccaaattcttgagagcagttctctccctgaaaacacagtacaggttgagtcaaatgaggtcatgggtgcaccagatgacaggaccagaactccccttgagccatccaactgttggagtgacttagatggtgggaaccacacagagaatgtgggagaggcagcagtgactcaggttgaagagcaggcaggcacagtggcctcgtgtcctttagggcatagtgatgacacagtttatcatgatgacaaatgtatggtagaggtcccccaagagttagagacaagcacagggcatagtttagagaaagaattcaccaaccaggaagcagctgagcccaaggaggttccagcgcacagtacagaagtaggtagggatcacaacgaagaagagggtgaagaaacaggattaagggacgagaaaccaatcaagacagaagttcctggttctccagcaggaactgagggcaactgtcaggaagcgacaggtccaagtacagtagacactcaaaatgaacccttagatatgaaagagcccgatgaagaaaagagtgaccaacagggagaggcattggactcatcgcagaagaagacaaagaacaagaaaaagaaaaacaagaagaaaaaatccccagtacccgtagaaacccttaaagatgttaaaaaagagttaacgtatcagaacacagatttaagtgaaattaaggaagaagagcaggtaaagtctactgacagaaagtcagcagtggaagcccaaaacgaggtgactgaaaatccaaaacagaaaattgcagcagaaagcagtgaaaatgttgattgtccggagaatcctaaaattaagttggatggaaaacttgaccaagaaggtgatgatgtacaaacagcagctgaggaggtactagctgatggagacacattagattttgaggatgacaccgttcaatcatcaggcccgagggctggtggtgaagaattagatgaaggtgttgcaaaagataatgctaaaatagatggtgccactcaaagcagtcctgcagaaccaaagagcgaagacgcagatcgctgcaccctgcccgaacatgaaagtccctcacaggacattagtgatgcctgtgaagcagaaagtacagagaggtgtgagatgtcagaacatccaagtcagaccgtcaggaaagctttagacagcaatagcctagaaagcagagaagataccagaggagggaatgagaagggcaaaagcaaagaagactgtaccatgtcctaagctgaggcaggcggcaggcgcggtgcacaggaagtctcagtgtgaaggggtcttttctctccactgccaatgtaagtagaatgttctaaattcatagagaggcactgtatgacaattaccaggtgctctactgctttaagttatagactgttacttgtagatttccatgtaatcattgaggttatcacccagattagaaagacatatttgttatcagtgtacgttctaattgagagcattccagtagtatcaaacaataatgtctactgtttatagtccacttaataaaaatagaggcatttactatttgccttaggctgataggaatgtgggttttcttgaccaaatatatcagcatctaattgaaatgaccaaatagcattcttagacttctgtattatgaatataattgatatttaaattaatgtcttgttcacatatgtgtactttcatatttgattttaaaatgtacattataacctgtatggtattttatttaaaggagataaacagccaaatagcaaataggtcactgaatgataagatttgcaccttagaacaataatcattttaaggataacaagtaaatgtctgaaagcatgaggggctttatttgcctttacctcatatgagtctttgatcttgaaccgatacttttggatctcattgttgatatacctgaatttactttgtaagagattttaacttcacttcatgctgatgatgtatcaaattcattttatagaaagatttaaagtttttttctggaagtgatatatgtcaaattacatttcctactgcagtatttgagcagggacagtcattttttaaatgtttttggccgggcgtggtggctcatgcctgtaatctcagtacattgggaggccaaggcaggtggatcacctgaggtcaagagttcgaggccagcctggccaacatggtgaaaccctgtctctactaaaaatacaaaaaattggccgggcgtgatggtgggcgcctgtaatcccagccactccagaggctgaggcaggagaatcgcttgaacctgcgaggcagagattgcagtgagccaagatcaagccattgtactccagcctggacaacaagagcgaaactctgtctaaaaaaaaaaaaaaacacacacacacacaacacaatgttttcacgcctgtaaacctagcacattgggaagccaaggtgggaggattgcttgaggccaggagttcaaggctgcagtgagctatgattgcacactgtactctagcctgggagacagagtgagacactgtctctaaaaaaaaaaaaaaaaaaaaaaaaagtttttgaaccttaaaatactttgtttgaatttctaatcatcattcaaaagagcagtaaaaaatggttacttgttcttgtacaagctactaattagactatagtaggatattttaaagagctgaatcacttttggtattttggtataaatattttcatttgttatgtcccagtatattcttactggaaaattcttgttttgatctgcctgaagaaaatatctgttttctatataaaaaaattttttaaaataattgtaaagttagatttaaaattgtaaaatataaaatcacaaaggaatgtaccttatgaatgttgttgacattttatgaaattatgtggattcatattactgttacaagatagaattgaatgcaaaaagaccaaaacctcaataaaatttgaggaaaacgtgttattatgtaattgaaataaaaacattttataattgtgaaaaaaaaag

SEQ ID NO: 377374 - DNA, 4442 bp, Homo sapiens
ccgtgggacgggcggaggcgcccgagtcccgcttccccggcgcccttccaccccgagcccgactcagcccgcggccacctgcgccccgcccctgtcggccgcgcccgagcccagcgccgcgagccgctccccggcgggctggctcctggccccggaagcgcgagcgttcacttagcggcgagtggctccgtctccgcggacagagcgcgcgccccctggcccggcccgcgaggggctcccggcgcggtccccgagcatttcccgccgggtggagcgggccgagcccggcaggatgaccagccccgcggccgctcaaagccgggagatcgactgtttgagcccggaagcgcagaagctggcggaagcccggctcgctgcaaaacgggcggcccgcgcggaggctcgcgagatccgcatgaaggagctggagcggcagcagaaggagatctatcaggtccaaaagaaatattatgggctggatacaaaatggggtgacatcgagcagtggatggaagacagtgagcgctactctcgtagatccagaagaaacacatcggtagaagagagaccagaaaaagattttactgagaaggggtctcgtaacatgccgggcctgtctgcagccacgctggcctctctgggtgggacttcctctcggagaggcagcggagacacctccatctccatcgacaccgaggcatccatcagggaaatcaaggactctctagcagaagttgaagagaaatataagaaggctatggtttccaatgctcagctagacaatgaaaagacaaacttcatgtaccaggttgataccctaaaagatatgttgctggagcttgaagaacagctggctgaatctaggcggcagtacgaagagaaaaacaaagaatttgaaagggaaaaacacgcccacagtatactgcaatttcagtttgctgaagtcaaggaggccctgaagcaaagagaggaaatgctcgagaaacatggaataatcctaaattcagaaatagctaccaatggagagacttccgacaccctcaataatgttggataccaaggtcctaccaagatgacaaaagaagagttaaatgccctcaagtcgacaggggatgggaccctaggaagagccagtgaagtggaggtgaaaaatgaaatcgtggcgaatgtggggaaaagagaaatcttgcacaatactgagaaagaacaacacacagaggacacagtgaaggactgtgtggacatagaggtattccctgctggtgagaataccgaggaccagaaatcctctgaagacactgccccattcctaggaaccttagcaggtgctacctatgaggaacaggttcaaagccaaattcttgagagcagttctctccctgaaaacacagtacaggttgagtcaaatgaggtcatgggtgcaccagatgacaggaccagaactccccttgagccatccaactgttggagtgacttagatggtgggaaccacacagagaatgtgggagaggcagcagtgactcaggttgaagagcaggcaggcacagtggcctcgtgtcctttagggcatagtgatgacacagtttatcatgatgacaaatgtatggtagaggtcccccaagagttagagacaagcacagggcatagtttagagaaagaattcaccaaccaggaagcagctgagcccaaggaggttccagcgcacagtacagaagtaggtagggatcacaacgaagaagagggtgaagaaacaggattaagggacgagaaaccaatcaagacagaagttcctggttctccagcaggaactgagggcaactgtcaggaagcgacaggtccaagtacagtagacactcaaaatgaacccttagatatgaaagagcccgatgaagaaaagagtgaccaacagggagaggcattggactcatcgcagaagaagacaaagaacaagaaaaagaaaaacaagaagaaaaaatccccagtacccgtagaaacccttaaagatgttaaaaaagagttaacgtatcagaacacagatttaagtgaaattaaggaagaagagcaggtaaagtctactgacagaaagtcagcagtggaagcccaaaacgaggtgactgaaaatccaaaacagaaaattgcagcagaaagcagtgaaaatgttgattgtccggagaatcctaaaattaagttggatggaaaacttgaccaagaaggtgatgatgtacaaacagcagctgaggaggtactagctgatggagacacattagattttgaggatgacaccgttcaatcatcaggcccgagggctggtggtgaagaattagatgaaggtgttgcaaaagataatgctaaaatagatggtgccactcaaagcagtcctgcagaaccaaagagcgaagacgcagatcgctgcaccctgcccgaacatgaaagtccctcacaggacattagtgatgcctgtgaagcagaaagtacagagaggtgtgagatgtcagaacatccaagtcagaccgtcaggaaagctttagacagcaatagcctagagaacgatgacttgtcggcaccaggaagagagccagggcacttcaatccagaaagcagagaagataccagaggagggaatgagaagggcaaaagcaaagaagactgtaccatgtcctaagctgaggcaggcggcaggcgcggtgcacaggaagtctcagtgtgaaggggtcttttctctccactgccaatgtaagtagaatgttctaaattcatagagaggcactgtatgacaattaccaggtgctctactgctttaagttatagactgttacttgtagatttccatgtaatcattgaggttatcacccagattagaaagacatatttgttatcagtgtacgttctaattgagagcattccagtagtatcaaacaataatgtctactgtttatagtccacttaataaaaatagaggcatttactatttgccttaggctgataggaatgtgggttttcttgaccaaatatatcagcatctaattgaaatgaccaaatagcattcttagacttctgtattatgaatataattgatatttaaattaatgtcttgttcacatatgtgtactttcatatttgattttaaaatgtacattataacctgtatggtattttatttaaaggagataaacagccaaatagcaaataggtcactgaatgataagatttgcaccttagaacaataatcattttaaggataacaagtaaatgtctgaaagcatgaggggctttatttgcctttacctcatatgagtctttgatcttgaaccgatacttttggatctcattgttgatatacctgaatttactttgtaagagattttaacttcacttcatgctgatgatgtatcaaattcattttatagaaagatttaaagtttttttctggaagtgatatatgtcaaattacatttcctactgcagtatttgagcagggacagtcattttttaaatgtttttggccgggcgtggtggctcatgcctgtaatctcagtacattgggaggccaaggcaggtggatcacctgaggtcaagagttcgaggccagcctggccaacatggtgaaaccctgtctctactaaaaatacaaaaaattggccgggcgtgatggtgggcgcctgtaatcccagccactccagaggctgaggcaggagaatcgcttgaacctgcgaggcagagattgcagtgagccaagatcaagccattgtactccagcctggacaacaagagcgaaactctgtctaaaaaaaaaaaaaaacacacacacacacaacacaatgttttcacgcctgtaaacctagcacattgggaagccaaggtgggaggattgcttgaggccaggagttcaaggctgcagtgagctatgattgcacactgtactctagcctgggagacagagtgagacactgtctctaaaaaaaaaaaaaaaaaaaaaaaaagtttttgaaccttaaaatactttgtttgaatttctaatcatcattcaaaagagcagtaaaaaatggttacttgttcttgtacaagctactaattagactatagtaggatattttaaagagctgaatcacttttggtattttggtataaatattttcatttgttatgtcccagtatattcttactggaaaattcttgttttgatctgcctgaagaaaatatctgttttctatataaaaaaattttttaaaataattgtaaagttagatttaaaattgtaaaatataaaatcacaaaggaatgtaccttatgaatgttgttgacattttatgaaattatgtggattcatattactgttacaagatagaattgaatgcaaaaagaccaaaacctcaataaaatttgaggaaaacgtgttattatgtaattgaaataaaaacattttataattgtgaaaaaaaaag

SEQ ID NO: 377375 - DNA, 4442 bp, Homo sapiens
ggccggggccgggccggggcggcgcgagcggctggagcaacgggccccgcggcagctgcgggcgacgcggtcgatggacatgggcacccagggatcggggcgcaagcggctccccaaccgggagcggctcacggcggaggacgacgcgctcaaccagatcgcgcgggaggcggaagcccggctcgctgcaaaacgggcggcccgcgcggaggctcgcgagatccgcatgaaggagctggagcggcagcagaaggagatctatcaggtccaaaagaaatattatgggctggatacaaaatggggtgacatcgagcagtggatggaagacagtgagcgctactctcgtagatccagaagaaacacatcggcttctgatgaagacgagcgcatgtcagtgggtagtcgtggaagcctgaggacaaatggttatgatggagaattgtatggatcacagtccctgaatagaagatctggcaggccctcggagtacagcggccacctcaactccagctcccgcgcctcctccagggccagctcggcccgggccagccctgtggtagaagagagaccagaaaaagattttactgagaaggggtctcgtaacatgccgggcctgtctgcagccacgctggcctctctgggtgggacttcctctcggagaggcagcggagacacctccatctccatcgacaccgaggcatccatcagggaaatcaaggactctctagcagaagttgaagagaaatataagaaggctatggtttccaatgctcagctagacaatgaaaagacaaacttcatgtaccaggttgataccctaaaagatatgttgctggagcttgaagaacagctggctgaatctaggcggcagtacgaagagaaaaacaaagaatttgaaagggaaaaacacgcccacagtatactgcaatttcagtttgctgaagtcaaggaggccctgaagcaaagagaggaaatgctcgagaaacatggaataatcctaaattcagaaatagctaccaatggagagacttccgacaccctcaataatgttggataccaaggtcctaccaagatgacaaaagaagagttaaatgccctcaagtcgacaggggatgggaccctaggaagagccagtgaagtggaggtgaaaaatgaaatcgtggcgaatgtggggaaaagagaaatcttgcacaatactgagaaagaacaacacacagaggacacagtgaaggactgtgtggacatagaggtattccctgctggtgagaataccgaggaccagaaatcctctgaagacactgccccattcctaggaaccttagcaggtgctacctatgaggaacaggttcaaagccaaattcttgagagcagttctctccctgaaaacacagtacaggttgagtcaaatgaggtcatgggtgcaccagatgacaggaccagaactccccttgagccatccaactgttggagtgacttagatggtgggaaccacacagagaatgtgggagaggcagcagtgactcaggttgaagagcaggcaggcacagtggcctcgtgtcctttagggcatagtgatgacacagtttatcatgatgacaaatgtatggtagaggtcccccaagagttagagacaagcacagggcatagtttagagaaagaattcaccaaccaggaagcagctgagcccaaggaggttccagcgcacagtacagaagtaggtagggatcacaacgaagaagagggtgaagaaacaggattaagggacgagaaaccaatcaagacagaagttcctggttctccagcaggaactgagggcaactgtcaggaagcgacaggtccaagtacagtagacactcaaaatgaacccttagatatgaaagagcccgatgaagaaaagagtgaccaacagggagaggcattggactcatcgcagaagaagacaaagaacaagaaaaagaaaaacaagaagaaaaaatccccagtacccgtagaaacccttaaagatgttaaaaaagagttaacgtatcagaacacagatttaagtgaaattaaggaagaagagcaggtaaagtctactgacagaaagtcagcagtggaagcccaaaacgaggtgactgaaaatccaaaacagaaaattgcagcagaaagcagtgaaaatgttgattgtccggagaatcctaaaattaagttggatggaaaacttgaccaagaaggtgatgatgtacaaacagcagctgaggaggtactagctgatggagacacattagattttgaggatgacaccgttcaatcatcaggcccgagggctggtggtgaagaattagatgaaggtgttgcaaaagataatgctaaaatagatggtgccactcaaagcagtcctgcagaaccaaagagcgaagacgcagatcgctgcaccctgcccgaacatgaaagtccctcacaggacattagtgatgcctgtgaagcagaaagtacagagaggtgtgagatgtcagaacatccaagtcagaccgtcaggaaagctttagacagcaatagcctagagaacgatgacttgtcggcaccaggaagagagccagggcacttcaatccagaaagcagagaagataccagaggagggaatgagaagggcaaaagcaaagaagactgtaccatgtcctaagctgaggcaggcggcaggcgcggtgcacaggaagtctcagtgtgaaggggtcttttctctccactgccaatgtaagtagaatgttctaaattcatagagaggcactgtatgacaattaccaggtgctctactgctttaagttatagactgttacttgtagatttccatgtaatcattgaggttatcacccagattagaaagacatatttgttatcagtgtacgttctaattgagagcattccagtagtatcaaacaataatgtctactgtttatagtccacttaataaaaatagaggcatttactatttgccttaggctgataggaatgtgggttttcttgaccaaatatatcagcatctaattgaaatgaccaaatagcattcttagacttctgtattatgaatataattgatatttaaattaatgtcttgttcacatatgtgtactttcatatttgattttaaaatgtacattataacctgtatggtattttatttaaaggagataaacagccaaatagcaaataggtcactgaatgataagatttgcaccttagaacaataatcattttaaggataacaagtaaatgtctgaaagcatgaggggctttatttgcctttacctcatatgagtctttgatcttgaaccgatacttttggatctcattgttgatatacctgaatttactttgtaagagattttaacttcacttcatgctgatgatgtatcaaattcattttatagaaagatttaaagtttttttctggaagtgatatatgtcaaattacatttcctactgcagtatttgagcagggacagtcattttttaaatgtttttggccgggcgtggtggctcatgcctgtaatctcagtacattgggaggccaaggcaggtggatcacctgaggtcaagagttcgaggccagcctggccaacatggtgaaaccctgtctctactaaaaatacaaaaaattggccgggcgtgatggtgggcgcctgtaatcccagccactccagaggctgaggcaggagaatcgcttgaacctgcgaggcagagattgcagtgagccaagatcaagccattgtactccagcctggacaacaagagcgaaactctgtctaaaaaaaaaaaaaaacacacacacacacaacacaatgttttcacgcctgtaaacctagcacattgggaagccaaggtgggaggattgcttgaggccaggagttcaaggctgcagtgagctatgattgcacactgtactctagcctgggagacagagtgagacactgtctctaaaaaaaaaaaaaaaaaaaaaaaaagtttttgaaccttaaaatactttgtttgaatttctaatcatcattcaaaagagcagtaaaaaatggttacttgttcttgtacaagctactaattagactatagtaggatattttaaagagctgaatcacttttggtattttggtataaatattttcatttgttatgtcccagtatattcttactggaaaattcttgttttgatctgcctgaagaaaatatctgttttctatataaaaaaattttttaaaataattgtaaagttagatttaaaattgtaaaatataaaatcacaaaggaatgtaccttatgaatgttgttgacattttatgaaattatgtggattcatattactgttacaagatagaattgaatgcaaaaagaccaaaacctcaataaaatttgaggaaaacgtgttattatgtaattgaaataaaaacattttataattgtgaaaaaaaaag

SEQ ID NO: 377376 - DNA, 4403 bp, Homo sapiens
ccgtgggacgggcggaggcgcccgagtcccgcttccccggcgcccttccaccccgagcccgactcagcccgcggccacctgcgccccgcccctgtcggccgcgcccgagcccagcgccgcgagccgctccccggcgggctggctcctggccccggaagcgcgagcgttcacttagcggcgagtggctccgtctccgcggacagagcgcgcgccccctggcccggcccgcgaggggctcccggcgcggtccccgagcatttcccgccgggtggagcgggccgagcccggcaggatgaccagccccgcggccgctcaaagccgggagatcgactgtttgagcccggaagcgcagaagctggcggaagcccggctcgctgcaaaacgggcggcccgcgcggaggctcgcgagatccgcatgaaggagctggagcggcagcagaaggaggtagaagagagaccagaaaaagattttactgagaaggggtctcgtaacatgccgggcctgtctgcagccacgctggcctctctgggtgggacttcctctcggagaggcagcggagacacctccatctccatcgacaccgaggcatccatcagggaaatcaaggaactcaatgagttaaaggaccagattcaggatgtagaaggcaaatacatgcagggattgaaagagatgaaggactctctagcagaagttgaagagaaatataagaaggctatggtttccaatgctcagctagacaatgaaaagacaaacttcatgtaccaggttgataccctaaaagatatgttgctggagcttgaagaacagctggctgaatctaggcggcagtacgaagagaaaaacaaagaatttgaaagggaaaaacacgcccacagtatactgcaatttcagtttgctgaagtcaaggaggccctgaagcaaagagaggaaatgctcgagaaacatggaataatcctaaattcagaaatagctaccaatggagagacttccgacaccctcaataatgttggataccaaggtcctaccaagatgacaaaagaagagttaaatgccctcaagtcgacaggggatgggaccctaggaagagccagtgaagtggaggtgaaaaatgaaatcgtggcgaatgtggggaaaagagaaatcttgcacaatactgagaaagaacaacacacagaggacacagtgaaggactgtgtggacatagaggtattccctgctggtgagaataccgaggaccagaaatcctctgaagacactgccccattcctaggaaccttagcaggtgctacctatgaggaacaggttcaaagccaaattcttgagagcagttctctccctgaaaacacagtacaggttgagtcaaatgaggtcatgggtgcaccagatgacaggaccagaactccccttgagccatccaactgttggagtgacttagatggtgggaaccacacagagaatgtgggagaggcagcagtgactcaggttgaagagcaggcaggcacagtggcctcgtgtcctttagggcatagtgatgacacagtttatcatgatgacaaatgtatggtagaggtcccccaagagttagagacaagcacagggcatagtttagagaaagaattcaccaaccaggaagcagctgagcccaaggaggttccagcgcacagtacagaagtaggtagggatcacaacgaagaagagggtgaagaaacaggattaagggacgagaaaccaatcaagacagaagttcctggttctccagcaggaactgagggcaactgtcaggaagcgacaggtccaagtacagtagacactcaaaatgaacccttagatatgaaagagcccgatgaagaaaagagtgaccaacagggagaggcattggactcatcgcagaagaagacaaagaacaagaaaaagaaaaacaagaagaaaaaatccccagtacccgtagaaacccttaaagatgttaaaaaagagttaacgtatcagaacacagatttaagtgaaattaaggaagaagagcaggtaaagtctactgacagaaagtcagcagtggaagcccaaaacgaggtgactgaaaatccaaaacagaaaattgcagcagaaagcagtgaaaatgttgattgtccggagaatcctaaaattaagttggatggaaaacttgaccaagaaggtgatgatgtacaaacagcagctgaggaggtactagctgatggagacacattagattttgaggatgacaccgttcaatcatcaggcccgagggctggtggtgaagaattagatgaaggtgttgcaaaagataatgctaaaatagatggtgccactcaaagcagtcctgcagaaccaaagagcgaagacgcagatcgctgcaccctgcccgaacatgaaagtccctcacaggacattagtgatgcctgtgaagcagaaagtacagagaggtgtgagatgtcagaacatccaagtcagaccgtcaggaaagctttagacagcaatagcctagagaacgatgacttgtcggcaccaggaagagagccagggcacttcaatccagaaagcagagaagataccagaggagggaatgagaagggcaaaagcaaagaagactgtaccatgtcctaagctgaggcaggcggcaggcgcggtgcacaggaagtctcagtgtgaaggggtcttttctctccactgccaatgtaagtagaatgttctaaattcatagagaggcactgtatgacaattaccaggtgctctactgctttaagttatagactgttacttgtagatttccatgtaatcattgaggttatcacccagattagaaagacatatttgttatcagtgtacgttctaattgagagcattccagtagtatcaaacaataatgtctactgtttatagtccacttaataaaaatagaggcatttactatttgccttaggctgataggaatgtgggttttcttgaccaaatatatcagcatctaattgaaatgaccaaatagcattcttagacttctgtattatgaatataattgatatttaaattaatgtcttgttcacatatgtgtactttcatatttgattttaaaatgtacattataacctgtatggtattttatttaaaggagataaacagccaaatagcaaataggtcactgaatgataagatttgcaccttagaacaataatcattttaaggataacaagtaaatgtctgaaagcatgaggggctttatttgcctttacctcatatgagtctttgatcttgaaccgatacttttggatctcattgttgatatacctgaatttactttgtaagagattttaacttcacttcatgctgatgatgtatcaaattcattttatagaaagatttaaagtttttttctggaagtgatatatgtcaaattacatttcctactgcagtatttgagcagggacagtcattttttaaatgtttttggccgggcgtggtggctcatgcctgtaatctcagtacattgggaggccaaggcaggtggatcacctgaggtcaagagttcgaggccagcctggccaacatggtgaaaccctgtctctactaaaaatacaaaaaattggccgggcgtgatggtgggcgcctgtaatcccagccactccagaggctgaggcaggagaatcgcttgaacctgcgaggcagagattgcagtgagccaagatcaagccattgtactccagcctggacaacaagagcgaaactctgtctaaaaaaaaaaaaaaacacacacacacacaacacaatgttttcacgcctgtaaacctagcacattgggaagccaaggtgggaggattgcttgaggccaggagttcaaggctgcagtgagctatgattgcacactgtactctagcctgggagacagagtgagacactgtctctaaaaaaaaaaaaaaaaaaaaaaaaagtttttgaaccttaaaatactttgtttgaatttctaatcatcattcaaaagagcagtaaaaaatggttacttgttcttgtacaagctactaattagactatagtaggatattttaaagagctgaatcacttttggtattttggtataaatattttcatttgttatgtcccagtatattcttactggaaaattcttgttttgatctgcctgaagaaaatatctgttttctatataaaaaaattttttaaaataattgtaaagttagatttaaaattgtaaaatataaaatcacaaaggaatgtaccttatgaatgttgttgacattttatgaaattatgtggattcatattactgttacaagatagaattgaatgcaaaaagaccaaaacctcaataaaatttgaggaaaacgtgttattatgtaattgaaataaaaacattttataattgtgaaaaaaaaag

SEQ ID NO: 377377 - DNA, 4327 bp, Homo sapiens
caagggtgtgaggcacgtgagggcatcgccatgcgtattttacaggcctctttctctggactgtccttcaaagggaatgacctttgtctttccaggacctacccagtgagatctgcctgccattttcctatgagtcagttggcagtcactggcttgtggccctatgtaattatctcagccatcacacactggctctttcacaagggctggtcacacgcctcgagtgattcttcagaaatctgttgaacagcctgacacccagccctaggacgctgtgctggggggattccccagctactgagtggggccagagactctactgcctctgtgaccacatccctttccatactggtatctcgtttgttctaatgagtgtgtccattgcttttaatagtgaattttctgagcaatgagaatttgaccaaattgaaaagggggatttccatgcatttgaaattgccatgtgtttcttcttctgatccatttgctctaagaaatatagtctaagtttaggactgagggtttttttttaacagaatactgaatgattctttgttttgatttttttattgcaatttcaaaaatatgacctgctttccacaggactctctagcagaagttgaagagaaatataagaaggctatggtttccaatgctcagctagacaatgaaaagacaaacttcatgtaccaggttgataccctaaaagatatgttgctggagcttgaagaacagctggctgaatctaggcggcagtacgaagagaaaaacaaagaatttgaaagggaaaaacacgcccacagtatactgcaatttcagtttgctgaagtcaaggaggccctgaagcaaagagaggaaatgctcgagaaacatggaataatcctaaattcagaaatagctaccaatggagagacttccgacaccctcaataatgttggataccaaggtcctaccaagatgacaaaagaagagttaaatgccctcaagtcgacaggggatgggaccctaggaagagccagtgaagtggaggtgaaaaatgaaatcgtggcgaatgtggggaaaagagaaatcttgcacaatactgagaaagaacaacacacagaggacacagtgaaggactgtgtggacatagaggtattccctgctggtgagaataccgaggaccagaaatcctctgaagacactgccccattcctaggaaccttagcaggtgctacctatgaggaacaggttcaaagccaaattcttgagagcagttctctccctgaaaacacagtacaggttgagtcaaatgaggtcatgggtgcaccagatgacaggaccagaactccccttgagccatccaactgttggagtgacttagatggtgggaaccacacagagaatgtgggagaggcagcagtgactcaggttgaagagcaggcaggcacagtggcctcgtgtcctttagggcatagtgatgacacagtttatcatgatgacaaatgtatggtagaggtcccccaagagttagagacaagcacagggcatagtttagagaaagaattcaccaaccaggaagcagctgagcccaaggaggttccagcgcacagtacagaagtaggtagggatcacaacgaagaagagggtgaagaaacaggattaagggacgagaaaccaatcaagacagaagttcctggttctccagcaggaactgagggcaactgtcaggaagcgacaggtccaagtacagtagacactcaaaatgaacccttagatatgaaagagcccgatgaagaaaagagtgaccaacagggagaggcattggactcatcgcagaagaagacaaagaacaagaaaaagaaaaacaagaagaaaaaatccccagtacccgtagaaacccttaaagatgttaaaaaagagttaacgtatcagaacacagatttaagtgaaattaaggaagaagagcaggtaaagtctactgacagaaagtcagcagtggaagcccaaaacgaggtgactgaaaatccaaaacagaaaattgcagcagaaagcagtgaaaatgttgattgtccggagaatcctaaaattaagttggatggaaaacttgaccaagaaggtgatgatgtacaaacagcagctgaggaggtactagctgatggagacacattagattttgaggatgacaccgttcaatcatcaggcccgagggctggtggtgaagaattagatgaaggtgttgcaaaagataatgctaaaatagatggtgccactcaaagcagtcctgcagaaccaaagagcgaagacgcagatcgctgcaccctgcccgaacatgaaagtccctcacaggacattagtgatgcctgtgaagcagaaagtacagagaggtgtgagatgtcagaacatccaagtcagaccgtcaggaaagctttagacagcaatagcctagagaacgatgacttgtcggcaccaggaagagagccagggcacttcaatccagaaagcagagaagataccagaggagggaatgagaagggcaaaagcaaagaagactgtaccatgtcctaagctgaggcaggcggcaggcgcggtgcacaggaagtctcagtgtgaaggggtcttttctctccactgccaatgtaagtagaatgttctaaattcatagagaggcactgtatgacaattaccaggtgctctactgctttaagttatagactgttacttgtagatttccatgtaatcattgaggttatcacccagattagaaagacatatttgttatcagtgtacgttctaattgagagcattccagtagtatcaaacaataatgtctactgtttatagtccacttaataaaaatagaggcatttactatttgccttaggctgataggaatgtgggttttcttgaccaaatatatcagcatctaattgaaatgaccaaatagcattcttagacttctgtattatgaatataattgatatttaaattaatgtcttgttcacatatgtgtactttcatatttgattttaaaatgtacattataacctgtatggtattttatttaaaggagataaacagccaaatagcaaataggtcactgaatgataagatttgcaccttagaacaataatcattttaaggataacaagtaaatgtctgaaagcatgaggggctttatttgcctttacctcatatgagtctttgatcttgaaccgatacttttggatctcattgttgatatacctgaatttactttgtaagagattttaacttcacttcatgctgatgatgtatcaaattcattttatagaaagatttaaagtttttttctggaagtgatatatgtcaaattacatttcctactgcagtatttgagcagggacagtcattttttaaatgtttttggccgggcgtggtggctcatgcctgtaatctcagtacattgggaggccaaggcaggtggatcacctgaggtcaagagttcgaggccagcctggccaacatggtgaaaccctgtctctactaaaaatacaaaaaattggccgggcgtgatggtgggcgcctgtaatcccagccactccagaggctgaggcaggagaatcgcttgaacctgcgaggcagagattgcagtgagccaagatcaagccattgtactccagcctggacaacaagagcgaaactctgtctaaaaaaaaaaaaaaacacacacacacacaacacaatgttttcacgcctgtaaacctagcacattgggaagccaaggtgggaggattgcttgaggccaggagttcaaggctgcagtgagctatgattgcacactgtactctagcctgggagacagagtgagacactgtctctaaaaaaaaaaaaaaaaaaaaaaaaagtttttgaaccttaaaatactttgtttgaatttctaatcatcattcaaaagagcagtaaaaaatggttacttgttcttgtacaagctactaattagactatagtaggatattttaaagagctgaatcacttttggtattttggtataaatattttcatttgttatgtcccagtatattcttactggaaaattcttgttttgatctgcctgaagaaaatatctgttttctatataaaaaaattttttaaaataattgtaaagttagatttaaaattgtaaaatataaaatcacaaaggaatgtaccttatgaatgttgttgacattttatgaaattatgtggattcatattactgttacaagatagaattgaatgcaaaaagaccaaaacctcaataaaatttgaggaaaacgtgttattatgtaattgaaataaaaacattttataattgtgaaaaaaaaag

SEQ ID NO: 377378 - DNA, 4323 bp, Homo sapiens
caagggtgtgaggcacgtgagggcatcgccatgcgtattttacaggcctctttctctggactgtccttcaaagggaatgacctttgtctttccaggacctacccagtgagatctgcctgccattttcctatgagtcaaaaatctgaactcactactgctcctttcctggttcataagccagagtagggctggttggcagtcactggcttgtggccctatgtaattatctcagccatcacacactggctctttcacaagggctggtcacacgcctcgagtgattcttcagaaatctgttgaacagcctgacacccagccctaggacgctgtgctggggggattccccagctactgagtggggccagagactctactgcctctgtgaccacatccctttccatactggtatctcgtttgttctaatgagtgtgtccattgcttttaatagtgaattttctgagcaatgagaatttgaccaaattgaaaagggggatttccatgcatttgaaattgccatgtgtttcttcttctgatccatttgctctaagaaatatagtctaagtttaggactgagggtttttttttaacagaatactgaatgattctttgttttgatttttttattgcaatttcaggctatggtttccaatgctcagctagacaatgaaaagacaaacttcatgtaccaggttgataccctaaaagatatgttgctggagcttgaagaacagctggctgaatctaggcggcagtacgaagagaaaaacaaagaatttgaaagggaaaaacacgcccacagtatactgcaatttcagtttgctgaagtcaaggaggccctgaagcaaagagaggaaatgctcgagaaacatggaataatcctaaattcagaaatagctaccaatggagagacttccgacaccctcaataatgttggataccaaggtcctaccaagatgacaaaagaagagttaaatgccctcaagtcgacaggggatgggaccctaggaagagccagtgaagtggaggtgaaaaatgaaatcgtggcgaatgtggggaaaagagaaatcttgcacaatactgagaaagaacaacacacagaggacacagtgaaggactgtgtggacatagaggtattccctgctggtgagaataccgaggaccagaaatcctctgaagacactgccccattcctaggaaccttagcaggtgctacctatgaggaacaggttcaaagccaaattcttgagagcagttctctccctgaaaacacagtacaggttgagtcaaatgaggtcatgggtgcaccagatgacaggaccagaactccccttgagccatccaactgttggagtgacttagatggtgggaaccacacagagaatgtgggagaggcagcagtgactcaggttgaagagcaggcaggcacagtggcctcgtgtcctttagggcatagtgatgacacagtttatcatgatgacaaatgtatggtagaggtcccccaagagttagagacaagcacagggcatagtttagagaaagaattcaccaaccaggaagcagctgagcccaaggaggttccagcgcacagtacagaagtaggtagggatcacaacgaagaagagggtgaagaaacaggattaagggacgagaaaccaatcaagacagaagttcctggttctccagcaggaactgagggcaactgtcaggaagcgacaggtccaagtacagtagacactcaaaatgaacccttagatatgaaagagcccgatgaagaaaagagtgaccaacagggagaggcattggactcatcgcagaagaagacaaagaacaagaaaaagaaaaacaagaagaaaaaatccccagtacccgtagaaacccttaaagatgttaaaaaagagttaacgtatcagaacacagatttaagtgaaattaaggaagaagagcaggtaaagtctactgacagaaagtcagcagtggaagcccaaaacgaggtgactgaaaatccaaaacagaaaattgcagcagaaagcagtgaaaatgttgattgtccggagaatcctaaaattaagttggatggaaaacttgaccaagaaggtgatgatgtacaaacagcagctgaggaggtactagctgatggagacacattagattttgaggatgacaccgttcaatcatcaggcccgagggctggtggtgaagaattagatgaaggtgttgcaaaagataatgctaaaatagatggtgccactcaaagcagtcctgcagaaccaaagagcgaagacgcagatcgctgcaccctgcccgaacatgaaagtccctcacaggacattagtgatgcctgtgaagcagaaagtacagagaggtgtgagatgtcagaacatccaagtcagaccgtcaggaaagctttagacagcaatagcctagagaacgatgacttgtcggcaccaggaagagagccagggcacttcaatccagaaagcagagaagataccagaggagggaatgagaagggcaaaagcaaagaagactgtaccatgtcctaagctgaggcaggcggcaggcgcggtgcacaggaagtctcagtgtgaaggggtcttttctctccactgccaatgtaagtagaatgttctaaattcatagagaggcactgtatgacaattaccaggtgctctactgctttaagttatagactgttacttgtagatttccatgtaatcattgaggttatcacccagattagaaagacatatttgttatcagtgtacgttctaattgagagcattccagtagtatcaaacaataatgtctactgtttatagtccacttaataaaaatagaggcatttactatttgccttaggctgataggaatgtgggttttcttgaccaaatatatcagcatctaattgaaatgaccaaatagcattcttagacttctgtattatgaatataattgatatttaaattaatgtcttgttcacatatgtgtactttcatatttgattttaaaatgtacattataacctgtatggtattttatttaaaggagataaacagccaaatagcaaataggtcactgaatgataagatttgcaccttagaacaataatcattttaaggataacaagtaaatgtctgaaagcatgaggggctttatttgcctttacctcatatgagtctttgatcttgaaccgatacttttggatctcattgttgatatacctgaatttactttgtaagagattttaacttcacttcatgctgatgatgtatcaaattcattttatagaaagatttaaagtttttttctggaagtgatatatgtcaaattacatttcctactgcagtatttgagcagggacagtcattttttaaatgtttttggccgggcgtggtggctcatgcctgtaatctcagtacattgggaggccaaggcaggtggatcacctgaggtcaagagttcgaggccagcctggccaacatggtgaaaccctgtctctactaaaaatacaaaaaattggccgggcgtgatggtgggcgcctgtaatcccagccactccagaggctgaggcaggagaatcgcttgaacctgcgaggcagagattgcagtgagccaagatcaagccattgtactccagcctggacaacaagagcgaaactctgtctaaaaaaaaaaaaaaacacacacacacacaacacaatgttttcacgcctgtaaacctagcacattgggaagccaaggtgggaggattgcttgaggccaggagttcaaggctgcagtgagctatgattgcacactgtactctagcctgggagacagagtgagacactgtctctaaaaaaaaaaaaaaaaaaaaaaaaagtttttgaaccttaaaatactttgtttgaatttctaatcatcattcaaaagagcagtaaaaaatggttacttgttcttgtacaagctactaattagactatagtaggatattttaaagagctgaatcacttttggtattttggtataaatattttcatttgttatgtcccagtatattcttactggaaaattcttgttttgatctgcctgaagaaaatatctgttttctatataaaaaaattttttaaaataattgtaaagttagatttaaaattgtaaaatataaaatcacaaaggaatgtaccttatgaatgttgttgacattttatgaaattatgtggattcatattactgttacaagatagaattgaatgcaaaaagaccaaaacctcaataaaatttgaggaaaacgtgttattatgtaattgaaataaaaacattttataattgtgaaaaaaaaag

SEQ ID NO: 377379 - DNA, 4589 bp, Homo sapiens
ccgtgggacgggcggaggcgcccgagtcccgcttccccggcgcccttccaccccgagcccgactcagcccgcggccacctgcgccccgcccctgtcggccgcgcccgagcccagcgccgcgagccgctccccggcgggctggctcctggccccggaagcgcgagcgttcacttagcggcgagtggctccgtctccgcggacagagcgcgcgccccctggcccggcccgcgaggggctcccggcgcggtccccgagcatttcccgccgggtggagcgggccgagcccggcaggatgaccagccccgcggccgctcaaagccgggagatcgactgtttgagcccggaagcgcagaagctggcggaagcccggctcgctgcaaaacgggcggcccgcgcggaggctcgcgagatccgcatgaaggagctggagcggcagcagaaggaggtagaagagagaccagaaaaagattttactgagaaggggtctcgtaacatgccgggcctgtctgcagccacgctggcctctctgggtgggacttcctctcggagaggcagcggagacacctccatctccatcgacaccgaggcatccatcagggaaatcaaggaactcaatgagttaaaggaccagattcaggatgtagaaggcaaatacatgcagggattgaaagagatgaaggactctctagcagaagttgaagagaaatataagaaggctatggtttccaatgctcagctagacaatgaaaagacaaacttcatgtaccaggttgataccctaaaagatatgttgctggagcttgaagaacagctggctgaatctaggcggcagtacgaagagaaaaacaaagaatttgaaagggaaaaacacgcccacagtatactgcaatttcagtttgctgaagtcaaggaggccctgaagcaaagagaggaaatgctcgaggaaatccgacagctacagcagaaacaggcgagttctatcagggagatttctgatcttcaggaaacaatagagtggaaagacaaaaagataggggcattagagaggcagaaagagttctttgattccgtaaggagtgaacgggatgatcttagagaagaagtagtcatgctgaaagaggaattaaagaaacatggaataatcctaaattcagaaatagctaccaatggagagacttccgacaccctcaataatgttggataccaaggtcctaccaagatgacaaaagaagagttaaatgccctcaagtcgacaggggatgggaccctaggaagagccagtgaagtggaggtgaaaaatgaaatcgtggcgaatgtggggaaaagagaaatcttgcacaatactgagaaagaacaacacacagaggacacagtgaaggactgtgtggacatagaggtattccctgctggtgagaataccgaggaccagaaatcctctgaagacactgccccattcctaggaaccttagcaggtgctacctatgaggaacaggttcaaagccaaattcttgagagcagttctctccctgaaaacacagtacaggttgagtcaaatgaggtcatgggtgcaccagatgacaggaccagaactccccttgagccatccaactgttggagtgacttagatggtgggaaccacacagagaatgtgggagaggcagcagtgactcaggttgaagagcaggcaggcacagtggcctcgtgtcctttagggcatagtgatgacacagtttatcatgatgacaaatgtatggtagaggtcccccaagagttagagacaagcacagggcatagtttagagaaagaattcaccaaccaggaagcagctgagcccaaggaggttccagcgcacagtacagaagtaggtagggatcacaacgaagaagagggtgaagaaacaggattaagggacgagaaaccaatcaagacagaagttcctggttctccagcaggaactgagggcaactgtcaggaagcgacaggtccaagtacagtagacactcaaaatgaacccttagatatgaaagagcccgatgaagaaaagagtgaccaacagggagaggcattggactcatcgcagaagaagacaaagaacaagaaaaagaaaaacaagaagaaaaaatccccagtacccgtagaaacccttaaagatgttaaaaaagagttaacgtatcagaacacagatttaagtgaaattaaggaagaagagcaggtaaagtctactgacagaaagtcagcagtggaagcccaaaacgaggtgactgaaaatccaaaacagaaaattgcagcagaaagcagtgaaaatgttgattgtccggagaatcctaaaattaagttggatggaaaacttgaccaagaaggtgatgatgtacaaacagcagctgaggaggtactagctgatggagacacattagattttgaggatgacaccgttcaatcatcaggcccgagggctggtggtgaagaattagatgaaggtgttgcaaaagataatgctaaaatagatggtgccactcaaagcagtcctgcagaaccaaagagcgaagacgcagatcgctgcaccctgcccgaacatgaaagtccctcacaggacattagtgatgcctgtgaagcagaaagtacagagaggtgtgagatgtcagaacatccaagtcagaccgtcaggaaagctttagacagcaatagcctagagaacgatgacttgtcggcaccaggaagagagccagggcacttcaatccagaaagcagagaagataccagaggagggaatgagaagggcaaaagcaaagaagactgtaccatgtcctaagctgaggcaggcggcaggcgcggtgcacaggaagtctcagtgtgaaggggtcttttctctccactgccaatgtaagtagaatgttctaaattcatagagaggcactgtatgacaattaccaggtgctctactgctttaagttatagactgttacttgtagatttccatgtaatcattgaggttatcacccagattagaaagacatatttgttatcagtgtacgttctaattgagagcattccagtagtatcaaacaataatgtctactgtttatagtccacttaataaaaatagaggcatttactatttgccttaggctgataggaatgtgggttttcttgaccaaatatatcagcatctaattgaaatgaccaaatagcattcttagacttctgtattatgaatataattgatatttaaattaatgtcttgttcacatatgtgtactttcatatttgattttaaaatgtacattataacctgtatggtattttatttaaaggagataaacagccaaatagcaaataggtcactgaatgataagatttgcaccttagaacaataatcattttaaggataacaagtaaatgtctgaaagcatgaggggctttatttgcctttacctcatatgagtctttgatcttgaaccgatacttttggatctcattgttgatatacctgaatttactttgtaagagattttaacttcacttcatgctgatgatgtatcaaattcattttatagaaagatttaaagtttttttctggaagtgatatatgtcaaattacatttcctactgcagtatttgagcagggacagtcattttttaaatgtttttggccgggcgtggtggctcatgcctgtaatctcagtacattgggaggccaaggcaggtggatcacctgaggtcaagagttcgaggccagcctggccaacatggtgaaaccctgtctctactaaaaatacaaaaaattggccgggcgtgatggtgggcgcctgtaatcccagccactccagaggctgaggcaggagaatcgcttgaacctgcgaggcagagattgcagtgagccaagatcaagccattgtactccagcctggacaacaagagcgaaactctgtctaaaaaaaaaaaaaaacacacacacacacaacacaatgttttcacgcctgtaaacctagcacattgggaagccaaggtgggaggattgcttgaggccaggagttcaaggctgcagtgagctatgattgcacactgtactctagcctgggagacagagtgagacactgtctctaaaaaaaaaaaaaaaaaaaaaaaaagtttttgaaccttaaaatactttgtttgaatttctaatcatcattcaaaagagcagtaaaaaatggttacttgttcttgtacaagctactaattagactatagtaggatattttaaagagctgaatcacttttggtattttggtataaatattttcatttgttatgtcccagtatattcttactggaaaattcttgttttgatctgcctgaagaaaatatctgttttctatataaaaaaattttttaaaataattgtaaagttagatttaaaattgtaaaatataaaatcacaaaggaatgtaccttatgaatgttgttgacattttatgaaattatgtggattcatattactgttacaagatagaattgaatgcaaaaagaccaaaacctcaataaaatttgaggaaaacgtgttattatgtaattgaaataaaaacattttataattgtgaaaaaaaaag

SEQ ID NO: 377380 - DNA, 3561 bp, Homo sapiens
ctttgcttcagggcctccttgacttcagcaaactgaaattgcagtatactgtgggcgtgtttttccctttcaaattctttgtttttctcttcgtactgccgaaacatggaataatcctaaattcagaaatagctaccaatggagagacttccgacaccctcaataatgttggataccaaggtcctaccaagatgacaaaagaagagttaaatgccctcaagtcgacaggggatgggaccctaggaagagccagtgaagtggaggtgaaaaatgaaatcgtggcgaatgtggggaaaagagaaatcttgcacaatactgagaaagaacaacacacagaggacacagtgaaggactgtgtggacatagaggtattccctgctggtgagaataccgaggaccagaaatcctctgaagacactgccccattcctaggaaccttagcaggtgctacctatgaggaacaggttcaaagccaaattcttgagagcagttctctccctgaaaacacagtacaggttgagtcaaatgaggtcatgggtgcaccagatgacaggaccagaactccccttgagccatccaactgttggagtgacttagatggtgggaaccacacagagaatgtgggagaggcagcagtgactcaggttgaagagcaggcaggcacagtggcctcgtgtcctttagggcatagtgatgacacagtttatcatgatgacaaatgtatggtagaggtcccccaagagttagagacaagcacagggcatagtttagagaaagaattcaccaaccaggaagcagctgagcccaaggaggttccagcgcacagtacagaagtaggtagggatcacaacgaagaagagggtgaagaaacaggattaagggacgagaaaccaatcaagacagaagttcctggttctccagcaggaactgagggcaactgtcaggaagcgacaggtccaagtacagtagacactcaaaatgaacccttagatatgaaagagcccgatgaagaaaagagtgaccaacagggagaggcattggactcatcgcagaagaagacaaagaacaagaaaaagaaaaacaagaagaaaaaatccccagtacccgtagaaacccttaaagatgttaaaaaagagttaacgtatcagaacacagatttaagtgaaattaaggaagaagagcaggtaaagtctactgacagaaagtcagcagtggaagcccaaaacgaggtgactgaaaatccaaaacagaaaattgcagcagaaagcagtgaaaatgttgattgtccggagaatcctaaaattaagttggatggaaaacttgaccaagaaggtgatgatgtacaaacagcagctgaggaggtactagctgatggagacacattagattttgaggatgacaccgttcaatcatcaggcccgagggctggtggtgaagaattagatgaaggtgttgcaaaagataatgctaaaatagatggtgccactcaaagcagtcctgcagaaccaaagagcgaagacgcagatcgctgcaccctgcccgaacatgaaagtccctcacaggacattagtgatgcctgtgaagcagaaagtacagagaggtgtgagatgtcagaacatccaagtcagaccgtcaggaaagctttagacagcaatagcctagagaacgatgacttgtcggcaccaggaagagagccagggcacttcaatccagaaagcagagaagataccagaggagggaatgagaagggcaaaagcaaagaagactgtaccatgtcctaagctgaggcaggcggcaggcgcggtgcacaggaagtctcagtgtgaaggggtcttttctctccactgccaatgtaagtagaatgttctaaattcatagagaggcactgtatgacaattaccaggtgctctactgctttaagttatagactgttacttgtagatttccatgtaatcattgaggttatcacccagattagaaagacatatttgttatcagtgtacgttctaattgagagcattccagtagtatcaaacaataatgtctactgtttatagtccacttaataaaaatagaggcatttactatttgccttaggctgataggaatgtgggttttcttgaccaaatatatcagcatctaattgaaatgaccaaatagcattcttagacttctgtattatgaatataattgatatttaaattaatgtcttgttcacatatgtgtactttcatatttgattttaaaatgtacattataacctgtatggtattttatttaaaggagataaacagccaaatagcaaataggtcactgaatgataagatttgcaccttagaacaataatcattttaaggataacaagtaaatgtctgaaagcatgaggggctttatttgcctttacctcatatgagtctttgatcttgaaccgatacttttggatctcattgttgatatacctgaatttactttgtaagagattttaacttcacttcatgctgatgatgtatcaaattcattttatagaaagatttaaagtttttttctggaagtgatatatgtcaaattacatttcctactgcagtatttgagcagggacagtcattttttaaatgtttttggccgggcgtggtggctcatgcctgtaatctcagtacattgggaggccaaggcaggtggatcacctgaggtcaagagttcgaggccagcctggccaacatggtgaaaccctgtctctactaaaaatacaaaaaattggccgggcgtgatggtgggcgcctgtaatcccagccactccagaggctgaggcaggagaatcgcttgaacctgcgaggcagagattgcagtgagccaagatcaagccattgtactccagcctggacaacaagagcgaaactctgtctaaaaaaaaaaaaaaacacacacacacacaacacaatgttttcacgcctgtaaacctagcacattgggaagccaaggtgggaggattgcttgaggccaggagttcaaggctgcagtgagctatgattgcacactgtactctagcctgggagacagagtgagacactgtctctaaaaaaaaaaaaaaaaaaaaaaaaagtttttgaaccttaaaatactttgtttgaatttctaatcatcattcaaaagagcagtaaaaaatggttacttgttcttgtacaagctactaattagactatagtaggatattttaaagagctgaatcacttttggtattttggtataaatattttcatttgttatgtcccagtatattcttactggaaaattcttgttttgatctgcctgaagaaaatatctgttttctatataaaaaaattttttaaaataattgtaaagttagatttaaaattgtaaaatataaaatcacaaaggaatgtaccttatgaatgttgttgacattttatgaaattatgtggattcatattactgttacaagatagaattgaatgcaaaaagaccaaaacctcaataaaatttgaggaaaacgtgttattatgtaattgaaataaaaacattttataattgtgaaaaaaaaag

SEQ ID NO: 377381 - DNA, 1995 bp, Homo sapiens
ccgtgggacgggcggaggcgcccgagtcccgcttccccggcgcccttccaccccgagcccgactcagcccgcggccacctgcgccccgcccctgtcggccgcgcccgagcccagcgccgcgagccgctccccggcgggctggctcctggccccggaagcgcgagcgttcacttagcggcgagtggctccgtctccgcggacagagcgcgcgccccctggcccggcccgcgaggggctcccggcgcggtccccgagcatttcccgccgggtggagcgggccgagcccggcaggatgaccagccccgcggccgctcaaagccgggagatcgactgtttgagcccggaagcgcagaagctggcggaagcccggctcgctgcaaaacgggcggcccgcgcggaggctcgcgagatccgcatgaaggagctggagcggcagcagaaggaggtagaagagagaccagaaaaagattttactgagaaggggtctcgtaacatgccgggcctgtctgcagccacgctggcctctctgggtgggacttcctctcggagaggcagcggagacacctccatctccatcgacaccgaggcatccatcagggaaatcaaggactctctagcagaagttgaagagaaatataagaaggctatggtttccaatgctcagctagacaatgaaaagacaaacttcatgtaccaggttgataccctaaaagatatgttgctggagcttgaagaacagctggctgaatctaggcggcagtacgaagagaaaaacaaagaatttgaaagggaaaaacacgcccacagtatactgcaatttcagtttgctgaagtcaaggaggccctgaagcaaagagaggaaatgctcgagaaacatggaataatcctaaattcagaaatagctaccaatggagagacttccgacaccctcaataatgttggataccaaggtcctaccaagatgacaaaagaagagttaaatgccctcaagtcgacaggggatgggaccctagatattaggttgaaaaagctggttgatgaacgggaatgcttattggaacagattaagaaactcaaagggcagctggaggagagacagaagattggcaaactagacaatcttcgatctgaagatgatgtcttggaaaacgggacagacatgcatgtaatggacctacaaagggatgccaacagacagatcagcgacctcaaatttaaacttgcaaaatctgagcaagagataactgcattagaacaaaatgtaataaggttagagagtcaagtatcacgttacaaatcagcggctgaaaatgcagaaaaaatagaagatgaacttaaggcagaaaaacggaaactccaaagagagattatatatctttgaatgatgcaggccactgcagtggtggagacagcatctggtaaaggctaccacagtaatggaggcaacctccaaaaagggaatttcaactttttaaagatacagagaaggatttgccatcaatgtgctgtcagaagataatgcagagagccataaaagcagagctgcaccttttaaatgttcactatcagatgtgtcgtcgccattgttgtgatatttacaaacttgtcatggaaaataggaatttatcaagtaattctgctaagaaggaattgggatcagcactactgtctcttttgggggacttaaaagttagatatgtgactttgaaagaaaaaatacacaaaggcataccactggaagagctgcccccactgtcactagaatcaaaattattatctaccttctctacttttgcttccaggctaatgaaaaaagaaacacatgtcttttcagaagcagatgctgaacaagataatcagagggctcatgatgttgatgtttcttcaaacctaaaaaagacactctctcaaatgtctttatcatctgacaatagtcatgctacacaaaacatatcacccaagaaagatgactttaaaaatggtgatataaatgca

SEQ ID NO: 377382 - DNA, 1806 bp, Homo sapiens
ggccggggccgggccggggcggcgcgagcggctggagcaacgggccccgcggcagctgcgggcgacgcggtcgatggacatgggcacccagggatcggggcgcaagcggctccccaaccgggagcggctcacggcggaggacgacgcgctcaaccagatcgcgcgggaggcggaagcccggctcgctgcaaaacgggcggcccgcgcggaggctcgcgagatccgcatgaaggagctggagcggcagcagaaggaggtagaagagagaccagaaaaagattttactgagaaggggtctcgtaacatgccgggcctgtctgcagccacgctggcctctctgggtgggacttcctctcggagaggcagcggagacacctccatctccatcgacaccgaggcatccatcagggaaatcaaggactctctagcagaagttgaagagaaatataagaaggctatggtttccaatgctcagctagacaatgaaaagacaaacttcatgtaccaggttgataccctaaaagatatgttgctggagcttgaagaacagctggctgaatctaggcggcagtacgaagagaaaaacaaagaatttgaaagggaaaaacacgcccacagtatactgcaatttcagtttgctgaagtcaaggaggccctgaagcaaagagaggaaatgctcgagaaacatggaataatcctaaattcagaaatagctaccaatggagagacttccgacaccctcaataatgttggataccaaggtcctaccaagatgacaaaagaagagttaaatgccctcaagtcgacaggggatgggaccctagatattaggttgaaaaagctggttgatgaacgggaatgcttattggaacagattaagaaactcaaagggcagctggaggagagacagaagattggcaaactagacaatcttcgatctgaagatgatgtcttggaaaacgggacagacatgcatgtaatggacctacaaagggatgccaacagacagatcagcgacctcaaatttaaacttgcaaaatctgagcaagagataactgcattagaacaaaatgtaataaggttagagagtcaagtatcacgttacaaatcagcggctgaaaatgcagaaaaaatagaagatgaacttaaggcagaaaaacggaaactccaaagagagattatatatctttgaatgatgcaggccactgcagtggtggagacagcatctggtaaaggctaccacagtaatggaggcaacctccaaaaagggaatttcaactttttaaagatacagagaaggatttgccatcaatgtgctgtcagaagataatgcagagagccataaaagcagagctgcaccttttaaatgttcactatcagatgtgtcgtcgccattgttgtgatatttacaaacttgtcatggaaaataggaatttatcaagtaattctgctaagaaggaattgggatcagcactactgtctcttttgggggacttaaaagttagatatgtgactttgaaagaaaaaatacacaaaggcataccactggaagagctgcccccactgtcactagaatcaaaattattatctaccttctctacttttgcttccaggctaatgaaaaaagaaacacatgtcttttcagaagcagatgctgaacaagataatcagagggctcatgatgttgatgtttcttcaaacctaaaaaagacactctctcaaatgtctttatcatctgacaatagtcatgctacacaaaacatatcacccaagaaagatgactttaaaaatggtgatataaatgca

SEQ ID NO: 377383 - DNA, 835 bp, Homo sapiens
ccgtgggacgggcggaggcgcccgagtcccgcttccccggcgcccttccaccccgagcccgactcagcccgcggccacctgcgccccgcccctgtcggccgcgcccgagcccagcgccgcgagccgctccccggcgggctggctcctggccccggaagcgcgagcgttcacttagcggcgagtggctccgtctccgcggacagagcgcgcgccccctggcccggcccgcgaggggctcccggcgcggtccccgagcatttcccgccgggtggagcgggccgagcccggcaggatgaccagccccgcggccgctcaaagccgggagatcgactgtttgagcccggaagcgcagaagctggcggaagcccggctcgctgcaaaacgggcggcccgcgcggaggctcgcgagatccgcatgaaggagctggagcggcagcagaaggaggaagacagtgagcgctactctcgtagatccagaagaaacacatcggcttctgatgaagacgagcgcatgtcagtgggtagtcgtggaagcctgaggacaaatggttatgatggagaattgtatggatcacagtccctgaatagaagatctggcaggcacatgatggaatgaaagataatgtttttcaactagcaaacattctgagaatgttagccctccaacattctgattgttagtataaggggtagatattgataagaatctcaagttttaaaagatctgaaattaaagattaactctttcattactgtattcccctgggtgtatgtatataatgtgtgtattaagtatattcagctttcaaagatactaaatccaacattttcgcag

SEQ ID NO: 377384 - DNA, 450 bp, Homo sapiens
gggaaagtgcacaattctatcaagttccttagggacgataagtatgatgaaggccagaaatagggaaaggaagagaggattggtagaataaggtccaaatagctgatgggcttgaagaagagcctttgatagaaggagggccatttttccctaatatgaaatgaaaggagataaatatgagagcaatctacctgtacctctttcccttcataaccaagggctattcaacattcatcagagcacctctgatgaaggtgcatagctgggaatggaattcagcacatattgatggtcaggtcctgtgctagatactttatgtaaatcatctcactgcagccctttgaggctgacagcataatcctccctttcaagatgaggaaatcaaggctcagcatggccaagtcaactgcttgtctctttcctctccactgattgccaggtcacattccc

SEQ ID NO: 377385 - DNA, 647 bp, Homo sapiens
tctgaaaacaagcaaacaaaaaacaaaaacaaaaacaaacaaaaaacattgacagctaccttttgagtaaaaagccatcagtacacaataaaatctttctgtgggaaaaaggcaaagaaataaaggttgctactgtgtgaataatttggcatgtctatctagctatatgagcattgtgcttaaaatattaaggaaattaagtatgggctatacaatgtaggcataatgtgtatctgaaaaaatcctgtgtagatggaaagtgtgctgactcagctggttcagtttctgggcctcgtgtgggcccccagcagcttaaccacttctctcaagtccttggtttcctcatgggagaaatgagtatgttgaattagatgacctttcaggcatctcatcatgctgagttttttttccgcagcagggaacatgctactttacattctgtttagggtttgctcagtgaagggggagtaccaggaatctggggaattcccagaatacctgggcactatatatatatatatatttgcaacacatttaatcataaaagattaatatccttaatctctaaaaggattttaaaagtcattaagaaacaatgaccgtcttgctggaaaagtaggtaaaactgatgacttacaaaagaaaaa

SEQ ID NO: 377386 - DNA, 610 bp, Homo sapiens
cgagctcggtacccctccagctggcccaaaggacagggttcgggaagcttctgagagctgaacgtgtggaggctgacagaaggtgaagaactcatccatgtgcctggagggtgatgtaaccccaactctatggagatagaagctcctgctctgggcccttccagaccgccctgtctgtatctcttcatatggctgtttatttctatcctttaaaatatcctttgaggttgggcacggtggctgatgcctgtaatcccagcactttgggaggccaagacaaggggattgctggagctcaggagttcaagaccagccagggcaacagaatgagaccccgtctttgcaaaaactacaaaaaaattagctgggtgtggtggtgtatgcttagagtcccagccacttgcggggtggggcgctgaggcgtggggtttgggggggatggaggctgtagtgagccgagatcatgccactgcactccagcctgggtgacggagccagatcctgccactgcagtcattctggatgacagagtgagaccctgtctcaaaaaagaaagaaaaaaatttttttcctctgtaataaagcaataaacataataagggtttccctg

SEQ ID NO: 377387 - DNA, 356 bp, Homo sapiens
aataaaatggtttaactacacgtaaaaatgtgttcagtgttagagttcaaccagcactgcagaaattacatgtttctgtcagtttaggtttttgatttcttatttccctgttaccaagcatcagcaattattcttgggattattagccctggaattgaaagatatttaatggtactcctgttgcattaatttgtctgagtttatgtagaaaagtattaaaaatgttactgttggagtctgataaaaagttctggtcttttaaaaatatgtgtatgagaaatagcatgaactcaggaggcagagcttgcagtgagctgagatcgtgccactgcactccagcctgggcgacagtgaga

SEQ ID NO: 377388 - DNA, 439 bp, Homo sapiens
ggtcgacgctgaggacagagagaggacccaagcaggcaactagttggaggacttgtacacgtttccttccagcagtatgtcagagaggtggcagcccactggggacagggctgcctgggttctgtgctcgaggggaccttgagcaggctatttaacccttctgtgcctcagttgcctgatctataacatgaaaattagcaatccctactagataaagttggggaatttacagagttaatatttgtaaaggtctgagaatattcctggcagagtaagcactctgtgagtatgacactggcatttcttctgcagcactacatgctgtctatgcctttgtccaagtctgaaaccctagaactcttagaattcagttcaatgtttacacaatcctacagttctgctaggcttctatgatgctactattctgcatttgaatgag

SEQ ID NO: 377389 - DNA, 283 bp, Homo sapiens
ctcaagggaccccagacagccaaactactcttgaaaaagaccaaagttggaagttttatacttcctaatttcagaacatgttacatagctacagtaattaaaacattgtggtataaagtaaaaattgcgtataaggacagatacacaaaccaatagaatagatagcccaaaaataaattttggtatatatggtcaaataatcttcaacagggtaccaaggtcactcacaaggactgtttaacaaatgggaagactgggtatctacatgcaaaaaaataaaaat

SEQ ID NO: 377390 - DNA, 2772 bp, Homo sapiens
  misc_feature (985)..(985): n is a, c, g, or t
  misc_feature (2145)..(2145): n is a, c, g, or t
gttttactatgttgttggctattttatcgttgagttgtaagagttctttgtatattctagatacaaatcccttatcaggtatatgacttgcaaatatcttctcccattctgtgtgttcctttttgactttcttgattgtatgccttgaattaaaaaaaatgcctaattttgatgaattccaagtttatcattttttttaattttttcacctgtgcttttggtgtcatctaaggaggttttgcctatgcggtcatgaatatttactcatctgttttcttctaagagtgataatagtttcagctcttatattgagatatatgatatattttgagttagtttgtgtgtgtgtggtgtgaggtaggggttcagcttcattcttttgcatgtggatatccagttgtctcagtatcaattgttgaaaagacatttcccccttggatagtcttggtgctcttgtcaaaaaccaaataactgtaaatggagcaattgtagtttgaatggaatgggtcagcacttggtggcagcaggggtcttggctatgtagtttcataagctcccactcctggagagcctctgttttcctctcaaagccaggtttttctgtctcgctgcgttttggtgcctgaaaggcttgggtgggcatggtacctggagtactgttgttcggagcacaaagtgaggagaaaagaccactctactttgtgggaggtccttggggcagtttgggcagcagtgcctcccccaggagtcagggtccccaccccagaggaatgtccacagagcagagccattggcctgagctggactgaaaaagaaagagccaggtggggagaggatttgatttctcccttggtctaaagcaggcagctgacattgggtgagggaatggggcaggcctccatgtgctatcgggaatccccaggaggtccctacagaaaacttccacccccagcccagcttgtttatcacagcccttcagtggtancttcctcctgtggcttgatccaaacgggggctgcatatgtggccaaaatgcacataaccctgtgaggcacagcatagcagcttatcttccctgaaagtggaaggacaaaagcaggacaaagatgaccaagccagggtgggagagaggggaggagacactggaaggggaggtgaaggggcagactagggaggccaggaccaaggcagactctcatgcaccaggcatattctgcccagccaagggctctggcattcagatgagggagagggagaggaaagaggagagaatccagtgagaccaatccatgaagtgtcgggaggaccctggaagcaaaggctctggactcaggtggcatcaatgggactaccagtttccagtgaatatgtgggagtggcctaggtccagctcaatcagaagcccatttgttcaaggccctggtattactgaaggcccagccctgtctcacctgccagaaagcacgtggcctctccctggctaggctaagggctggttgacggcatcataaaaggaatctgcctgggagccctcaatttgtttcagtttcctcccccaaggccaagaagggattgggttgcctctgttgttgttgctgctgctgctgctgctgctgctgctgggggttggaaaagaggaatttgtgtgaccagatccccttattgtatagaagaagagaaatgtgagcattcagagatggtgagatgtcagacacccagccacacagccagtgagagacatgttggggacagggccaggcctgccagttcatggcccaggggtctttctcatgagatcaactgaccagtgtgtcttagcacctgccatgcaaatagaaggccctactgctgtcatctccacgtattccagaattactcagctgttctatgcaagccaagtcaacaccaatgtcataaaggagagactaaagtaattctctacacagcacatacacggcatatatggcctgtatgcttcctggacagccaacaggggtgccgagggagtgagtccctcagccttgcctggagccttgctgatacttcagtttgcctcacaaacacggttaccttccatgacatgaaggaggcacacgcgggttgacccctgaccctgtctgcttgttagaatcacgtcgggaaccngggacaggcttagaagcccaggtcccacctcccacctgctgaatccaaatctccagagcgtggcctgggaaatcaaatttgtcagcttccttcccaggggactttgatacatccaccccagtggaaaccagcagcctcctttagtcaagcgaatgtttccctgactgtcaccttctccccctgtataagatgcagattgttagcggtaaatggtacctggattccaacctcagttctccactgcagttggggagatctggccagggcaagccacactgctccttcaggcacagccttgttcatcccgcactcacctgtgttctcttcctctctgtaggacgcacaagaccagccactgctaccgcatcacgtaccgccacatggaacggactctgtcccagagagaggtcaggcacatccaccaggccttgcaggaggctgcagtccagctgttgggtgtggagggcaggttctgatgtcaccacttcactcaggctgcagccctcttggggctccaggatttgctgaaagagaaaaagatatggtttgtgaactggggcatcaatcatcttttgataaatggatcagttttaggactttcagaaaataaaagatcgctcttgaaaa

SEQ ID NO: 377391 - DNA, 1024 bp, Homo sapiens
tacctgaatattacaaaaaggaccataccagaaagtactgacaggggaagttatcctaattcagaaggccatgggaggccacctgaagaagtgatatttagccgaaggtctagaatgatttggaggcaatcagggaaaatagagaagtttgcactctttgtgttcgagtctcaaatgccatccagggcgcctgtgtcttttcgttctggctgctgcctctacctttttctactcctggcattgccttgtggccttctgttcctgagcctcttctgtgtgtgcagggaggcagcaggttgtccagggtgataagaatggtaacgtcatagtaactactgtttattaagcgtttagtttcctgatctcattcagcagccctcagtcacagaaaatgaatgctgagttctcagagtttattgctgtctaagtgggcacgtaggccctagtcagggccctgccaggttcccagggtggggaaggctttctgtaccattacagatcacaagagttcaagaaaaaatgactttatgagctggtgctcaagaccgaatcggctgggcttttggcctaggattagaaaggctagccatgatcctctacgacatccctgatatccgtctcttctggtgtgaggacgagcgcttcctgaagcagttctgtgtatccaacattaatcagaaggtgaagtttcagcctcttagcaaatatccggctgtgatcaatgatatttcattctggttgccctctgagaattacgcagaaaatgatttctatgacttagtccgaacaattggaggagacctggtggaaaaggttgatctcatagacaagtttgtacatccaaagtataaagtaattagagactaagtgacggggagaggagacatcagcaacataattttggaagctgaaaagcagatggagaagtggagcagttaggtttcagtagacccaagaaagctgaaatccaagttggcaggggaacaatcaagaagcaatccagcttgaactacaaaacccccca

SEQ ID NO: 377392 - DNA, 1853 bp, Homo sapiens
cagccgctccacgcggcgggagggcggggaaataagaggactggccgcccgtgcatccagccaagctcctggcggacggatatcggaggcccaggcattcgagggacgtgcagttgcatcacggagagcctttgggaaccgtctggggtcttggcggagacatttgtgtttcgggggcagcgccccttcctacatccaggaggccgcgttgcccgggttaccgaaggccgccgcaccgacgccccgcccctgaccgccgatgcccctcccacgccggctgcggtcgccctcggcgctgcctgagagagtttgcgggatttcaaggaacctgtgagaagtttctacaatggtgggctcagctctcaggagaggtgcccatgcatatgtctacctggtgagtaaggccagtcacatctccagaggccatcagcaccaggcctggggatcgaggcctcctgcagcagagtgtgccacccaaagagctccaggcagtgtggtggagctgctgggcaaatcctaccctcaggacgaccacagcaacctcacccggaaggtcctcaccagagttggcaggaacctgcacaaccagcagcatcaccctctgtggctgatcaaggagagggtgaaggagcacttctacaagcagtatgtgggccgctttgggaccccgttgttctcggtctacgacaacctttctccagtggtcacgacctggcagaactttgacagcctgctcatcccagctgatcaccccagcaggaagaagggggacaactattacctgaatcggactcacatgctgagagcgcacacgtctgcacaccagtgggacttgctgcacgcgggactggatgccttcctggtggtgggtgatgtctacaggcgtgaccagatcgactcccagcactaccctattttccaccagctggaggccgtgcggctcttctccaagcatgagttatttgctggtataaaggatggagaaagcctgcagctctttgaacaaagttctcgctctgcgcataaacaagagacacacaccatggaggccgtgaagcttgtagagtttgatcttaagcaaacgcttaccaggctcatggcacatctttttggagatgagctggagataagatgggtagactgctacttcccttttacacatccttcctttgagatggagatcaactttcatggagaatggctggaagttcttggctgcggggtgatggaacaacaactggtcaattcagctggtgctcaagaccgaatcggctgggcttttggcctaggattagaaaggctagccatgatcctctacgacatccctgatatccgtctcttctggtgtgaggacgagcgcttcctgaagcagttctgtgtatccaacattaatcagaaggtgaagtttcagcctcttagcaaatatccggctgtgatcaatgatatttcattctggttgccctctgagaattacgcagaaaatgatttctatgacttagtccgaacaattggaggagacctggtggaaaaggttgatctcatagacaagtttgtacatccaaagacgcacaagaccagccactgctaccgcatcacgtaccgccacatggaacggactctgtcccagagagaggtcaggcacatccaccaggccttgcaggaggctgcagtccagctgttgggtgtggagggcaggttctgatgtcaccacttcactcaggctgcagccctcttggggctccaggatttgctgaaagagaaaaagatatggtttgtgaactggggcatcaatcatcttttgataaatggatcagttttaggactttcagaaaataaaagatcgctcttgaaaa

SEQ ID NO: 377393 - DNA, 1539 bp, Homo sapiens
tggtcggcagggtggggtttcttggcattcctcaggccgggggatgcgacgtctgggtgtggaggtgatgagctaggggttctgtggcactccggctctgctcagggcgacctgcgtaggggcctctggggcaggcccgctttctgtcaaaatggcagcgcccagcgtgcgcgggtatctctgaagttggggtttaagattcttgcccgtgagagcgaacgagcctgccgtacttctgattttgaaacacctgggtctgggcttcccgggcgagcggtggaacctgtgagaagtttctacaatggtgggctcagctctcaggagaggtgcccatgcatatgtctacctggtgagtaaggccagtcacatctccagaggccatcagcaccaggcctggggatcgaggcctcctgcagcagagtgtgccacccaaagagctccaggcagtgtggtggagctgctgggcaaatcctaccctcaggacgaccacagcaacctcacccggaaggtcctcaccagagttggcaggaacctgcacaaccagcagcatcaccctctgtggctgatcaaggagagggtgaaggagcacttctacaagcagtatgtgggccgctttgggaccccgttgttctcggtctacgacaacctttctccagtggtcacgacctggcagaactttgacagcctgctcatcccagctgatcaccccagcaggaagaagggggacaactattacctgaatcggactcacatgctgagagcgcacacgtctgcacaccagtgggacttgctgcacgcgggactggatgccttcctggtggtgggtgatgtctacaggcgtgaccagatcgactcccagcactaccctattttccaccagctggaggccgtgcggctcttctccaagcatgagttatttgctggtataaaggatggagaaagcctgcagctctttgaacaaagttctcgctctgcgcataaacaagagacacacaccatggaggccgtgaagcttgtagagtttgatcttaagcaaacgcttaccaggctcatggcacatctttttggagatgagctggagataagatgggtagactgctacttcccttttacacatccttcctttgagatggagatcaactttcatggagaatggctggaagttcttggctgcggggtgatggaacaacaactggtcaattcagctggtgctcaagaccgaatcggctgggcttttggcctaggattagaaaggctagccatgatcctctacgacatccctgatatccgtctcttctggtgtgaggacgagcgcttcctgaagcagttctgtgtatccaacattaatcagaaggtgaagtttcagcctcttagcaaatatccggctgtgatcaatgatatttcattctggttgccctctgagaattacgcagaaaatgatttctatgacttagtccgaacaattggaggagacctggtggaaaaggttgatctcatagacaagtttgtacatccaaaggggaaaaagttacttaaaaa

SEQ ID NO: 377394 - DNA, 1349 bp, Homo sapiens
tggtcggcagggtggggtttcttggcattcctcaggccgggggatgcgacgtctgggtgtggaggtgatgagctaggggttctgtggcactccggctctgctcagggcgacctgcgtaggggcctctggggcaggcccgctttctgtcaaaatggcagcgcccagcgtgcgcgggtatctctgaagttggggtttaagattcttgcccgtgagagcgaacgagcctgccgtacttctgattttgaaacacctgggtctgggcttcccgggcgagcggtggaacctgtgagaagtttctacaatggtgggctcagctctcaggagaggtgcccatgcatatgtctacctggtgagtaaggccagtcacatctccagaggccatcagcaccaggcctggggatcgaggcctcctgcagcagagtgtgccacccaaagagctccaggcagtgtggtggagctgctgggcaaatcctaccctcaggacgaccacagcaacctcacccggaaggtcctcaccagagttggcaggaacctgcacaaccagcagcatcaccctctgtggctgatcaaggagagggtgaaggagcacttctacaagcagtatgtgggccgctttgggaccccgttgttctcggtctacgacaacctttctccagtggtcacgacctggcagaactttgacagcctgctcatcccagctgatcaccccagcaggaagaagggggacaactattacctgaatcggactcacatgctgagagcgcacacgtctgcacaccagtgggacttgctgcacgcgggactggatgccttcctggtggtgggtgatgtctacaggcgtgaccagatcgactcccagcactaccctattttccaccagctggaggccgtgcggctcttctccaagcatgagttatttgctggtataaaggatggagaaagcctgcagctctttgaacaaagttctcgctctgcgcataaacaagagacacacaccatggaggccgtgaagcttgtagagtttgatcttaagcaaacgcttaccaggctcatggcacatctttttggagatgagctggagataagatgggtagactgctacttcccttttacacatccttcctttgagatggagatcaactttcatggagaatggctggaagttcttggctgcggggtgatggaacaacaactggtcaattcaggcggcgccacctgactgagagaaaatggaaacacgaggttgctgattgaattctacgcatatctataggcatttcagaaagatctgtctggctcttttctgtaagaccattgcttaataaaaatgatggcttctaaatgtaatt

SEQ ID NO: 377395 - DNA, 405 bp, Homo sapiens
ttccaccgccctctactagcgggagcagtcataaaagcccacccattttcaaggcaagaggtcatagcctgcgcctctcaaagggaggattgtcaaagccgcactggaagatcatgacgcacaagaccagccactgctaccgcatcacgtaccgccacatggaacggactctgtcccagagagaggtcaggcacatccaccaggccttgcaggaggctgcagtccagctgttgggtgtggagggcaggttctgatgtcaccacttcactcaggctgcagccctcttggggctccaggatttgctgaaagagaaaaagatatggtttgtgaactggggcatcaatcatcttttgataaatggatcagttttaggactttcagaaaataaaagatcgctcttgaaaa

SEQ ID NO: 377396 - DNA, 522 bp, Homo sapiens
ggccaatttttgtatttttagtagatggggtttcaccgtgttagccaggatggtctcgatctcctcacctcatgatccacctgcctcagcctcccaaagtgctgggattacaggcatgagccaccctgcctggccaaagtgggacacatttccaataaacaattcctactggaagaggccccacgtttccctggagagggagtgtgctccaatgggaagggttggactttaggatcaggctgacctgatcctgagttcactttctgattcttactggttttgcgagcttccaccaattattcaccctcttgtggtacctcagctactgtaccagtaagatgtagggttaatagacttttgattaaagatggcagattgaacataagctttaacctcagttgcctctcaatacagtaatagtaaagggtttggttttttccctctcaggtataaagtaattagagactaagtgacggggagaggagacatcagcaacataattttggaagctgaaaagcagat

SEQ ID NO: 377397 - DNA, 1808 bp, Homo sapiens
tggtcggcagggtggggtttcttggcattcctcaggccgggggatgcgacgtctgggtgtggaggtgatgagctaggggttctgtggcactccggctctgctcagggcgacctgcgtaggggcctctggggcaggcccgctttctgtcaaaatggcagcgcccagcgtgcgcgggtatctctgaagttggggtttaagattcttgcccgtgagagcgaacgagcctgccgtacttctgattttgaaacacctgggtctgggcttcccgggcgagcggtggaacctgtgagaagtttctacaatggtgggctcagctctcaggagaggtgcccatgcatatgtctacctggtgagtaaggccagtcacatctccagaggccatcagcaccaggcctggggatcgaggcctcctgcagcagagtgtgccacccaaagagctccaggcagtgtggtggagctgctgggcaaatcctaccctcaggacgaccacagcaacctcacccggaaggtcctcaccagagttggcaggaacctgcacaaccagcagcatcaccctctgtggctgatcaaggagagggtgaaggagcacttctacaagcagtatgtgggccgctttgggaccccgttgttctcggtctacgacaacctttctccagtggtcacgacctggcagaactttgacagcctgctcatcccagctgatcaccccagcaggaagaagggggacaactattacctgaatcggactcacatgctgagagcgcacacgtctgcacaccagtgggacttgctgcacgcgggactggatgccttcctggtggtgggtgatgtctacaggcgtgaccagatcgactcccagcactaccctattttccaccagctggaggccgtgcggctcttctccaagcatgagttatttgctggtataaaggatggagaaagcctgcagctctttgaacaaagttctcgctctgcgcataaacaagagacacacaccatggaggccgtgaagcttgtagagtttgatcttaagcaaacgcttaccaggctcatggcacatctttttggagatgagctggagataagatgggtagactgctacttcccttttacacatccttcctttgagatggagatcaactttcatggagaatggctggaagttcttggctgcggggtgatggaacaacaactggtcaattcagctggtgctcaagaccgaatcggctgggcttttggcctaggattagaaaggctagccatgatcctctacgacatccctgatatccgtctcttctggtgtgaggacgagcgcttcctgaagcagttctgtgtatccaacattaatcagaaggtgaagtttcagcctcttagcaaatatccggctgtgatcaatgatatttcattctggttgccctctgagaattacgcagaaaatgatttctatgacttagtccgaacaattggaggagacctggtggaaaaggttgatctcatagacaagtttgtacatccaaagacgcacaagaccagccactgctaccgcatcacgtaccgccacatggaacggactctgtcccagagagaggtcaggcacatccaccaggccttgcaggaggctgcagtccagctgttgggtgtggagggcaggttctgatgtcaccacttcactcaggctgcagccctcttggggctccaggatttgctgaaagagaaaaagatatggtttgtgaactggggcatcaatcatcttttgataaatggatcagttttaggactttcagaaaataaaagatcgctcttgaaaa

SEQ ID NO: 377398 - DNA, 1840 bp, Homo sapiens
tggtcggcagggtggggtttcttggcattcctcaggccgggggatgcgacgtctgggtgtggaggtgatgagctaggggttctgtggcactccggctctgctcagggcgacctgcgtaggggcctctggggcaggcccgctttctgtcaaaatggcagcgcccagcgtgcgcgggtatctctgaagttggggtttaagattcttgcccgtgagagcgaacgagcctgccgtacttctgattttgaaacacctgggtctgggcttcccgggcgagcggtggaacctgtgagaagtttctacaatggtgggctcagctctcaggagaggtgcccatgcatatgtctacctggtgagtaaggccagtcacatctccagaggccatcagcaccaggcctggggatcgaggcctcctgcagcagagtgtgccacccaaagagctccaggcagtgtggtggagctgctgggcaaatcctaccctcaggacgaccacagcaacctcacccggaaggtcctcaccagagttggcaggaacctgcacaaccagcagcatcaccctctgtggctgatcaaggagagggtgaaggagcacttctacaagcagtatgtgggccgctttgggaccccgttgttctcggtctacgacaacctttctccagtggtcacgacctggcagaactttgacagcctgctcatcccagctgatcaccccagcaggaagaagggggacaactattacctgaatcggactcacatgctgagagcgcacacgtctgcacaccagtgggacttgctgcacgcgggactggatgccttcctggtggtgggtgatgtctacaggcgtgaccagatcgactcccagcactaccctattttccaccagctggaggccgtgcggctcttctccaagcatgagttatttgctggtataaaggatggagaaagcctgcagctctttgaacaaagttctcgctctgcgcataaacaagagacacacaccatggaggccgtgaagcttgtagagtttgatcttaagcaaacgcttaccaggctcatggcacatctttttggagatgagctggagataagatgggtagactgctacttcccttttacacatccttcctttgagatggagatcaactttcatggagaatggctggaagttcttggctgcggggtgatggaacaacaactggtcaattcagctggtgctcaagaccgaatcggctgggcttttggcctaggattagaaaggctagccatgatcctctacgacatccctgatatccgtctcttctggtgtgaggacgagcgcttcctgaagcagttctgtgtatccaacattaatcagaaggtgaagtttcagcctcttagcaaatatccggctgtgatcaatgatatttcattctggttgccctctgagaattacgcagaaaatgatttctatgacttagtccgaacaattggaggagacctggtggaaaaggttgatctcatagacaagtttgtacatccaaagacgcacaagaccagccactgctaccgcatcacgtaccgccacatggaacggactctgtcccagagagaggtcaggcacatccaccaggccttgcaggaggctgcagtccagctgttgggtgtggagggcaggttctgatgtcaccacttcactcaggctgcagccctcttggggctccaggatttgctgaaagagaaaaagatatggtttgtgaactggggcatcaatcatcttttgataaatggatcagttttaggactttcagaaaataaaagatcgctcttgaaaaaaataaaaaaaatgggcttgttggccttagcc

SEQ ID NO: 377399 - DNA, 1135 bp, Homo sapiens
tacctgaatattacaaaaaggaccataccagaaagtactgacaggggaagttatcctaattcagaaggccatgggaggccacctgaagaagtgatatttagccgaaggtctagaatgatttggaggcaatcagggaaaatagagaagtttgcactctttgtgttcgagtctcaaatgccatccagggcgcctgtgtcttttcgttctggctgctgcctctacctttttctactcctggcattgccttgtggccttctgttcctgagcctcttctgtgtgtgcagggaggcagcaggttgtccagggtgataagaatggtaacgtcatagtaactactgtttattaagcgtttagtttcctgatctcattcagcagccctcagtcacagaaaatgaatgctgagttctcagagtttattgctgtctaagtgggcacgtaggccctagtcagggccctgccaggttcccagggtggggaaggctttctgtaccattacagatcacaagagttcaagaaaaaatgactttatgagctggtgctcaagaccgaatcggctgggcttttggcctaggattagaaaggctagccatgatcctctacgacatccctgatatccgtctcttctggtgtgaggacgagcgcttcctgaagcagttctgtgtatccaacattaatcagaaggtgaagtttcagcctcttagcaaatatccggctgtgatcaatgatatttcattctggttgccctctgagaattacgcagaaaatgatttctatgacttagtccgaacaattggaggagacctggtggaaaaggttgatctcatagacaagtttgtacatccaaagacgcacaagaccagccactgctaccgcatcacgtaccgccacatggaacggactctgtcccagagagaggtcaggcacatccaccaggccttgcaggaggctgcagtccagctgttgggtgtggagggcaggttctgatgtcaccacttcactcaggctgcagccctcttggggctccaggatttgctgaaagagaaaaagatatggtttgtgaactggggcatcaatcatcttttgataaatggatcagttttaggactttcagaaaataaaagatcgctcttgaaaa

SEQ ID NO: 377400 - DNA, 405 bp, Homo sapiens
ctgcacgcgggactggatgccttcctggtggtgggtgatgtctacaggcgtgaccagatcgactcccagcactaccctattttccaccagctggaggccgtgcggctcttctccaagcatgaggtgagtcttgagatgtttctcatcgctgaaggatgtcatagacattttatgttgaggtcactaacatttagctcgatgagaccagcatagtcatccttgcttgccttattttgccttagtgaatcatccatacttaatgacatcttgtgtataggtgtgccccagtactttttgaccgctttgttgtgttagtaactacagaaattggtaagccttagtttccagttgtctgtccttatcctttctctcaatactgacccgccattctctgggttacttctt

SEQ ID NO: 377401 - DNA, 797 bp, Homo sapiens
aggagaattgactaaatttcctggggaaaaaattcagactaggaaaaacttgttgaataccagctttagggacagtaaccctttctagttcatgttgaggctaattcagtagattagctcctctcctttggatgaggatttccctccccagggtttggttagaattccagggatgcaggcatggggtcgtttgggggcatgtcctagtgtgctgtttttatagactatatatatgtgtccatcagtcaacttatagtatggaaagttttcttctattcaaattgggcgatttggccacttcttgccaaatttcttggttttctgaatactgaaggttggagttgagcaactgcaggtcagtgattttcagaagaggggctcttgagcctgaggaatcaggtctcacgggtagcatgatggtctagcggagaatacttgtgttttccaggggctctcttgaccctcaggcctcaggcccctcttgaccctcatttagatggccgagttagtgtaatatggagaagccctcctctcagccccagcttcacaccacatgcagctcaatgatgataatgccttgatggacaaaatgcaggaggtctaaaagtgtccaggaaaacctaaatttgcttttgtctcctatgtttcatggcttagcttgtgccacttttgttcttcctttttcttgggcccattcttgggcttcgctgctaggtggcatgcctgtattgatacaggaaggaaggaagtggttagatcagcctattcatttctttatttaacctttatatcatcac

SEQ ID NO: 377402 - DNA, 367 bp, Homo sapiens
aagatcatcacatcacaaacagcagatgaaaaaatagcttcctgtgttcctatgaagacaggcactgtggttagtgatagctttcactgaactggatttcaggacagcagttagagattgacatcattacccttctgaatcaagaggcgacatgactgacatcacctttgagtttccagcctcctggtgatattgtttgctgcatcttacaccacatacctcagtcagcttactttgccctgcttccaggcatctgtgaaccatctggcctcttgacggatctggcatatttcatgtagagatgctgaattccaaaactgggcacctaaaggctgagcatgagggaacaggtcttctaatcaggtat

SEQ ID NO: 377403 - DNA, 662 bp, Homo sapiens
tttacagaatggaaattctacttatctggagtaggactatttccccagcctctagacacggaaagaataaccacacgcattggtcttcagtcaactattgttatacctttcaaaaatcccacaatggaagatgtcctcattgatataatactgacaagtgtggaacatcccaggaatcttgtcatggatcattgctgggatagcttcatctatgagagttctgccttcagatttagttctccgagtgaaatacaaggaattgcactgcctcctaaaggaaatatagatatctcattgttatttatacctcaaattatgaaattacacaaaacaatggttattattgagatgacgaaagcaaatggaaaatattggcctattgacaattttgatgagttggatataaaatttaaaagtattgtgggaatcgacagcgaagaaatccaagcaatacactggatataccctattgttggactcccacaagcaccacctcctaaatctcccccagttgtcatacaatgtcagtccaggaagcgggcagaagagaaggtagaaatcatactgaatgctggttttttcggatttagtcttactccagatctgacagaagttttagtgattccaaaaaagaaattcacataatttttgtgaggatccca

SEQ ID NO: 377404 - DNA, 556 bp, Homo sapiens
gctattgtttctgctgttaatcattgatcttcttcagttagggcatgaagaagatgattttttttcctcacaaattgatgtgaacagtctgtcactgtgggcttcatctttaatatcgtctcatcccttcttaaactgagttatccatttgtaaactgctgatttgtttggggcattgatctcataaacttgttgtaaagtatcaatgatttcaccattcttccacccacacttcaccataaatttgatacttgttcttgcttcagtttaattggggctcttttcaaactgatgtcttaaccttgttagtgccttaaactagatcctattcagacatgttataacaagttagtatgagtttgtttcagtgcaaaacattttgaacttcatgcatagttttttttataatacacattttccatgaacattttgaagacccctcatattttgcaaattaagtaaaatggtaacggatagtaatttaggcctcttgtcccttgaaaatttgtagacctatgaagattaaaatttaaaaattctaaaaaaaaatctgtga

SEQ ID NO: 377405 - DNA, 732 bp, Homo sapiens
caggcgggggcggggagccgggagcacggtggagcggtggagggcgtcactgggtttcggcgtctggcaagcggttcagctgtctgctccctagcagccggccttcgggtcgggcgtctccgccggctactgccgcttcagttctcccggtgtggccacgagtcgggttgcactgctgtgatccatcctcatctcctaaagatgcatcctgacttatctccacacttgcacactgaagaatgcaacgtcttgattaacttgcttaaggaatgtcacaaaaatcacaacattctgaaattttttggttattgtaatgatgttgatcgggagttgagaaaatgcctgaagaatgagtacgtagaaaacaggaccaagagcagggagcatggcattgcaatgcgaaagaaactttttaatcctccagaggaatccgaaaaataaattgtattttcactcgatgccttggctgagagaagacctaaagactctgggttgatacctgaaagaatcctgtcttatttggtctccataatcctttgaatggaaagtgacctgtgagagattgaaccatggagaaatatgaaaaccctggattctgagtatttgttgggcagggcgtttagtactgtctcccctttaccagcaaacctgacttcaccatgtttattccctttgcctacaaccagttaatatctgagtaacttatctccttcaataaaataatttaaataa

SEQ ID NO: 377406 - DNA, 729 bp, Homo sapiens
cagaagcggtgtattgcgcctcagcatggaggaggacgtgaaggcgtacggagtctgggagtagtacaccacgtagattttggatataagtaatgtgcaggtttcttacatgggtacattggatgacactgaggtttggggtactgttgatcccatcatgcaggttgcactgctgtgatccatcctcatctcctaaagatgcatcctgacttatctccacacttgcacactgaagaatgcaacgtcttgattaacttgcttaaggaatgtcacaaaaatcacaacattctgaaattttttggttattgtaatgatgttgatcgggagttgagaaaatgcctgaagaatgagtacgtagaaaacaggaccaagagcagggagcatggcattgcaatgcgaaagaaactttttaatcctccagaggaatccgaaaaataaattgtattttcactcgatgccttggctgagagaagacctaaagactctgggttgatacctgaaagaatcctgtcttatttggtctccataatcctttgaatggaaagtgacctgtgagagattgaaccatggagaaatatgaaaaccctggattctgagtatttgttgggcagggcgtttagtactgtctcccctttaccagcaaacctgacttcaccatgtttattccctttgcctacaaccagttaatatctgagtaacttatctccttcaataaaataatttaaataa

SEQ ID NO: 377407 - DNA, 842 bp, Homo sapiens
caggcgggggcggggagccgggagcacggtggagcggtggagggcgtcactgggtttcggcgtctggcaagcggttcagctgtctgctccctagcagccggccttcgggtcgggcgtctccgccggctactgccgcttcagttctcccggtgtggccacgagtcgggttgcactgctgtgatccatcctcatctcctaaagatgcatcctgacttatctccacacttgcacactgaagaatgcaacgtcttgattaacttgcttaaggaatgtcacaaaaatcacaacattctgaaattttttggttattgtaatgatgttgatcgggagttgagaaaatgcctgaagaatgaggttcttgctctgtcacctaagctggagtgcagtagggtgatcgtaactcacggaagcctcaaactcaagtgatcctcccacctcagcctcctgagtagctaggacgacagtacgtagaaaacaggaccaagagcagggagcatggcattgcaatgcgaaagaaactttttaatcctccagaggaatccgaaaaataaattgtattttcactcgatgccttggctgagagaagacctaaagactctgggttgatacctgaaagaatcctgtcttatttggtctccataatcctttgaatggaaagtgacctgtgagagattgaaccatggagaaatatgaaaaccctggattctgagtatttgttgggcagggcgtttagtactgtctcccctttaccagcaaacctgacttcaccatgtttattccctttgcctacaaccagttaatatctgagtaacttatctccttcaataaaataatttaaataa

SEQ ID NO: 377408 - DNA, 628 bp, Homo sapiens
cttctttgtaagaagaaccaggataatttgttcatttgtatagttgatccttgaacagcttggaagttcggggcactgacccccatgcagttgaaagtccacatataactttttgactccccaaaaacttgtctgagagtttcctgttgtctgaaagccttactgatagcataaatagcacaacattctgaaattttttggttattgtaatgatgttgatcgggagttgagaaaatgcctgaagaatgagtacgtagaaaacaggaccaagagcagggagcatggcattgcaatgcgaaagaaactttttaatcctccagaggaatccgaaaaataaattgtattttcactcgatgccttggctgagagaagacctaaagactctgggttgatacctgaaagaatcctgtcttatttggtctccataatcctttgaatggaaagtgacctgtgagagattgaaccatggagaaatatgaaaaccctggattctgagtatttgttgggcagggcgtttagtactgtctcccctttaccagcaaacctgacttcaccatgtttattccctttgcctacaaccagttaatatctgagtaacttatctccttcaataaaataatttaaataa

SEQ ID NO: 377409 - DNA, 912 bp, Homo sapiens
caggcgggggcggggagccgggagcacggtggagcggtggagggcgtcactgggtttcggcgtctggcaagcggttcagctgtctgctccctagcagccggccttcgggtcgggcgtctccgccggctactgccgcttcagttctcccggtgtggccacgagtcggcagtagccatcctaatggatatgggttggttcctgttttctatttggaactttaaaaaaaattaaagcaggttgcactgctgtgatccatcctcatctcctaaagatgcatcctgacttatctccacacttgcacactgaagaatgcaacgtcttgattaacttgcttaaggaatgtcacaaaaatcacaacattctgaaattttttggttattgtaatgatgttgatcgggagttgagaaaatgcctgaagaatgaggttcttgctctgtcacctaagctggagtgcagtagggtgatcgtaactcacggaagcctcaaactcaagtgatcctcccacctcagcctcctgagtagctaggacgacagtacgtagaaaacaggaccaagagcagggagcatggcattgcaatgcgaaagaaactttttaatcctccagaggaatccgaaaaataaattgtattttcactcgatgccttggctgagagaagacctaaagactctgggttgatacctgaaagaatcctgtcttatttggtctccataatcctttgaatggaaagtgacctgtgagagattgaaccatggagaaatatgaaaaccctggattctgagtatttgttgggcagggcgtttagtactgtctcccctttaccagcaaacctgacttcaccatgtttattccctttgcctacaaccagttaatatctgagtaacttatctccttcaataaaataatttaaataa

SEQ ID NO: 377410 - DNA, 899 bp, Homo sapiens
caggcgggggcggggagccgggagcacggtggagcggtggagggcgtcactgggtttcggcgtctggcaagcggttcagctgtctgctccctagcagccggccttcgggtcgggcgtctccgccggctactgccgcttcagttctcccggtgtggccacgagtcgggttgcactgctgtgatccatcctcatctcctaaagatgcatcctgacttatctccacacttgcacactgaagaatgcaacgtcttgattaacttgcttaaggaatgtcacaaaaatgaaacgtgcatcatatctgcaacttactcggttcagaagaaaagctcgggtgtatatcacaacattctgaaattttttggttattgtaatgatgttgatcgggagttgagaaaatgcctgaagaatgaggttcttgctctgtcacctaagctggagtgcagtagggtgatcgtaactcacggaagcctcaaactcaagtgatcctcccacctcagcctcctgagtagctaggacgacagtacgtagaaaacaggaccaagagcagggagcatggcattgcaatgcgaaagaaactttttaatcctccagaggaatccgaaaaataaattgtattttcactcgatgccttggctgagagaagacctaaagactctgggttgatacctgaaagaatcctgtcttatttggtctccataatcctttgaatggaaagtgacctgtgagagattgaaccatggagaaatatgaaaaccctggattctgagtatttgttgggcagggcgtttagtactgtctcccctttaccagcaaacctgacttcaccatgtttattccctttgcctacaaccagttaatatctgagtaacttatctccttcaataaaataatttaaataa

SEQ ID NO: 377411 - DNA, 940 bp, Homo sapiens
cacattgtgctgatccattgtctgttggactcttgggttgcttccatgttttaattattgtgaataatatgccgtgaacatgggtgttcaaatatctcttcaaaaccctgcatttaattcttatgaaaatatagccggaagtggaattgttggatcatatggtaatttcatttttaattttttgaggaactgctataccggtttccacagtggctatcccagtttacatgcccgcccacagtgcgcaggagtttcagtttctccatatcctctttagcgtttgttattttctgttttttttcagcagtagccatcctaatggatatgggttggttcctgttttctatttggaactttaaaaaaaattaaagcaggttgcactgctgtgatccatcctcatctcctaaagatgcatcctgacttatctccacacttgcacactgaagaatgcaacgtcttgattaacttgcttaaggaatgtcacaaaaatcacaacattctgaaattttttggttattgtaatgatgttgatcgggagttgagaaaatgcctgaagaatgagtacgtagaaaacaggaccaagagcagggagcatggcattgcaatgcgaaagaaactttttaatcctccagaggaatccgaaaaataaattgtattttcactcgatgccttggctgagagaagacctaaagactctgggttgatacctgaaagaatcctgtcttatttggtctccataatcctttgaatggaaagtgacctgtgagagattgaaccatggagaaatatgaaaaccctggattctgagtatttgttgggcagggcgtttagtactgtctcccctttaccagcaaacctgacttcaccatgtttattccctttgcctacaaccagttaatatctgagtaacttatctccttcaataaaataatttaaataa

SEQ ID NO: 377412 - DNA, 1018 bp, Homo sapiens
caggcgggggcggggagccgggagcacggtggagcggtggagggcgtcactgggtttcggcgtctggcaagcggttcagctgtctgctccctagcagccggccttcgggtcgggcgtctccgccggctactgccgcttcagttctcccggtgtggccacgagtcgggaactgctataccggtttccacagtggctatcccagtttacatgcccgcccacagtgcgcaggagtttcagtttctccatatcctctttagcgtttgttattttctgttttttttcagcagtagccatcctaatggatatgggttggttcctgttttctatttggaactttaaaaaaaattaaagcaggttgcactgctgtgatccatcctcatctcctaaagatgcatcctgacttatctccacacttgcacactgaagaatgcaacgtcttgattaacttgcttaaggaatgtcacaaaaatggcactagaacagttatattcagcgctgacacttctgattataatggaattattctaaaagtatctgctctttgatggctaccattctgtgtttaatgcacaacattctgaaattttttggttattgtaatgatgttgatcgggagttgagaaaatgcctgaagaatgagtacgtagaaaacaggaccaagagcagggagcatggcattgcaatgcgaaagaaactttttaatcctccagaggaatccgaaaaataaattgtattttcactcgatgccttggctgagagaagacctaaagactctgggttgatacctgaaagaatcctgtcttatttggtctccataatcctttgaatggaaagtgacctgtgagagattgaaccatggagaaatatgaaaaccctggattctgagtatttgttgggcagggcgtttagtactgtctcccctttaccagcaaacctgacttcaccatgtttattccctttgcctacaaccagttaatatctgagtaacttatctccttcaataaaataatttaaataa

SEQ ID NO: 377413 - DNA, 616 bp, Homo sapiens
caggcgggggcggggagccgggagcacggtggagcggtggagggcgtcactgggtttcggcgtctggcaagcggttcagctgtctgctccctagcagccggccttcgggtcgggcgtctccgccggctactgccgcttcagttctcccggtgtggccacgagtcggcacaacattctgaaattttttggttattgtaatgatgttgatcgggagttgagaaaatgcctgaagaatgagtacgtagaaaacaggaccaagagcagggagcatggcattgcaatgcgaaagaaactttttaatcctccagaggaatccgaaaaataaattgtattttcactcgatgccttggctgagagaagacctaaagactctgggttgatacctgaaagaatcctgtcttatttggtctccataatcctttgaatggaaagtgacctgtgagagattgaaccatggagaaatatgaaaaccctggattctgagtatttgttgggcagggcgtttagtactgtctcccctttaccagcaaacctgacttcaccatgtttattccctttgcctacaaccagttaatatctgagtaacttatctccttcaataaaataatttaaataa

SEQ ID NO: 377414 - DNA, 465 bp, Homo sapiens
  misc_feature (3)..(3): n is a, c, g, or t
ggnccgctctagagtatcccctgagcccaggagttctgggctgaagcgatcctcctgcctcagcctcctgagtagctaggacgacagtacgtagaaaacaggaccaagagcagggagcatggcattgcaatgcgaaagaaactttttaatcctccagaggaatccgaaaaataaattgtattttcactcgatgccttggctgagagaagacctaaagactctgggttgatacctgaaagaatcctgtcttatttggtctccataatcctttgaatggaaagtgacctgtgagagattgaaccatggagaaatatgaaaaccctggattctgagtatttgttgggcagggcgtttagtactgtctcccctttaccagcaaacctgacttcaccatgtttattccctttgcctacaaccagttaatatctgagtaacttatctccttcaataaaataatttaaataa

SEQ ID NO: 377415 - DNA, 1108 bp, Homo sapiens
caggcgggggcggggagccgggagcacggtggagcggtggagggcgtcactgggtttcggcgtctggcaagcggttcagctgtctgctccctagcagccggccttcgggtcgggcgtctccgccggctactgccgcttcagttctcccggtgtggccacgagtcgggttgcactgctgtgatccatcctcatctcctaaagatgcatcctgacttatctccacacttgcacactgaagaatgcaacgtcttgattaacttgcttaaggaatgtcacaaaaatcacaacattctgaaattttttggttattgtaatgatgttgatcgggagttgagaaaatgcctgaagaatgaggctgtttttcccttcctggattccctttaaattgtgacattcacctttactgtttgaagaactttttggagtactcagtgaagagtaatagtttgtttctttttttcttttttcttttgagactgagaccctatctctaaaaaataatattggccgggtgtggtggcccacgcctataatcccagcattctgagaggccaagacaggcggatcacctgaggtcaggagtttgagaccagcctagccaacatggtgaaacccagctctactgaaagtacaaaaaaattagccaggcatggtggcgggcgcctgtagttccagctactcgggaggctgaggcaggagaataacttgagcctgggagacggaggttgcgtacgtagaaaacaggaccaagagcagggagcatggcattgcaatgcgaaagaaactttttaatcctccagaggaatccgaaaaataaattgtattttcactcgatgccttggctgagagaagacctaaagactctgggttgatacctgaaagaatcctgtcttatttggtctccataatcctttgaatggaaagtgacctgtgagagattgaaccatggagaaatatgaaaaccctggattctgagtatttgttgggcagggcgtttagtactgtctcccctttaccagcaaacctgacttcaccatgtttattccctttgcctacaaccagttaatatctgagtaacttatctccttcaataaaataatttaaataa

SEQ ID NO: 377416 - DNA, 530 bp, Homo sapiens
acacttcgagctggacccactttcagagtagctgtaggtaggaaagtaaacatcagaactagcctagtccttgttacgattagtactttggatttgatttttcctgtaaaacagatgcagtcatcttgtttgacctcagtaaccccagacagtacgtagaaaacaggaccaagagcagggagcatggcattgcaatgcgaaagaaactttttaatcctccagaggaatccgaaaaataaattgtattttcactcgatgccttggctgagagaagacctaaagactctgggttgatacctgaaagaatcctgtcttatttggtctccataatcctttgaatggaaagtgacctgtgagagattgaaccatggagaaatatgaaaaccctggattctgagtatttgttgggcagggcgtttagtactgtctcccctttaccagcaaacctgacttcaccatgtttattccctttgcctacaaccagttaatatctgagtaacttatctccttcaataaaataatttaaataa

SEQ ID NO: 377417 - DNA, 678 bp, Homo sapiens
caggcgggggcggggagccgggagcacggtggagcggtggagggcgtcactgggtttcggcgtctggcaagcggttcagctgtctgctccctagcagccggccttcgggtcgggcgtctccgccggctactgccgcttcagttctcccggtgtggccacgagtcgggttgcactgctgtgatccatcctcatctcctaaagatgcatcctgacttatctccacacttgcacactgaagaatgcaacgtcttgattaacttgcttaaggaatgtcacaaaaatcacaacattctgaaattttttggttattgtaatgatgttgatcgggagttgagaaaatgcctgaagaatgagtacgtagaaaacaggaccaagagcagggagcatggcattgcaatgcgaaagaaactttttaatcctccagaggaatccgatgggttgatacctgaaagaatcctgtcttatttggtctccataatcctttgaatggaaagtgacctgtgagagattgaaccatggagaaatatgaaaaccctggattctgagtatttgttgggcagggcgtttagtactgtctcccctttaccagcaaacctgacttcaccatgtttattccctttgcctacaaccagttaatatctgagtaacttatctccttcaataaaataatttaaataa

SEQ ID NO: 377418 - DNA, 660 bp, Homo sapiens
caggcgggggcggggagccgggagcacggtggagcggtggagggcgtcactgggtttcggcgtctggcaagcggttcagctgtctgctccctagcagccggccttcgggtcgggcgtctccgccggctactgccgcttcagttctcccggtgtggccacgagtcgggttgcactgctgtgatccatcctcatctcctaaagatgcatcctgacttatctccacacttgcacactgaagaatgcaacgtcttgattaacttgcttaaggaatgtcacaaaaattacgtagaaaacaggaccaagagcagggagcatggcattgcaatgcgaaagaaactttttaatcctccagaggaatccgaaaaataaattgtattttcactcgatgccttggctgagagaagacctaaagactctgggttgatacctgaaagaatcctgtcttatttggtctccataatcctttgaatggaaagtgacctgtgagagattgaaccatggagaaatatgaaaaccctggattctgagtatttgttgggcagggcgtttagtactgtctcccctttaccagcaaacctgacttcaccatgtttattccctttgcctacaaccagttaatatctgagtaacttatctccttcaataaaataatttaaataa

SEQ ID NO: 377419 - DNA, 830 bp, Homo sapiens
caggcgggggcggggagccgggagcacggtggagcggtggagggcgtcactgggtttcggcgtctggcaagcggttcagctgtctgctccctagcagccggccttcgggtcgggcgtctccgccggctactgccgcttcagttctcccggtgtggccacgagtcgggttgcactgctgtgatccatcctcatctcctaaagatgcatcctgacttatctccacacttgcacactgaagaatgcaacgtcttgattaacttgcttaaggaatgtcacaaaaatggcactagaacagttatattcagcgctgacacttctgattataatggaattattctaaaagtatctgctctttgatggctaccattctgtgtttaatgcacaacattctgaaattttttggttattgtaatgatgttgatcgggagttgagaaaatgcctgaagaatgagtacgtagaaaacaggaccaagagcagggagcatggcattgcaatgcgaaagaaactttttaatcctccagaggaatccgaaaaataaattgtattttcactcgatgccttggctgagagaagacctaaagactctgggttgatacctgaaagaatcctgtcttatttggtctccataatcctttgaatggaaagtgacctgtgagagattgaaccatggagaaatatgaaaaccctggattctgagtatttgttgggcagggcgtttagtactgtctcccctttaccagcaaacctgacttcaccatgtttattccctttgcctacaaccagttaatatctgagtaacttatctccttcaataaaataatttaaataa

SEQ ID NO: 377420 - DNA, 959 bp, Homo sapiens
caggcgggggcggggagccgggagcacggtggagcggtggagggcgtcactgggtttcggcgtctggcaagcggttcagctgtctgctccctagcagccggccttcgggtcgggcgtctccgccggctactgccgcttcagttctcccggtgtggccacgagtcgggttgcactgctgtgatccatcctcatctcctaaagatgcatcctgacttatctccacacttgcacactgaagaatgcaacgtcttgattaacttgcttaaggaatgtcacaaaaatcacaacattctgaaattttttggttattgtaatgatgttgatcgggagttgagaaaatgcctgaagaatgaggttcttgctctgtcacctaagctggagtgcagtagggtgatcgtaactcacggaagcctcaaactcaagtgatcctcccacctcagcctcctgagtagctaggacgacagtacgtagaaaacaggaccaagagcagggagcatggcattgcaatgcgaaagaaactttttaatcctccagaggaatccgaaaaataaattgtattttcactcgatgccttggctgagagaagacctaaagactctgggttgatacctgaaagaatcctgtcttatttggtctccataatcctttgaatggaaagtgacctgtgagagattgaaccatggagaaatatgaaaaccctggattctgagtatttgttgggcagggcgtttagtactgtctcccctttaccagcaaacctgacttcaccatgtttattccctttgcctacaaccagttaatatctgagtaacttatctccttcaataaaataatttaaataaaaaaaaaaaaaaaaccggggctcttttcgggggggaaagagctttgaagggcctggcctatggtccgcccttcggcagggaacatccgcgccctagggcgatcgaacggacggaacg

SEQ ID NO: 377421 - DNA, 1016 bp, Homo sapiens
caggcgggggcggggagccgggagcacggtggagcggtggagggcgtcactgggtttcggcgtctggcaagcggttcagctgtctgctccctagcagccggccttcgggtcgggcgtctccgccggctactgccgcttcagttctcccggtgtggccacgagtcgggttgcactgctgtgatccatcctcatctcctaaagatgcatcctgacttatctccacacttgcacactgaagaatgcaacgtcttgattaacttgcttaaggaatgtcacaaaaatcacaacattctgaaattttttggttattgtaatgatgttgatcgggagttgagaaaatgcctgaagaatgaggttcttgctctgtcacctaagctggagtgcagtagggtgatcgtaactcacggaagcctcaaactcaagtgatcctcccacctcagcctcctgagtagctaggacgacagggaccatctggacttcctttggagatgtcttagcatattttaatgtagactatattttaatttgctttgtaacttattttattggcctgctacaaagtattatcttctgaagagtttcccttaagacccttctcaacctgattgctgggggcaatccagtagacgtgattaaagtacgtagaaaacaggaccaagagcagggagcatggcattgcaatgcgaaagaaactttttaatcctccagaggaatccgaaaaataaattgtattttcactcgatgccttggctgagagaagacctaaagactctgggttgatacctgaaagaatcctgtcttatttggtctccataatcctttgaatggaaagtgacctgtgagagattgaaccatggagaaatatgaaaaccctggattctgagtatttgttgggcagggcgtttagtactgtctcccctttaccagcaaacctgacttcaccatgtttattccctttgcctacaaccagttaatatctgagtaacttatctccttcaataaaataatttaaataa

SEQ ID NO: 377422 - DNA, 544 bp, Homo sapiens
caggcgggggcggggagccgggagcacggtggagcggtggagggcgtcactgggtttcggcgtctggcaagcggttcagctgtctgctccctagcagccggccttcgggtcgggcgtctccgccggctactgccgcttcagttctcccggtgtggccacgagtcggtacgtagaaaacaggaccaagagcagggagcatggcattgcaatgcgaaagaaactttttaatcctccagaggaatccgaaaaataaattgtattttcactcgatgccttggctgagagaagacctaaagactctgggttgatacctgaaagaatcctgtcttatttggtctccataatcctttgaatggaaagtgacctgtgagagattgaaccatggagaaatatgaaaaccctggattctgagtatttgttgggcagggcgtttagtactgtctcccctttaccagcaaacctgacttcaccatgtttattccctttgcctacaaccagttaatatctgagtaacttatctccttcaataaaataatttaaataa

SEQ ID NO: 377423 - DNA, 1034 bp, Homo sapiens
cccgccctctccccgtctctccccgcccctccccgtccctcccgccgaagctccgtcccgcccgcgggccggctccgccctcacctcccggccgcggctgccctctgcccgggttgtccaagatggagggcgctccaccggggtcgctcgccctccggctcctgctgttcgtggcgctacccgcctccggctggctgacgacgggcgcccccgagccgccgccgctgtccggagccccacaggacggcatcagaattaatgtaactacactgaaagatgatggggacatatctaaacagcaggttgttcttaacataacctatgagagtggacaggtgtatgtaaatgacttacctgtaaatagtggtgtaacccgaataagctgtcagactttgatagtgaagaatgaaaatcttgaaaatttggaggaaaaagaatattttggaattgtcagtgtaaggattttagttcatgagtggcctatgacatctggttccagtttgcaactaattgtcattcaagaagaggtagtagagattgatggaaaacaagttcagcaaaaggatgtcactgaaattgatattttagttaagaaccggggagtactcagacattcaaactataccctccctttggaagaaagcatgctctactctatttctcgagacagtgacattttatttacccttcctaacctctccaaaaaagaaagtgttagttcactgcaaaccactagccagtatcttatcaggaatgtggaaaccactgtagatgaagatgttttacctggcaagttacctgaaactcctctcagagcagagccgccatcttcatattaaggtaatgtgtcagtggatggaaaagtttagaaaagatctgtgtaggttctggagcaacgttttcccagtattctttcagtttttgaacatcatggtggttggaattacaggagcagctgtggtaataaccatcttaaaggtgtttttcccagtttctgaatacaagtaagtatttcttatttttgaaatgttagt

SEQ ID NO: 377424 - DNA, 299 bp, Homo sapiens
aagctccgtcccgcccgcgggccggctccgccctcacctcccggccgcggctgccctctgcccgggttgtccaagatggagggcgctccaccggggtcgctcgccctccggctcctgctgttcgtggcgctacccgcctccggctggctgacgacgggcgcccccgagccgccgccgctgtccggagccccacaggtagggcagggcgggcctggctggccgctttacgactccgactctccgggaggcccgggctgtccacagtgacgcttcccacatcccaccggcgggcaggggcg

SEQ ID NO: 377425 - DNA, 692 bp, Homo sapiens
  misc_feature (17)..(17): n is a, c, g, or t
aacacatcgagccggtnccagcaggctgggcccagattagatgtcagactttgatagtgaagaatgaaaatcttgaaaatttggaggaaaaagaatattttggaattgtcagtgtaaggattttagttcatgagtggcctatgacatctggttccagtttgcaactaattgtcattcaagaagaggtagtagagattgatggaaaacaagttcagcaaaaggatgtcactgaaattgatattttagttaagaaccggggagtactcagacattcaaactataccctccctttggaagaaagcatgctctactctatttctcgagacagtgacattttatttacccttcctaacctctccaaaaaagaaagtgttagttcactgcaaaccactagccagtatcttatcaggaatgtggaaaccactgtagatgaagatgttttacctggcaagttacctgaaactcctctcagagcagagccgccatcttcatattaaggtaatgtgtcagtggatggaaaagtttagaaaagatctgtgtaggttctggagcaacgttttcccagtattctttcagtttttgaacatcatggtggttggaattacaggagcagctgtggtaataaccatcttaaaggtgtttttcccagtttctgaatacaagtaagtatttcttatttttgaaatgttagt

SEQ ID NO: 377426 - DNA, 416 bp, Homo sapiens
aatcacttgaaacccaggaggcagaggttgcagtgagccaagattgcaccactgcactccagcctgggtgacagtgagactccgtctcaaaaataaataaataaattatactagaatattaaactattaaactaaaaataaacacagttttcctgttcttagaaggaatatgtattttcgggatgtaaatatggttaaaaaccagtagcttcttccctactatcaaagatccttaccttagactacttttagttccattctttttaaattttctttttatgtaaaacttttccttttttaaattttttgttttattttgagacagtctcgccctatcacccaggccggagtgcagttgcagtgggttgaggttgtgccactgcactccagcttaggcaataaaacaagactgtctc

SEQ ID NO: 377427 - DNA, 681 bp, Homo sapiens
actgattaagtgtgtctcttctaggataaagcaatttcacatgaagtccccccaaatggaaagatatcagctatctgtcattggaggccccagcacctataagcacatctcccccttggatgccagtgggcaaagattccgggaaactatggaggaattttctctctgagacagagcaagagagggagaccctgatgacttcttcgccccatgtcagcaggaagtagttacagaagacccacgacgtccttacaaccagagcttttcagggtctccatctcttgaggagggaaatattagggtaggcaggtaggcaggcatgagcaggcaagagagcccttgggaaaggaatctttagaaacgcagcccactgatagcttccttggtgatgctgcccacagacagtcagcacttctctaataacccatcctagaacagccttttgcttttttttttttttttttttttttttttgagacaagttcttgctctgtctcccaggctggagtacaatggtgcgatctcggctcactgcaccctccacctcccaggttcaattgattctcctgtttcagcctcctcagtagctgggactacaggcatgtgccgccatgcccggctaattttgtatttttagtagagatggggtttcaccatgttggtcaggctagtctcaaactc

SEQ ID NO: 377428 - DNA, 299 bp, Homo sapiens
atatgtgtggttgcgtgggagcattaaaataagctaaagaaccaagagatattgaagtctccccaaaatctccccccactgtactgtttgcaggaagtgacaggcttgagattgaaagacagatcttataccttgcatgctgtatccacgccaaaagaaaatcctctgcacacacacagaaatctaactggagccaaagaaatgggctaaataatttcataatgcttagaactaatatccacttacctgtgataaaggattcaagaagcacataatttatttatctatttatttttgag

SEQ ID NO: 377429 - DNA, 403 bp, Homo sapiens
tcagagcctcacctgacttgggtagaacacaaggaggtggatgaatagcatcgtgtggctggcggcttcccagatcacgggttttatctagtcttaaagcaaaacacaaaaccacctcctttctgccagtaggtggcactgcaggccggcacgcagctgctggcagtagtcaagtgattctacccactgatttacttttctctcccactgacttagtgctgcgctggactctccccacggttagctctagccagccaaaaaggacttcaggtgctctggaaatgtttgctaaatatgcccgagtgacgagccgattgctcttgccggcaattactgtgattgtgtgtatggatgcacacatattaagtttgtgcaacaggataaaaatcgtacacgtacgtgt

SEQ ID NO: 377430 - DNA, 576 bp, Homo sapiens
gtactctggaggcaaactgcttctgagcctctggagaatgggagagttttagtccagggctcaaccttcacctaccaggatatcctagctgggctggttgggtatgtgcctagtgtccctggcatggtcgtggatgagttccagttctccctcactgatggcctccacgtggacacagggaggatgaagatctacacagaactgcctgcaagtgacacacctcacttggctataaaccaaggcctacagctctcagcagggtctgtagcacgcatcacagaacagcacttgaaagtgacagatattgactcagatgaccatcaggttatgtacatcatgaaggaagatcctggtgcagggcgcctgcagatgatgaagcatggcaacctggagcaaatttctattaaaggccccatccgaagtttcacccaggcagacattagccaaggtcagccagttctcttctgcctaccaggcttccgtggactgcacctacactagtaaaatgagaattaaatatctggtagtctatggcaataaactgtgcactctttgttttgaggagcttcatttgtt

SEQ ID NO: 377431 - DNA, 528 bp, Homo sapiens
tgactcaagggaaaattagtaaattgaaatgtcggtactctttcactagggaaattataatttattcagctggaaactgagaagggcaagtgcctggtacctagatccaatgaatatgtgataatttagcctccagtctcctaaaatcatttgacatcccgttcaaaggaaatgttggggaataacctactctcttccgttctcttccaagggtctgtagcacgcatcacagaacagcacttgaaagtgacagatattgactcagatgaccatcaggttatgtacatcatgaaggaagatcctggtgcagggcgcctgcagatgatgaagcatggcaacctggagcaaatttctattaaaggccccatccgaagtttcacccaggcagacattagccaaggtcagccagttctcttctgcctaccaggcttccgtggactgcacctacactagtaaaatgagaattaaatatctggtagtctatggcaataaactgtgcactctttgttttgaggagcttcatttgtt

SEQ ID NO: 377432 - DNA, 264 bp, Homo sapiens
atatcgtcgacccacgcgtccgcaagattttgcgtttattcaggcaaaaactggtcaaaatggttactacatgatttgttcccagaggtttgaaacattcagtgaaactttttaaaactttgattgcatgatgtattttttttttagaaagttattgtttgagaataatgtctttttataccaggaaaatagttatcctgaatgacgttgaaaactccccctcccctttatttttttttaatcaatacatgtgaaagtaacaag

SEQ ID NO: 377433 - DNA, 531 bp, Homo sapiens
  misc_feature (420)..(420): n is a, c, g, or t
  misc_feature (445)..(445): n is a, c, g, or t
  misc_feature (482)..(482): n is a, c, g, or t
  misc_feature (484)..(485): n is a, c, g, or t
tacaggtgtaagaggacggtcgattgtaagtcggcgcaaaccaattataacaataagatacagatataaaggagaaggcagagcccccccaggctatgaatgccctgatgcggttgaaccagctgaagccagggctgcagtacaagctggtgtcccagactgggcccgtccatgcccccatctttaccatgtctgtggaggttgatggcaattcattcgaggcctctgggccctccaaaaagacggccaagctgcacgtggccgttaaggtgttacaggacatgggcttgccgacgggtgctgaaggcagggactcgagcaagggggaggactcggctgaggagaccgaggcgaagccagcagtggtggcccctgccccagtggtagaagctgtctccacccctagtgcgcgcgcactancacatttggctaaattttgtatttnttgtagagatggggtttcgccatgttgcccaggctgntnntcttaagataaatacatctttaaaaaaagaaatagatcactttggt

SEQ ID NO: 377434 - DNA, 6136 bp, Homo sapiens
agactttcacgggaaacaggaggatttatttagatgtacaccggctcagtggatttgtatctgaaaagctgaccattgaacaaagactgagtgtggtttttataggcaaacttacagaagcaaaacaaaagcagttaatgatacagtcacaggtcatgtaatctatagcataactgctgacttagcataacttgtggctttgcacagctgttggccttgcagctgtgtcaaaagaaaaacagagtctacaaatcttactaaatacaaccattggcaaacagtcatatttaatggttcagaaaaggagagacagtaaaggaatttttcttttcaactttgctccggaggaggctgtctggagcccattcctttggcctcgacttttcagtgttataactgtccttgaagtaagctggctaagcagaggaaaacttgttcttgttttctttttaacccttaccccctgccacataatcacatctttacacttcttttttttttttttttttttttttaagatgggaagtcggagtctcgctctgtcgcccaggctggagtgcagtggtgccatctcggctcattgtaacctctgcctcccaggttcaagtgattcaagccattcttgtgcctctgcctcctgagtagctgggattataggcgcacaccaccacacctggcgaatttttttttttttttttttttgaggctgagtctcactctatcgcccaggctggagtgcaatggagcaatctcggctcactgcaacctccgcctcctgggttcaagcgatcctcctgtctcagcttcctgattagctgggattacaggcgccctccaccacacccagttaatttttctatttttagtggagacggtgtttcaccatgttggccaggctggtctcaaactcctgacctcaagtgatccgcccacctcagcttcccaaagtgctgggattacaagcgtgagccaccacgcccagccaggaaacccattttcaacacctccttgctcttttttttttctgagacagagtctcgctctgtcgcccagactggagtgcagtggcgcaatctcggctcactgcaacctccgcctgccaggtcaaacaattctcctgcctcagcctcccaagtaggtgggactacaggcatgtgccaccacacccggctaattttcttttgtatttttagtagagacggggtttcaccatgctggccaggctggtctcgaactcctgacctcgtgatccgcccgcctcggcctcccaaagtgctgggattacaaacgtgagccaccgcgcctggccttccttgctcttcttgctccaaatcctgggaacgtctgaatcaacaggcggacatctgtcaaaccttcctagcaactacgcctgcggatggccaacctgaccctggaagacagtggggtttagttaagcacagattgtacatcgggggcctcataaggcgcctggaagcattcaagaacaccacgcttgtaaggacaaagcactcggtcacgggcgcctttacttcggagctccgcgctgctgctggacgagcgtccgttgagtcccagccccaatttttccaggaaatggcggtgagccctctagtgagatattttttggcctgggcctcagtttctccatctgtcaatgggggaagggtaaggcgggctagaggaccccgaccaggtcggctgcagccttcggaagctacggcccagggacgccacaccaaggcaggtctgcgggacgaaagaacccaagaacccgggcgcgcattggcgccggtcccgggctcaaggggcagcaacgaggagacgctggacctggccgttcctcgcacacatctctaaccttctgtgcctctcaagggagatggggtgagcatagccacctccactggagcccgaaaatccccggccgagataccgccactaaaaaggtacacatgcgtcaaagcctctcggagccatttccgctaacgtactcagggcgacgggcgtaagatggcggccgcgcaggcgcaaaatgtcgcagccgtagggaggctccgcctctgacgcttgccttgcatcacgtggtaatggccgctcaaaaaacgccttagcgaaaaccagagcgtgccctcgtcacgtgatggaggactcccagtacggcaaagggaaggcgccaaaagttgtcagatggcgaaggaaaccgcgaaattcgccattgtcacatgatggagcaacctatcgaaagcggagggaaaggtgccgaagtcacgtgactacgcacgcaaacactcccgcttgcaccacgtgcaactcacgcccaccccctcagccccccccttatctcttttcgcccctccctcccatttgggttgggcctgcgtcgaggcgcaacgcggcgtcaaagggggcggggcttcagccggtcacgtgttcccgcacctccccggcgcgcgcctgcccgcccgcccgctcgcccccggtccggactcctcctcctcctcttctcgccattgcagttggacccagcagcccggcgcgcaccgcgtggcttttgggggcagaccccggcgggctgtggcaggagggcggcggcggcggctgcggtcgaagaaggggacgccgacaagagttgaagtattgataacaccaaggaactctatcacaatttgaaaagataagcaaaagtttgatttccagacactacagaagaagtaaaaatgcgtccaatgcgaatttttgtgaatgatgaccgccatgtgatggcaaagcattcttccgtttatccaacacaagaggagctggaggcagtccagaacatggtgtcccacacggagcgggcgctcaaagctgtgtccgactggatagacgagcaggaaaagggtagcagcgagcaggcagagtccgataacatggatgtgcccccagaggacgacagtaaagaaggggctggggaacagaagacggagcacatgaccagaaccctgcggggagtgatgcgggtgggcctggtggcaaagggcctcctactcaagggggacttggatctggagctggtgctgctgtgtaaggagaagcccacaaccgccctcctggacaaggtggccgacaacctggccatccagcttgctgctgtaacagaagacaagtacgaaatactgcaatctgtcgacgatgctgcgattgtgataaaaaacacaaaagagcctccattgtccctgaccatccacctgacatcccctgttgtcagagaagaaatggagaaagtattagctggagaaacgctatcagtcaacgaccccccggacgttctggacaggcagaaatgccttgctgccttggcgtccctccgacacgccaagtggttccaggccagagccaacgggctgaagtcttgtgtcattgtgatccgggtcttgagggacctgtgcactcgcgtgcccacctggggtcccctccgaggctggcctctcgagctcctgtgtgagaaatccattggcacggccaacagaccgatgggtgctggcgaggccctgcggagagtgctggagtgcctggcgtcgggcatcgtgatgccagatggttctggcatttatgacccttgtgaaaaagaagccactgatgctattgggcatctagacagacagcaacgggaagatatcacacagagtgcgcagcacgcactgcggctcgctgccttcggccagctccataaagtcctaggcatggaccctctgccttccaagatgcccaagaaaccaaagaatgaaaacccagtggactacaccgttcagatcccaccaagcaccacctatgccattacgcccatgaaacgcccaatggaggaggacggggaggagaagtcgcccagcaaaaagaagaagaagattcagaagaaagaggagaaggcagagcccccccaggctatgaatgccctgatgcggttgaaccagctgaagccagggctgcagtacaagctggtgtcccagactgggcccgtccatgcccccatctttaccatgtctgtggaggttgatggcaattcattcgaggcctctgggccctccaaaaagacggccaagctgcacgtggccgttaaggtgttacaggacatgggcttgccgacgggtgctgaaggcagggactcgagcaagggggaggactcggctgaggagaccgaggcgaagccagcagtggtggcccctgccccagtggtagaagctgtctccacccctagtgcggcctttccctcagatgccactgccggaacgcagcaggggccgatcctgacaaagcacggcaagaacccagtcatggagctgaacgagaagaggcgtgggctcaagtacgagctcatctccgagaccgggggcagccacgacaagcgcttcgtcatggaggtcgaagtggatggacagaagttccaaggtgctggttccaacaaaaaggtggcgaaggcctacgctgctcttgctgccctagaaaagcttttccctgacacccctctcgcccttgatgccaacaaaaagaagagagccccagtacccgtcagagggggaccgaaatttgctgctaagccacataaccctggcttcggcatgggaggccccatgcacaacgaagtgcccccaccccccaaccttcgagggcggggaagaggcgggagcatccggggacgagggcgcgggcgaggatttggtggcgccaaccatggaggctacatgaatgccggtgctgggtatggaagctatgggtacggaggcaactctgcgacagcaggctacagtgactttttcacagactgctacggctatcatgattttgggtcttcctagagcgtctaaaagtattgcacacaaaatcaactttttactccaatttcctccaactccaaaacccaaagtgtccgtgctgtgtccctgtgcttcactgggtttctcaaccgtggcttttcaccgcagcttgtctgaaactcttagcctgcagaatttaagacaatggcagtttttatcgtgatttgcctttgaacttggtcctattgaagttcacaataagtggaaaacaattttttcagagaatgtatttttgtgcagaattgcacagaattctagagacagcgttgttcggcatcaaggcaaaagcccacctttgctttttatggaaagcattactttatttaaagagacagacaatgacgcattttaatctacctttgtcttaatttacagcaggttttgtatgaatttttaaccttttaacaaactcccaaatctggttgatgcctttgacagtgatgaaaacgatttcaccacatctgaatccagagaaaccggctttttttcttattgcgagcatgttaaaacgttgggaacatgtggggaattgtatattgcgctgaattaacttctcccgcctcttgtaatgctctggtgggttcttgtttgggaatgcgatattttgtggctggtttagctagagagtgaactctcaaaggtatcaaaactgtgcttccattattagtgcaagaaacagacaggctttaaggggtagatgacgtgaaattttgcaagtcttaattacagctgcagatgcatgggattctggatttttttgttgctttttagtttaatgggactttaaaagtaattgaggagaaagaaccgtgatgttccctgtttctccagtaaaggactggcttttgcttgggcagaggtggtgctgctgggtgtgcagctgccacagactccaaaggcgtagaagtttgtgccaacacacggagtcattctggctctctgctgaggcccctgttttctggcaggtgccctccttggaaactggttttggctctgatcagcggttctttttgcagcaaagcctgcatctgtgttgacttgcaagattttgcgtttattcaggcaaaaactggtcaaaatggttactacatgatttgttcccagaggtttgaaacattcagtgaaactttttaaaactttgattgcatgatgtattttttttttagaaagttattgtttgagaataatgtctttttataccaggaaaatagttatcctgaatgacgttgaaaactccccctcccctttatttttttttaatcaatacatgtgaaagtaacaag

SEQ ID NO: 377435 - DNA, 6294 bp, Homo sapiens
agactttcacgggaaacaggaggatttatttagatgtacaccggctcagtggatttgtatctgaaaagctgaccattgaacaaagactgagtgtggtttttataggcaaacttacagaagcaaaacaaaagcagttaatgatacagtcacaggtcatgtaatctatagcataactgctgacttagcataacttgtggctttgcacagctgttggccttgcagctgtgtcaaaagaaaaacagagtctacaaatcttactaaatacaaccattggcaaacagtcatatttaatggttcagaaaaggagagacagtaaaggaatttttcttttcaactttgctccggaggaggctgtctggagcccattcctttggcctcgacttttcagtgttataactgtccttgaagtaagctggctaagcagaggaaaacttgttcttgttttctttttaacccttaccccctgccacataatcacatctttacacttcttttttttttttttttttttttttaagatgggaagtcggagtctcgctctgtcgcccaggctggagtgcagtggtgccatctcggctcattgtaacctctgcctcccaggttcaagtgattcaagccattcttgtgcctctgcctcctgagtagctgggattataggcgcacaccaccacacctggcgaatttttttttttttttttttttgaggctgagtctcactctatcgcccaggctggagtgcaatggagcaatctcggctcactgcaacctccgcctcctgggttcaagcgatcctcctgtctcagcttcctgattagctgggattacaggcgccctccaccacacccagttaatttttctatttttagtggagacggtgtttcaccatgttggccaggctggtctcaaactcctgacctcaagtgatccgcccacctcagcttcccaaagtgctgggattacaagcgtgagccaccacgcccagccaggaaacccattttcaacacctccttgctcttttttttttctgagacagagtctcgctctgtcgcccagactggagtgcagtggcgcaatctcggctcactgcaacctccgcctgccaggtcaaacaattctcctgcctcagcctcccaagtaggtgggactacaggcatgtgccaccacacccggctaattttcttttgtatttttagtagagacggggtttcaccatgctggccaggctggtctcgaactcctgacctcgtgatccgcccgcctcggcctcccaaagtgctgggattacaaacgtgagccaccgcgcctggccttccttgctcttcttgctccaaatcctgggaacgtctgaatcaacaggcggacatctgtcaaaccttcctagcaactacgcctgcggatggccaacctgaccctggaagacagtggggtttagttaagcacagattgtacatcgggggcctcataaggcgcctggaagcattcaagaacaccacgcttgtaaggacaaagcactcggtcacgggcgcctttacttcggagctccgcgctgctgctggacgagcgtccgttgagtcccagccccaatttttccaggaaatggcggtgagccctctagtgagatattttttggcctgggcctcagtttctccatctgtcaatgggggaagggtaaggcgggctagaggaccccgaccaggtcggctgcagccttcggaagctacggcccagggacgccacaccaaggcaggtctgcgggacgaaagaacccaagaacccgggcgcgcattggcgccggtcccgggctcaaggggcagcaacgaggagacgctggacctggccgttcctcgcacacatctctaaccttctgtgcctctcaagggagatggggtgagcatagccacctccactggagcccgaaaatccccggccgagataccgccactaaaaaggtacacatgcgtcaaagcctctcggagccatttccgctaacgtactcagggcgacgggcgtaagatggcggccgcgcaggcgcaaaatgtcgcagccgtagggaggctccgcctctgacgcttgccttgcatcacgtggtaatggccgctcaaaaaacgccttagcgaaaaccagagcgtgccctcgtcacgtgatggaggactcccagtacggcaaagggaaggcgccaaaagttgtcagatggcgaaggaaaccgcgaaattcgccattgtcacatgatggagcaacctatcgaaagcggagggaaaggtgccgaagtcacgtgactacgcacgcaaacactcccgcttgcaccacgtgcaactcacgcccaccccctcagccccccccttatctcttttcgcccctccctcccatttgggttgggcctgcgtcgaggcgcaacgcggcgtcaaagggggcggggcttcagccggtcacgtgttcccgcacctccccggcgcgcgcctgcccgcccgcccgctcgcccccggtccggactcctcctcctcctcttctcgccattgcagttggacccagcagcccggcgcgcaccgcgtggcttttgggggcagaccccggcgggctgtggcaggagggcggcggcggcggctgcggtcgaagaaggggacgccgacaagccagtgggacacctcacaagtcagctccgatgtcctcaggacaagactgctatagtcaccagtgctttgttgctttctggcgctccggtaggatccaggctcacttggtatatcccctgctgcagattacggtccacttctcccgggagctgctttcaagttgaagtattgataacaccaaggaactctatcacaatttgaaaagataagcaaaagtttgatttccagacactacagaagaagtaaaaatgcgtccaatgcgaatttttgtgaatgatgaccgccatgtgatggcaaagcattcttccgtttatccaacacaagaggagctggaggcagtccagaacatggtgtcccacacggagcgggcgctcaaagctgtgtccgactggatagacgagcaggaaaagggtagcagcgagcaggcagagtccgataacatggatgtgcccccagaggacgacagtaaagaaggggctggggaacagaagacggagcacatgaccagaaccctgcggggagtgatgcgggtgggcctggtggcaaagggcctcctactcaagggggacttggatctggagctggtgctgctgtgtaaggagaagcccacaaccgccctcctggacaaggtggccgacaacctggccatccagcttgctgctgtaacagaagacaagtacgaaatactgcaatctgtcgacgatgctgcgattgtgataaaaaacacaaaagagcctccattgtccctgaccatccacctgacatcccctgttgtcagagaagaaatggagaaagtattagctggagaaacgctatcagtcaacgaccccccggacgttctggacaggcagaaatgccttgctgccttggcgtccctccgacacgccaagtggttccaggccagagccaacgggctgaagtcttgtgtcattgtgatccgggtcttgagggacctgtgcactcgcgtgcccacctggggtcccctccgaggctggcctctcgagctcctgtgtgagaaatccattggcacggccaacagaccgatgggtgctggcgaggccctgcggagagtgctggagtgcctggcgtcgggcatcgtgatgccagatggttctggcatttatgacccttgtgaaaaagaagccactgatgctattgggcatctagacagacagcaacgggaagatatcacacagagtgcgcagcacgcactgcggctcgctgccttcggccagctccataaagtcctaggcatggaccctctgccttccaagatgcccaagaaaccaaagaatgaaaacccagtggactacaccgttcagatcccaccaagcaccacctatgccattacgcccatgaaacgcccaatggaggaggacggggaggagaagtcgcccagcaaaaagaagaagaagattcagaagaaagaggagaaggcagagcccccccaggctatgaatgccctgatgcggttgaaccagctgaagccagggctgcagtacaagctggtgtcccagactgggcccgtccatgcccccatctttaccatgtctgtggaggttgatggcaattcattcgaggcctctgggccctccaaaaagacggccaagctgcacgtggccgttaaggtgttacaggacatgggcttgccgacgggtgctgaaggcagggactcgagcaagggggaggactcggctgaggagaccgaggcgaagccagcagtggtggcccctgccccagtggtagaagctgtctccacccctagtgcggcctttccctcagatgccactgccggaacgcagcaggggccgatcctgacaaagcacggcaagaacccagtcatggagctgaacgagaagaggcgtgggctcaagtacgagctcatctccgagaccgggggcagccacgacaagcgcttcgtcatggaggtcgaagtggatggacagaagttccaaggtgctggttccaacaaaaaggtggcgaaggcctacgctgctcttgctgccctagaaaagcttttccctgacacccctctcgcccttgatgccaacaaaaagaagagagccccagtacccgtcagagggggaccgaaatttgctgctaagccacataaccctggcttcggcatgggaggccccatgcacaacgaagtgcccccaccccccaaccttcgagggcggggaagaggcgggagcatccggggacgagggcgcgggcgaggatttggtggcgccaaccatggaggctacatgaatgccggtgctgggtatggaagctatgggtacggaggcaactctgcgacagcaggctacagtgactttttcacagactgctacggctatcatgattttgggtcttcctagagcgtctaaaagtattgcacacaaaatcaactttttactccaatttcctccaactccaaaacccaaagtgtccgtgctgtgtccctgtgcttcactgggtttctcaaccgtggcttttcaccgcagcttgtctgaaactcttagcctgcagaatttaagacaatggcagtttttatcgtgatttgcctttgaacttggtcctattgaagttcacaataagtggaaaacaattttttcagagaatgtatttttgtgcagaattgcacagaattctagagacagcgttgttcggcatcaaggcaaaagcccacctttgctttttatggaaagcattactttatttaaagagacagacaatgacgcattttaatctacctttgtcttaatttacagcaggttttgtatgaatttttaaccttttaacaaactcccaaatctggttgatgcctttgacagtgatgaaaacgatttcaccacatctgaatccagagaaaccggctttttttcttattgcgagcatgttaaaacgttgggaacatgtggggaattgtatattgcgctgaattaacttctcccgcctcttgtaatgctctggtgggttcttgtttgggaatgcgatattttgtggctggtttagctagagagtgaactctcaaaggtatcaaaactgtgcttccattattagtgcaagaaacagacaggctttaaggggtagatgacgtgaaattttgcaagtcttaattacagctgcagatgcatgggattctggatttttttgttgctttttagtttaatgggactttaaaagtaattgaggagaaagaaccgtgatgttccctgtttctccagtaaaggactggcttttgcttgggcagaggtggtgctgctgggtgtgcagctgccacagactccaaaggcgtagaagtttgtgccaacacacggagtcattctggctctctgctgaggcccctgttttctggcaggtgccctccttggaaactggttttggctctgatcagcggttctttttgcagcaaagcctgcatctgtgttgacttgcaagattttgcgtttattcaggcaaaaactggtcaaaatggttactacatgatttgttcccagaggtttgaaacattcagtgaaactttttaaaactttgattgcatgatgtattttttttttagaaagttattgtttgagaataatgtctttttataccaggaaaatagttatcctgaatgacgttgaaaactccccctcccctttatttttttttaatcaatacatgtgaaagtaacaag

SEQ ID NO: 377436 - DNA, 5874 bp, Homo sapiens
agactttcacgggaaacaggaggatttatttagatgtacaccggctcagtggatttgtatctgaaaagctgaccattgaacaaagactgagtgtggtttttataggcaaacttacagaagcaaaacaaaagcagttaatgatacagtcacaggtcatgtaatctatagcataactgctgacttagcataacttgtggctttgcacagctgttggccttgcagctgtgtcaaaagaaaaacagagtctacaaatcttactaaatacaaccattggcaaacagtcatatttaatggttcagaaaaggagagacagtaaaggaatttttcttttcaactttgctccggaggaggctgtctggagcccattcctttggcctcgacttttcagtgttataactgtccttgaagtaagctggctaagcagaggaaaacttgttcttgttttctttttaacccttaccccctgccacataatcacatctttacacttcttttttttttttttttttttttttaagatgggaagtcggagtctcgctctgtcgcccaggctggagtgcagtggtgccatctcggctcattgtaacctctgcctcccaggttcaagtgattcaagccattcttgtgcctctgcctcctgagtagctgggattataggcgcacaccaccacacctggcgaatttttttttttttttttttttgaggctgagtctcactctatcgcccaggctggagtgcaatggagcaatctcggctcactgcaacctccgcctcctgggttcaagcgatcctcctgtctcagcttcctgattagctgggattacaggcgccctccaccacacccagttaatttttctatttttagtggagacggtgtttcaccatgttggccaggctggtctcaaactcctgacctcaagtgatccgcccacctcagcttcccaaagtgctgggattacaagcgtgagccaccacgcccagccaggaaacccattttcaacacctccttgctcttttttttttctgagacagagtctcgctctgtcgcccagactggagtgcagtggcgcaatctcggctcactgcaacctccgcctgccaggtcaaacaattctcctgcctcagcctcccaagtaggtgggactacaggcatgtgccaccacacccggctaattttcttttgtatttttagtagagacggggtttcaccatgctggccaggctggtctcgaactcctgacctcgtgatccgcccgcctcggcctcccaaagtgctgggattacaaacgtgagccaccgcgcctggccttccttgctcttcttgctccaaatcctgggaacgtctgaatcaacaggcggacatctgtcaaaccttcctagcaactacgcctgcggatggccaacggtaaggcgggctagaggaccccgaccaggtcggctgcagccttcggaagctacggcccagggacgccacaccaaggcaggtctgcgggacgaaagaacccaagaacccgggcgcgcattggcgccggtcccgggctcaaggggcagcaacgaggagacgctggacctggccgttcctcgcacacatctctaaccttctgtgcctctcaagggagatggggtgagcatagccacctccactggagcccgaaaatccccggccgagataccgccactaaaaaggtacacatgcgtcaaagcctctcggagccatttccgctaacgtactcagggcgacgggcgtaagatggcggccgcgcaggcgcaaaatgtcgcagccgtagggaggctccgcctctgacgcttgccttgcatcacgtggtaatggccgctcaaaaaacgccttagcgaaaaccagagcgtgccctcgtcacgtgatggaggactcccagtacggcaaagggaaggcgccaaaagttgtcagatggcgaaggaaaccgcgaaattcgccattgtcacatgatggagcaacctatcgaaagcggagggaaaggtgccgaagtcacgtgactacgcacgcaaacactcccgcttgcaccacgtgcaactcacgcccaccccctcagccccccccttatctcttttcgcccctccctcccatttgggttgggcctgcgtcgaggcgcaacgcggcgtcaaagggggcggggcttcagccggtcacgtgttcccgcacctccccggcgcgcgcctgcccgcccgcccgctcgcccccggtccggactcctcctcctcctcttctcgccattgcagttggacccagcagcccggcgcgcaccgcgtggcttttgggggcagaccccggcgggctgtggcaggagggcggcggcggcggctgcggtcgaagaaggggacgccgacaagagttgaagtattgataacaccaaggaactctatcacaatttgaaaagataagcaaaagtttgatttccagacactacagaagaagtaaaaatgcgtccaatgcgaatttttgtgaatgatgaccgccatgtgatggcaaagcattcttccgtttatccaacacaagaggagctggaggcagtccagaacatggtgtcccacacggagcgggcgctcaaagctgtgtccgactggatagacgagcaggaaaagggtagcagcgagcaggcagagtccgataacatggatgtgcccccagaggacgacagtaaagaaggggctggggaacagaagacggagcacatgaccagaaccctgcggggagtgatgcgggtgggcctggtggcaaagggcctcctactcaagggggacttggatctggagctggtgctgctgtgtaaggagaagcccacaaccgccctcctggacaaggtggccgacaacctggccatccagcttgctgctgtaacagaagacaagtacgaaatactgcaatctgtcgacgatgctgcgattgtgataaaaaacacaaaagagcctccattgtccctgaccatccacctgacatcccctgttgtcagagaagaaatggagaaagtattagctggagaaacgctatcagtcaacgaccccccggacgttctggacaggcagaaatgccttgctgccttggcgtccctccgacacgccaagtggttccaggccagagccaacgggctgaagtcttgtgtcattgtgatccgggtcttgagggacctgtgcactcgcgtgcccacctggggtcccctccgaggctggcctctcgagctcctgtgtgagaaatccattggcacggccaacagaccgatgggtgctggcgaggccctgcggagagtgctggagtgcctggcgtcgggcatcgtgatgccagatggttctggcatttatgacccttgtgaaaaagaagccactgatgctattgggcatctagacagacagcaacgggaagatatcacacagagtgcgcagcacgcactgcggctcgctgccttcggccagctccataaagtcctaggcatggaccctctgccttccaagatgcccaagaaaccaaagaatgaaaacccagtggactacaccgttcagatcccaccaagcaccacctatgccattacgcccatgaaacgcccaatggaggaggacggggaggagaagtcgcccagcaaaaagaagaagaagattcagaagaaagaggagaaggcagagcccccccaggctatgaatgccctgatgcggttgaaccagctgaagccagggctgcagtacaagctggtgtcccagactgggcccgtccatgcccccatctttaccatgtctgtggaggttgatggcaattcattcgaggcctctgggccctccaaaaagacggccaagctgcacgtggccgttaaggtgttacaggacatgggcttgccgacgggtgctgaaggcagggactcgagcaagggggaggactcggctgaggagaccgaggcgaagccagcagtggtggcccctgccccagtggtagaagctgtctccacccctagtgcggcctttccctcagatgccactgccggaacgcagcaggggccgatcctgacaaagcacggcaagaacccagtcatggagctgaacgagaagaggcgtgggctcaagtacgagctcatctccgagaccgggggcagccacgacaagcgcttcgtcatggaggtcgaagtggatggacagaagttccaaggtgctggttccaacaaaaaggtggcgaaggcctacgctgctcttgctgccctagaaaagcttttccctgacacccctctcgcccttgatgccaacaaaaagaagagagccccagtacccgtcagagggggaccgaaatttgctgctaagccacataaccctggcttcggcatgggaggccccatgcacaacgaagtgcccccaccccccaaccttcgagggcggggaagaggcgggagcatccggggacgagggcgcgggcgaggatttggtggcgccaaccatggaggctacatgaatgccggtgctgggtatggaagctatgggtacggaggcaactctgcgacagcaggctacagtgactttttcacagactgctacggctatcatgattttgggtcttcctagagcgtctaaaagtattgcacacaaaatcaactttttactccaatttcctccaactccaaaacccaaagtgtccgtgctgtgtccctgtgcttcactgggtttctcaaccgtggcttttcaccgcagcttgtctgaaactcttagcctgcagaatttaagacaatggcagtttttatcgtgatttgcctttgaacttggtcctattgaagttcacaataagtggaaaacaattttttcagagaatgtatttttgtgcagaattgcacagaattctagagacagcgttgttcggcatcaaggcaaaagcccacctttgctttttatggaaagcattactttatttaaagagacagacaatgacgcattttaatctacctttgtcttaatttacagcaggttttgtatgaatttttaaccttttaacaaactcccaaatctggttgatgcctttgacagtgatgaaaacgatttcaccacatctgaatccagagaaaccggctttttttcttattgcgagcatgttaaaacgttgggaacatgtggggaattgtatattgcgctgaattaacttctcccgcctcttgtaatgctctggtgggttcttgtttgggaatgcgatattttgtggctggtttagctagagagtgaactctcaaaggtatcaaaactgtgcttccattattagtgcaagaaacagacaggctttaaggggtagatgacgtgaaattttgcaagtcttaattacagctgcagatgcatgggattctggatttttttgttgctttttagtttaatgggactttaaaagtaattgaggagaaagaaccgtgatgttccctgtttctccagtaaaggactggcttttgcttgggcagaggtggtgctgctgggtgtgcagctgccacagactccaaaggcgtagaagtttgtgccaacacacggagtcattctggctctctgctgaggcccctgttttctggcaggtgccctccttggaaactggttttggctctgatcagcggttctttttgcagcaaagcctgcatctgtgttgacttgcaagattttgcgtttattcaggcaaaaactggtcaaaatggttactacatgatttgttcccagaggtttgaaacattcagtgaaactttttaaaactttgattgcatgatgtattttttttttagaaagttattgtttgagaataatgtctttttataccaggaaaatagttatcctgaatgacgttgaaaactccccctcccctttatttttttttaatcaatacatgtgaaagtaacaag

SEQ ID NO: 377437 - DNA, 5980 bp, Homo sapiens
agactttcacgggaaacaggaggatttatttagatgtacaccggctcagtggatttgtatctgaaaagctgaccattgaacaaagactgagtgtggtttttataggcaaacttacagaagcaaaacaaaagcagttaatgatacagtcacaggtcatgtaatctatagcataactgctgacttagcataacttgtggctttgcacagctgttggccttgcagctgtgtcaaaagaaaaacagagtctacaaatcttactaaatacaaccattggcaaacagtcatatttaatggttcagaaaaggagagacagtaaaggaatttttcttttcaactttgctccggaggaggctgtctggagcccattcctttggcctcgacttttcagtgttataactgtccttgaagtaagctggctaagcagaggaaaacttgttcttgttttctttttaacccttaccccctgccacataatcacatctttacacttcttttttttttttttttttttttttaagatgggaagtcggagtctcgctctgtcgcccaggctggagtgcagtggtgccatctcggctcattgtaacctctgcctcccaggttcaagtgattcaagccattcttgtgcctctgcctcctgagtagctgggattataggcgcacaccaccacacctggcgaatttttttttttttttttttttgaggctgagtctcactctatcgcccaggctggagtgcaatggagcaatctcggctcactgcaacctccgcctcctgggttcaagcgatcctcctgtctcagcttcctgattagctgggattacaggcgccctccaccacacccagttaatttttctatttttagtggagacggtgtttcaccatgttggccaggctggtctcaaactcctgacctcaagtgatccgcccacctcagcttcccaaagtgctgggattacaagcgtgagccaccacgcccagccaggaaacccattttcaacacctccttgctcttttttttttctgagacagagtctcgctctgtcgcccagactggagtgcagtggcgcaatctcggctcactgcaacctccgcctgccaggtcaaacaattctcctgcctcagcctcccaagtaggtgggactacaggcatgtgccaccacacccggctaattttcttttgtatttttagtagagacggggtttcaccatgctggccaggctggtctcgaactcctgacctcgtgatccgcccgcctcggcctcccaaagtgctgggattacaaacgtgagccaccgcgcctggccttccttgctcttcttgctccaaatcctgggaacgtctgaatcaacaggcggacatctgtcaaaccttcctagcaactacgcctgcggatggccaacttcggagctccgcgctgctgctggacgagcgtccgttgagtcccagccccaatttttccaggaaatggcggtgagccctctagtgagatattttttggcctgggcctcagtttctccatctgtcaatgggggaagggtaaggcgggctagaggaccccgaccaggtcggctgccacaccaaggcaggtctgcgggacgaaagaacccaagaacccgggcgcgcattggcgccggtcccgggctcaaggggcagcaacgaggagacgctggacctggccgttcctcgcacacatctctaaccttctgtgcctctcaagggagatggggtgagcatagccacctccactggagcccgaaaatccccggccgagataccgccactaaaaaggtacacatgcgtcaaagcctctcggagccatttccgctaacgtactcagggcgacgggcgtaagatggcggccgcgcaggcgcaaaatgtcgcagccgtagggaggctccgcctctgacgcttgccttgcatcacgtggtaatggccgctcaaaaaacgccttagcgaaaaccagagcgtgccctcgtcacgtgatggaggactcccagtacggcaaagggaaggcgccaaaagttgtcagatggcgaaggaaaccgcgaaattcgccattgtcacatgatggagcaacctatcgaaagcggagggaaaggtgccgaagtcacgtgactacgcacgcaaacactcccgcttgcaccacgtgcaactcacgcccaccccctcagccccccccttatctcttttcgcccctccctcccatttgggttgggcctgcgtcgaggcgcaacgcggcgtcaaagggggcggggcttcagccggtcacgtgttcccgcacctccccggcgcgcgcctgcccgcccgcccgctcgcccccggtccggactcctcctcctcctcttctcgccattgcagttggacccagcagcccggcgcgcaccgcgtggcttttgggggcagaccccggcgggctgtggcaggagggcggcggcggcggctgcggtcgaagaaggggacgccgacaagagttgaagtattgataacaccaaggaactctatcacaatttgaaaagataagcaaaagtttgatttccagacactacagaagaagtaaaaatgcgtccaatgcgaatttttgtgaatgatgaccgccatgtgatggcaaagcattcttccgtttatccaacacaagaggagctggaggcagtccagaacatggtgtcccacacggagcgggcgctcaaagctgtgtccgactggatagacgagcaggaaaagggtagcagcgagcaggcagagtccgataacatggatgtgcccccagaggacgacagtaaagaaggggctggggaacagaagacggagcacatgaccagaaccctgcggggagtgatgcgggtgggcctggtggcaaagggcctcctactcaagggggacttggatctggagctggtgctgctgtgtaaggagaagcccacaaccgccctcctggacaaggtggccgacaacctggccatccagcttgctgctgtaacagaagacaagtacgaaatactgcaatctgtcgacgatgctgcgattgtgataaaaaacacaaaagagcctccattgtccctgaccatccacctgacatcccctgttgtcagagaagaaatggagaaagtattagctggagaaacgctatcagtcaacgaccccccggacgttctggacaggcagaaatgccttgctgccttggcgtccctccgacacgccaagtggttccaggccagagccaacgggctgaagtcttgtgtcattgtgatccgggtcttgagggacctgtgcactcgcgtgcccacctggggtcccctccgaggctggcctctcgagctcctgtgtgagaaatccattggcacggccaacagaccgatgggtgctggcgaggccctgcggagagtgctggagtgcctggcgtcgggcatcgtgatgccagatggttctggcatttatgacccttgtgaaaaagaagccactgatgctattgggcatctagacagacagcaacgggaagatatcacacagagtgcgcagcacgcactgcggctcgctgccttcggccagctccataaagtcctaggcatggaccctctgccttccaagatgcccaagaaaccaaagaatgaaaacccagtggactacaccgttcagatcccaccaagcaccacctatgccattacgcccatgaaacgcccaatggaggaggacggggaggagaagtcgcccagcaaaaagaagaagaagattcagaagaaagaggagaaggcagagcccccccaggctatgaatgccctgatgcggttgaaccagctgaagccagggctgcagtacaagctggtgtcccagactgggcccgtccatgcccccatctttaccatgtctgtggaggttgatggcaattcattcgaggcctctgggccctccaaaaagacggccaagctgcacgtggccgttaaggtgttacaggacatgggcttgccgacgggtgctgaaggcagggactcgagcaagggggaggactcggctgaggagaccgaggcgaagccagcagtggtggcccctgccccagtggtagaagctgtctccacccctagtgcggcctttccctcagatgccactgccggaacgcagcaggggccgatcctgacaaagcacggcaagaacccagtcatggagctgaacgagaagaggcgtgggctcaagtacgagctcatctccgagaccgggggcagccacgacaagcgcttcgtcatggaggtcgaagtggatggacagaagttccaaggtgctggttccaacaaaaaggtggcgaaggcctacgctgctcttgctgccctagaaaagcttttccctgacacccctctcgcccttgatgccaacaaaaagaagagagccccagtacccgtcagagggggaccgaaatttgctgctaagccacataaccctggcttcggcatgggaggccccatgcacaacgaagtgcccccaccccccaaccttcgagggcggggaagaggcgggagcatccggggacgagggcgcgggcgaggatttggtggcgccaaccatggaggctacatgaatgccggtgctgggtatggaagctatgggtacggaggcaactctgcgacagcaggctacagtgactttttcacagactgctacggctatcatgattttgggtcttcctagagcgtctaaaagtattgcacacaaaatcaactttttactccaatttcctccaactccaaaacccaaagtgtccgtgctgtgtccctgtgcttcactgggtttctcaaccgtggcttttcaccgcagcttgtctgaaactcttagcctgcagaatttaagacaatggcagtttttatcgtgatttgcctttgaacttggtcctattgaagttcacaataagtggaaaacaattttttcagagaatgtatttttgtgcagaattgcacagaattctagagacagcgttgttcggcatcaaggcaaaagcccacctttgctttttatggaaagcattactttatttaaagagacagacaatgacgcattttaatctacctttgtcttaatttacagcaggttttgtatgaatttttaaccttttaacaaactcccaaatctggttgatgcctttgacagtgatgaaaacgatttcaccacatctgaatccagagaaaccggctttttttcttattgcgagcatgttaaaacgttgggaacatgtggggaattgtatattgcgctgaattaacttctcccgcctcttgtaatgctctggtgggttcttgtttgggaatgcgatattttgtggctggtttagctagagagtgaactctcaaaggtatcaaaactgtgcttccattattagtgcaagaaacagacaggctttaaggggtagatgacgtgaaattttgcaagtcttaattacagctgcagatgcatgggattctggatttttttgttgctttttagtttaatgggactttaaaagtaattgaggagaaagaaccgtgatgttccctgtttctccagtaaaggactggcttttgcttgggcagaggtggtgctgctgggtgtgcagctgccacagactccaaaggcgtagaagtttgtgccaacacacggagtcattctggctctctgctgaggcccctgttttctggcaggtgccctccttggaaactggttttggctctgatcagcggttctttttgcagcaaagcctgcatctgtgttgacttgcaagattttgcgtttattcaggcaaaaactggtcaaaatggttactacatgatttgttcccagaggtttgaaacattcagtgaaactttttaaaactttgattgcatgatgtattttttttttagaaagttattgtttgagaataatgtctttttataccaggaaaatagttatcctgaatgacgttgaaaactccccctcccctttatttttttttaatcaatacatgtgaaagtaacaag

SEQ ID NO: 377438 - DNA, 4989 bp, Homo sapiens
agactttcacgggaaacaggaggatttatttagatgtacaccggctcagtggatttgtatctgaaaagctgaccattgaacaaagactgagtgtggtttttataggcaaacttacagaagcaaaacaaaagcagttaatgatacagtcacaggtcatgtaatctatagcataactgctgacttagcataacttgtggctttgcacagctgttggccttgcagctgtgtcaaaagaaaaacagagtctacaaatcttactaaatacaaccattggcaaacagtcatatttaatggttcagaaaaggagagacagtaaaggaatttttcttttcaactttgctccggaggaggctgtctggagcccattcctttggcctcgacttttcagtgttataactgtccttgaagtaagctggctaagcagaggaaaacttgttcttgttttctttttaacccttaccccctgccacataatcacatctttacacttcttttttttttttttttttttttttaagatgggaagtcggagtctcgctctgtcgcccaggctggagcagccttcggaagctacggcccagggacgccacaccaaggcaggtctgcgggacgaaagaacccaagaacccgggcgcgcattggcgccggtcccgggctcaaggggcagcaacgaggagacgctggacctggccgttcctcgcacacatctctaaccttctgtgcctctcaagggagatggggtgagcatagccacctccactggagcccgaaaatccccggccgagataccgccactaaaaaggtacacatgcgtcaaagcctctcggagccatttccgctaacgtactcagggcgacgggcgtaagatggcggccgcgcaggcgcaaaatgtcgcagccgtagggaggctccgcctctgacgcttgccttgcatcacgtggtaatggccgctcaaaaaacgccttagcgaaaaccagagcgtgccctcgtcacgtgatggaggactcccagtacggcaaagggaaggcgccaaaagttgtcagatggcgaaggaaaccgcgaaattcgccattgtcacatgatggagcaacctatcgaaagcggagggaaaggtgccgaagtcacgtgactacgcacgcaaacactcccgcttgcaccacgtgcaactcacgcccaccccctcagccccccccttatctcttttcgcccctccctcccatttgggttgggcctgcgtcgaggcgcaacgcggcgtcaaagggggcggggcttcagccggtcacgtgttcccgcacctccccggcgcgcgcctgcccgcccgcccgctcgcccccggtccggactcctcctcctcctcttctcgccattgcagttggacccagcagcccggcgcgcaccgcgtggcttttgggggcagaccccggcgggctgtggcaggagggcggcggcggcggctgcggtcgaagaaggggacgccgacaagagttgaagtattgataacaccaaggaactctatcacaatttgaaaagataagcaaaagtttgatttccagacactacagaagaagtaaaaatgcgtccaatgcgaatttttgtgaatgatgaccgccatgtgatggcaaagcattcttccgtttatccaacacaagaggagctggaggcagtccagaacatggtgtcccacacggagcgggcgctcaaagctgtgtccgactggatagacgagcaggaaaagggtagcagcgagcaggcagagtccgataacatggatgtgcccccagaggacgacagtaaagaaggggctggggaacagaagacggagcacatgaccagaaccctgcggggagtgatgcgggtgggcctggtggcaaagggcctcctactcaagggggacttggatctggagctggtgctgctgtgtaaggagaagcccacaaccgccctcctggacaaggtggccgacaacctggccatccagcttgctgctgtaacagaagacaagtacgaaatactgcaatctgtcgacgatgctgcgattgtgataaaaaacacaaaagagcctccattgtccctgaccatccacctgacatcccctgttgtcagagaagaaatggagaaagtattagctggagaaacgctatcagtcaacgaccccccggacgttctggacaggcagaaatgccttgctgccttggcgtccctccgacacgccaagtggttccaggccagagccaacgggctgaagtcttgtgtcattgtgatccgggtcttgagggacctgtgcactcgcgtgcccacctggggtcccctccgaggctggcctctcgagctcctgtgtgagaaatccattggcacggccaacagaccgatgggtgctggcgaggccctgcggagagtgctggagtgcctggcgtcgggcatcgtgatgccagatggttctggcatttatgacccttgtgaaaaagaagccactgatgctattgggcatctagacagacagcaacgggaagatatcacacagagtgcgcagcacgcactgcggctcgctgccttcggccagctccataaagtcctaggcatggaccctctgccttccaagatgcccaagaaaccaaagaatgaaaacccagtggactacaccgttcagatcccaccaagcaccacctatgccattacgcccatgaaacgcccaatggaggaggacggggaggagaagtcgcccagcaaaaagaagaagaagattcagaagaaagaggagaaggcagagcccccccaggctatgaatgccctgatgcggttgaaccagctgaagccagggctgcagtacaagctggtgtcccagactgggcccgtccatgcccccatctttaccatgtctgtggaggttgatggcaattcattcgaggcctctgggccctccaaaaagacggccaagctgcacgtggccgttaaggtgttacaggacatgggcttgccgacgggtgctgaaggcagggactcgagcaagggggaggactcggctgaggagaccgaggcgaagccagcagtggtggcccctgccccagtggtagaagctgtctccacccctagtgcggcctttccctcagatgccactgccggaacgcagcaggggccgatcctgacaaagcacggcaagaacccagtcatggagctgaacgagaagaggcgtgggctcaagtacgagctcatctccgagaccgggggcagccacgacaagcgcttcgtcatggaggtcgaagtggatggacagaagttccaaggtgctggttccaacaaaaaggtggcgaaggcctacgctgctcttgctgccctagaaaagcttttccctgacacccctctcgcccttgatgccaacaaaaagaagagagccccagtacccgtcagagggggaccgaaatttgctgctaagccacataaccctggcttcggcatgggaggccccatgcacaacgaagtgcccccaccccccaaccttcgagggcggggaagaggcgggagcatccggggacgagggcgcgggcgaggatttggtggcgccaaccatggaggctacatgaatgccggtgctgggtatggaagctatgggtacggaggcaactctgcgacagcaggctacagtgactttttcacagactgctacggctatcatgattttgggtcttcctagagcgtctaaaagtattgcacacaaaatcaactttttactccaatttcctccaactccaaaacccaaagtgtccgtgctgtgtccctgtgcttcactgggtttctcaaccgtggcttttcaccgcagcttgtctgaaactcttagcctgcagaatttaagacaatggcagtttttatcgtgatttgcctttgaacttggtcctattgaagttcacaataagtggaaaacaattttttcagagaatgtatttttgtgcagaattgcacagaattctagagacagcgttgttcggcatcaaggcaaaagcccacctttgctttttatggaaagcattactttatttaaagagacagacaatgacgcattttaatctacctttgtcttaatttacagcaggttttgtatgaatttttaaccttttaacaaactcccaaatctggttgatgcctttgacagtgatgaaaacgatttcaccacatctgaatccagagaaaccggctttttttcttattgcgagcatgttaaaacgttgggaacatgtggggaattgtatattgcgctgaattaacttctcccgcctcttgtaatgctctggtgggttcttgtttgggaatgcgatattttgtggctggtttagctagagagtgaactctcaaaggtatcaaaactgtgcttccattattagtgcaagaaacagacaggctttaaggggtagatgacgtgaaattttgcaagtcttaattacagctgcagatgcatgggattctggatttttttgttgctttttagtttaatgggactttaaaagtaattgaggagaaagaaccgtgatgttccctgtttctccagtaaaggactggcttttgcttgggcagaggtggtgctgctgggtgtgcagctgccacagactccaaaggcgtagaagtttgtgccaacacacggagtcattctggctctctgctgaggcccctgttttctggcaggtgccctccttggaaactggttttggctctgatcagcggttctttttgcagcaaagcctgcatctgtgttgacttgcaagattttgcgtttattcaggcaaaaactggtcaaaatggttactacatgatttgttcccagaggtttgaaacattcagtgaaactttttaaaactttgattgcatgatgtattttttttttagaaagttattgtttgagaataatgtctttttataccaggaaaatagttatcctgaatgacgttgaaaactccccctcccctttatttttttttaatcaatacatgtgaaagtaacaag

SEQ ID NO: 377439 - DNA, 5693 bp, Homo sapiens
agactttcacgggaaacaggaggatttatttagatgtacaccggctcagtggatttgtatctgaaaagctgaccattgaacaaagactgagtgtggtttttataggcaaacttacagaagcaaaacaaaagcagttaatgatacagtcacaggtcatgtaatctatagcataactgctgacttagcataacttgtggctttgcacagctgttggccttgcagctgtgtcaaaagaaaaacagagtctacaaatcttactaaatacaaccattggcaaacagtcatatttaatggttcagaaaaggagagacagtaaaggaatttttcttttcaactttgctccggaggaggctgtctggagcccattcctttggcctcgacttttcagtgttataactgtccttgaagtaagctggctaagcagaggaaaacttgttcttgttttctttttaacccttaccccctgccacataatcacatctttacacttcttttttttttttttttttttttttaagatgggaagtcggagtctcgctctgtcgcccaggctggagtgcagtggtgccatctcggctcattgtaacctctgcctcccaggttcaagtgattcaagccattcttgtgcctctgcctcctgagtagctgggattataggcgcacaccaccacacctggcgaatttttttttttttttttttttgaggctgagtctcactctatcgcccaggctggagtgcaatggagcaatctcggctcactgcaacctccgcctcctgggttcaagcgatcctcctgtctcagcttcctgattagctgggattacaggcgccctccaccacacccagttaatttttctatttttagtggagacggtgtttcaccatgttggccaggctggtctcaaactcctgacctcaagtgatccgcccacctcagcttcccaaagtgctgggattacaagcgtgagccaccacgcccagccaggaaacccattttcaacacctccttgctcttttttttttctgagacagagtctcgctctgtcgcccagactggagtgcagtggcgcaatctcggctcactgcaacctccgcctgccaggtcaaacaattctcctgcctcagcctcccaagtaggtgggactacaggcatgtgccaccacacccggctaattttcttttgtatttttagtagagacggggtttcaccatgctggccaggctggtctcgaactcctgacctcgtgatccgcccgcctcggcctcccaaagtgctgggattacaaacgtgagccaccgcgcctggccttccttgctcttcttgctccaaatcctgggaacgtctgaatcaacaggcggacatctgtcaaaccttcctagcaactacgcctgcggatggccaacctgaccctggaagacagtggggtttagttaagcacagattgtacatcgggggcctcataaggcgcctggaagcattcaagaacaccacgcttgtaaggacaaagcactcggtcacgggcgcctttacttcggagctccgcgctgctgctggacgagcgtccgttgagtcccagccccaatttttccaggaaatggcggtgagccctctagtgagatattttttggcctgggcctcagtttctccatctgtcaatgggggaagggtaaggcgggctagaggaccccgaccaggtcggctgcagccttcggaagctacggcccagggacgccacaccaaggcaggtctgcgggacgaaagaacccaagaacccgggcgcgcattggcgccggtcccgggctcaaggggcagcaacgaggagacgctggacctggccgttcctcgcacacatctctaaccttctgtgcctctcaagggagatggggtgagcatagccacctccactggagcccgaaaatccccggccgagataccgccactaaaaaggtacacatgcgtcaaagcctctcggagccatttccgctaacgtactcagggcgacgggcgtaagatggcggccgcgcaggcgcaaaatgtcgcagccgtagggaggctccgcctctgacgcttgccttgcatcacgtggtaatggccgctcaaaaaacgccttagcgaaaaccagagcgtgccctcgtcacgtgatggaggactcccagtacggcaaagggaaggcgccaaaagttgtcagatggcgaaggaaaccgcgaaattcgccattgtcacatgatggagcaacctatcgaaagcggagggaaaggtgccgaagtcacgtgactacgcacgcaaacactcccgcttgcaccacgtgcaactcacgcccaccccctcagccccccccttatctcttttcgcccctccctcccatttgggttgggcctgcgtcgaggcgcaacgcggcgtcaaagggggcggggcttcagccggtcacgtgttcccgcacctccccggcgcgcgcctgcccgcccgcccgctcgcccccggtccggactcctcctcctcctcttctcgccattgcagttggacccagcagcccggcgcgcaccgcgtggcttttgggggcagaccccggcgggctgtggcaggagggcggcggcggcggctgcggtcgaagaaggggacgccgacaagagttgaagtattgataacaccaaggaactctatcacaatttgaaaagataagcaaaagtttgatttccagacactacagaagaagtaaaaatgcgtccaatgcgaatttttgtgaatgatgaccgccatgtgatggcaaagcattcttccgtttatccaacacaagaggagctggaggcagtccagaacatggtgtcccacacggagcgggcgctcaaagctgtgtccgactggatagacgagcaggaaaagggtagcagcgagcaggcagagtccgataacatggatgtgcccccagaggacgacagtaaagaaggggctggggaacagaagacggagcacatgaccagaaccctgcggggagtgatgcgggtgggcctggtggcaaagggcctcctactcaagggggacttggatctggagctggtgctgctgtgtaaggagaagcccacaaccgccctcctggacaaggtggccgacaacctggccatccagcttgctgctgtaacagaagacaagtacgaaatactgcaatctgtcgacgatgctgcgattgtgataaaaaacacaaaagagcctccattgtccctgaccatccacctgacatcccctgttgtcagagaagaaatggagaaagtattagctggagaaacgctatcagtcaacgaccccccggacgttctggacaggcagaaatgccttgctgccttggcgtccctccgacacgccaagtggttccaggccagagccaacgggctgaagtcttgtgtcattgtgatccgggtcttgagggacctgtgcactcgcgtgcccacctggggtcccctccgaggctggcctctcgagctcctgtgtgagaaatccattggcacggccaacagaccgatgggtgctggcgaggccctgcggagagtgctggagtgcctggcgtcgggcatcgtgatgccagatggttctggcatttatgacccttgtgaaaaagaagccactgatgctattgggcatctagacagacagcaacgggaagatatcacacagagtgcgcagcacgcactgcggctcgctgccttcggccagctccataaagtcctaggcatggaccctctgccttccaagatgcccaagaaaccaaagaatgaaaacccagtggactacaccgttcagatcccaccaagcaccacctatgccattacgcccatgaaacgcccaatggaggaggacggggaggagaagtcgcccagcaaaaagaagaagaagattcagaagaaagaggagaaggcagagcccccccaggctatgaatgccctgatgcggttgaaccagctgaagccagggctgcagtacaagctggtgtcccagactgggcccgtccatgcccccatctttaccatgtctgtggaggttgatggcaattcattcgaggcctctgggccctccaaaaagacggccaagctgcacgtggccgttaaggtgttacaggacatgggcttgccgacgggtgctgaaggcagggactcgagcaagggggaggactcggctgaggagaccgaggcgaagccagcagtggtggcccctgccccagtggtagaagctgtctccacccctagtgcggcctttccctcagatgccactgccggaacgcagcaggggccgatcctgacaaagcacggcaagaacccagtcatggagctgaacgagaagaggcgtgggctcaagtacgagctcatctccgagaccgggggcagccacgacaagcgcttcgtcatggaggtcgaagtggatggacagaagttccaaggtgctggttccaacaaaaaggtggcgaaggcctacgctgctcttgctgccctagaaaagcttttccctgacacccctctcgcccttgatgccaacaaaaagaagagagccccagtacccgtcagagggggaccgaaatttgctgctaagccacataaccctggcttcggcatgggaggccccatgcacaacgaagtgcccccaccccccaaccttcgagggcggggaagaggcgggagcatccggggacgagggcgcgggcgaggatttggtggcgccaaccatggaggctacatgaatgccggtgctgggtatggaagctatgggtacggaggcaactctgcgacagcaggctacacaggttttgtatgaatttttaaccttttaacaaactcccaaatctggttgatgcctttgacagtgatgaaaacgatttcaccacatctgaatccagagaaaccggctttttttcttattgcgagcatgttaaaacgttgggaacatgtggggaattgtatattgcgctgaattaacttctcccgcctcttgtaatgctctggtgggttcttgtttgggaatgcgatattttgtggctggtttagctagagagtgaactctcaaaggtatcaaaactgtgcttccattattagtgcaagaaacagacaggctttaaggggtagatgacgtgaaattttgcaagtcttaattacagctgcagatgcatgggattctggatttttttgttgctttttagtttaatgggactttaaaagtaattgaggagaaagaaccgtgatgttccctgtttctccagtaaaggactggcttttgcttgggcagaggtggtgctgctgggtgtgcagctgccacagactccaaaggcgtagaagtttgtgccaacacacggagtcattctggctctctgctgaggcccctgttttctggcaggtgccctccttggaaactggttttggctctgatcagcggttctttttgcagcaaagcctgcatctgtgttgacttgcaagattttgcgtttattcaggcaaaaactggtcaaaatggttactacatgatttgttcccagaggtttgaaacattcagtgaaactttttaaaactttgattgcatgatgtattttttttttagaaagttattgtttgagaataatgtctttttataccaggaaaatagttatcctgaatgacgttgaaaactccccctcccctttatttttttttaatcaatacatgtgaaagtaacaag

SEQ ID NO: 377440 - DNA, 6799 bp, Homo sapiens
agactttcacgggaaacaggaggatttatttagatgtacaccggctcagtggatttgtatctgaaaagctgaccattgaacaaagactgagtgtggtttttataggcaaacttacagaagcaaaacaaaagcagttaatgatacagtcacaggtcatgtaatctatagcataactgctgacttagcataacttgtggctttgcacagctgttggccttgcagctgtgtcaaaagaaaaacagagtctacaaatcttactaaatacaaccattggcaaacagtcatatttaatggttcagaaaaggagagacagtaaaggaatttttcttttcaactttgctccggaggaggctgtctggagcccattcctttggcctcgacttttcagtgttataactgtccttgaagtaagctggctaagcagaggaaaacttgttcttgttttctttttaacccttaccccctgccacataatcacatctttacacttcttttttttttttttttttttttttaagatgggaagtcggagtctcgctctgtcgcccaggctggagtgcagtggtgccatctcggctcattgtaacctctgcctcccaggttcaagtgattcaagccattcttgtgcctctgcctcctgagtagctgggattataggcgcacaccaccacacctggcgaatttttttttttttttttttttgaggctgagtctcactctatcgcccaggctggagtgcaatggagcaatctcggctcactgcaacctccgcctcctgggttcaagcgatcctcctgtctcagcttcctgattagctgggattacaggcgccctccaccacacccagttaatttttctatttttagtggagacggtgtttcaccatgttggccaggctggtctcaaactcctgacctcaagtgatccgcccacctcagcttcccaaagtgctgggattacaagcgtgagccaccacgcccagccaggaaacccattttcaacacctccttgctcttttttttttctgagacagagtctcgctctgtcgcccagactggagtgcagtggcgcaatctcggctcactgcaacctccgcctgccaggtcaaacaattctcctgcctcagcctcccaagtaggtgggactacaggcatgtgccaccacacccggctaattttcttttgtatttttagtagagacggggtttcaccatgctggccaggctggtctcgaactcctgacctcgtgatccgcccgcctcggcctcccaaagtgctgggattacaaacgtgagccaccgcgcctggccttccttgctcttcttgctccaaatcctgggaacgtctgaatcaacaggcggacatctgtcaaaccttcctagcaactacgcctgcggatggccaacctgaccctggaagacagtggggtttagttaagcacagattgtacatcgggggcctcataaggcgcctggaagcattcaagaacaccacgcttgtaaggacaaagcactcggtcacgggcgcctttacttcggagctccgcgctgctgctggacgagcgtccgttgagtcccagccccaatttttccaggaaatggcggtgagccctctagtgagatattttttggcctgggcctcagtttctccatctgtcaatgggggaagggtaaggcgggctagaggaccccgaccaggtcggctgcagccttcggaagctacggcccagggacgccacaccaaggcaggtctgcgggacgaaagaacccaagaacccgggcgcgcattggcgccggtcccgggctcaaggggcagcaacgaggagacgctggacctggccgttcctcgcacacatctctaaccttctgtgcctctcaagggagatggggtgagcatagccacctccactggagcccgaaaatccccggccgagataccgccactaaaaaggtacacatgcgtcaaagcctctcggagccatttccgctaacgtactcagggcgacgggcgtaagatggcggccgcgcaggcgcaaaatgtcgcagccgtagggaggctccgcctctgacgcttgccttgcatcacgtggtaatggccgctcaaaaaacgccttagcgaaaaccagagcgtgccctcgtcacgtgatggaggactcccagtacggcaaagggaaggcgccaaaagttgtcagatggcgaaggaaaccgcgaaattcgccattgtcacatgatggagcaacctatcgaaagcggagggaaaggtgccgaagtcacgtgactacgcacgcaaacactcccgcttgcaccacgtgcaactcacgcccaccccctcagccccccccttatctcttttcgcccctccctcccatttgggttgggcctgcgtcgaggcgcaacgcggcgtcaaagggggcggggcttcagccggtcacgtgttcccgcacctccccggcgcgcgcctgcccgcccgcccgctcgcccccggtccggactcctcctcctcctcttctcgccattgcagttggacccagcagcccggcgcgcaccgcgtggcttttgggggcagaccccggcgggctgtggcaggagggcggcggcggcggctgcggtcgaagaaggggacgccgacaagagttgaagtattgataacaccaaggaactctatcacaatttgaaaagataagcaaaagtttgatttccagacactacagaagaagtaaaaatgcgtccaatgcgaatttttgtgaatgatgaccgccatgtgatggcaaagcattcttccgtttatccaacacaagaggagctggaggcagtccagaacatggtgtcccacacggagcgggcgctcaaagctgtgtccgactggatagacgagcaggaaaagggtagcagcgagcaggcagagtccgataacatggatgtgcccccagaggacgacagtaaagaaggggctggggaacagaagacggagcacatgaccagaaccctgcggggagtgatgcgggtgggcctggtggcaaagggcctcctactcaagggggacttggatctggagctggtgctgctgtgtaaggagaagcccacaaccgccctcctggacaaggtggccgacaacctggccatccagcttgctgctgtaacagaagacaagtacgaaatactgcaatctgtcgacgatgctgcgattgtgataaaaaacacaaaagagcctccattgtccctgaccatccacctgacatcccctgttgtcagagaagaaatggagaaagtattagctggagaaacgctatcagtcaacgaccccccggacgttctggacaggcagaaatgccttgctgccttggcgtccctccgacacgccaagtggttccaggccagagccaacgggctgaagtcttgtgtcattgtgatccgggtcttgagggacctgtgcactcgcgtgcccacctggggtcccctccgaggctggcctctcgagctcctgtgtgagaaatccattggcacggccaacagaccgatgggtgctggcgaggccctgcggagagtgctggagtgcctggcgtcgggcatcgtgatgccagatggttctggcatttatgacccttgtgaaaaagaagccactgatgctattgggcatctagacagacagcaacgggaagatatcacacagagtgcgcagcacgcactgcggctcgctgccttcggccagctccataaagtcctaggcatggaccctctgccttccaagatgcccaagaaaccaaagaatgaaaacccagtggactacaccgttcagatcccaccaagcaccacctatgccattacgcccatgaaacgcccaatggaggaggacggggaggagaagtcgcccagcaaaaagaagaagaagattcagaagaaaggtacaggccgggcgcggtggctcacgcctgtaatcccagcactttgggaggccgaggcgggagaatcgcttgagctcaggagttttgagaccatcagcctgggcaacatggcgaaaccccgtctctacaaaaaatacaaaaattagctgggtgtggtggcgcacctgtagtgccagctacttgggaggctgagatgggaggatggcttgagcctgggaggcggaggttgcagtgagcaactgtactccagcctgggcaacagagcgagaccttgcttaaaatcagtgttgaaaaattttagaagctaaataggtaaaaaagcaggaaggtgcagacctccactagtgctgctgctttatccatctggtcctgtgaaggctcaccctgaagctatgggatggctgcttttgtttcatttttctcacttgtgatttctgagtccttttaacaatgatgaggcatgattggggatgtggaagatgagtaggatggtggtgctacagctggaggccacaggagaggtgcaagctgggctcagtttgtgtggctgccccacccactgtgttacgccacagaggcagccctgggggttaggattggcagagctctcgtggagacctgccatcgtgctgatccagagccaccttgctattctctctgtagaggagaaggcagagcccccccaggctatgaatgccctgatgcggttgaaccagctgaagccagggctgcagtacaagctggtgtcccagactgggcccgtccatgcccccatctttaccatgtctgtggaggttgatggcaattcattcgaggcctctgggccctccaaaaagacggccaagctgcacgtggccgttaaggtgttacaggacatgggcttgccgacgggtgctgaaggcagggactcgagcaagggggaggactcggctgaggagaccgaggcgaagccagcagtggtggcccctgccccagtggtagaagctgtctccacccctagtgcggcctttccctcagatgccactgccggaacgcagcaggggccgatcctgacaaagcacggcaagaacccagtcatggagctgaacgagaagaggcgtgggctcaagtacgagctcatctccgagaccgggggcagccacgacaagcgcttcgtcatggaggtcgaagtggatggacagaagttccaaggtgctggttccaacaaaaaggtggcgaaggcctacgctgctcttgctgccctagaaaagcttttccctgacacccctctcgcccttgatgccaacaaaaagaagagagccccagtacccgtcagagggggaccgaaatttgctgctaagccacataaccctggcttcggcatgggaggccccatgcacaacgaagtgcccccaccccccaaccttcgagggcggggaagaggcgggagcatccggggacgagggcgcgggcgaggatttggtggcgccaaccatggaggctacatgaatgccggtgctgggtatggaagctatgggtacggaggcaactctgcgacagcaggctacagtgactttttcacagactgctacggctatcatgattttgggtcttcctagagcgtctaaaagtattgcacacaaaatcaactttttactccaatttcctccaactccaaaacccaaagtgtccgtgctgtgtccctgtgcttcactgggtttctcaaccgtggcttttcaccgcagcttgtctgaaactcttagcctgcagaatttaagacaatggcagtttttatcgtgatttgcctttgaacttggtcctattgaagttcacaataagtggaaaacaattttttcagagaatgtatttttgtgcagaattgcacagaattctagagacagcgttgttcggcatcaaggcaaaagcccacctttgctttttatggaaagcattactttatttaaagagacagacaatgacgcattttaatctacctttgtcttaatttacagcaggttttgtatgaatttttaaccttttaacaaactcccaaatctggttgatgcctttgacagtgatgaaaacgatttcaccacatctgaatccagagaaaccggctttttttcttattgcgagcatgttaaaacgttgggaacatgtggggaattgtatattgcgctgaattaacttctcccgcctcttgtaatgctctggtgggttcttgtttgggaatgcgatattttgtggctggtttagctagagagtgaactctcaaaggtatcaaaactgtgcttccattattagtgcaagaaacagacaggctttaaggggtagatgacgtgaaattttgcaagtcttaattacagctgcagatgcatgggattctggatttttttgttgctttttagtttaatgggactttaaaagtaattgaggagaaagaaccgtgatgttccctgtttctccagtaaaggactggcttttgcttgggcagaggtggtgctgctgggtgtgcagctgccacagactccaaaggcgtagaagtttgtgccaacacacggagtcattctggctctctgctgaggcccctgttttctggcaggtgccctccttggaaactggttttggctctgatcagcggttctttttgcagcaaagcctgcatctgtgttgacttgcaagattttgcgtttattcaggcaaaaactggtcaaaatggttactacatgatttgttcccagaggtttgaaacattcagtgaaactttttaaaactttgattgcatgatgtattttttttttagaaagttattgtttgagaataatgtctttttataccaggaaaatagttatcctgaatgacgttgaaaactccccctcccctttatttttttttaatcaatacatgtgaaagtaacaag

SEQ ID NO: 377441 - DNA, 5630 bp, Homo sapiens
agactttcacgggaaacaggaggatttatttagatgtacaccggctcagtggatttgtatctgaaaagctgaccattgaacaaagactgagtgtggtttttataggcaaacttacagaagcaaaacaaaagcagttaatgatacagtcacaggtcatgtaatctatagcataactgctgacttagcataacttgtggctttgcacagctgttggccttgcagctgtgtcaaaagaaaaacagagtctacaaatcttactaaatacaaccattggcaaacagtcatatttaatggttcagaaaaggagagacagtaaaggaatttttcttttcaactttgctccggaggaggctgtctggagcccattcctttggcctcgacttttcagtgttataactgtccttgaagtaagctggctaagcagaggaaaacttgttcttgttttctttttaacccttaccccctgccacataatcacatctttacacttcttttttttttttttttttttttttaagatgggaagtcggagtctcgctctgtcgcccaggctggagtgcagtggtgccatctcggctcattgtaacctctgcctcccaggttcaagtgattcaagccattcttgtgcctctgcctcctgagtagctgggattataggcgcacaccaccacacctggcgaatttttttttttttttttttttgaggctgagtctcactctatcgcccaggctggagtgcaatggagcaatctcggctcactgcaacctccgcctcctgggttcaagcgatcctcctgtctcagcttcctgattagctgggattacaggcgccctccaccacacccagttaatttttctatttttagtggagacggtgtttcaccatgttggccaggctggtctcaaactcctgacctcaagtgatccgcccacctcagcttcccaaagtgctgggattacaagcgtgagccaccacgcccagccaggaaacccattttcaacacctccttgctcttttttttttctgagacagagtctcgctctgtcgcccagactggagtgcagtggcgcaatctcggctcactgcaacctccgcctgccaggtcaaacaattctcctgcctcagcctcccaagtaggtgggactacaggcatgtgccaccacacccggctaattttcttttgtatttttagtagagacggggtttcaccatgctggccaggctggtctcgaactcctgacctcgtgatccgcccgcctcggcctcccaaagtgctgggattacaaacgtgagccaccgcgcctggccttccttgctcttcttgctccaaatcctgggaacgtctgaatcaacaggcggacatctgtcaaaccttcctagcaactacgcctgcggatggccaacctgaccctggaagacagtggggtttagttaagcacagattgtacatcgggggcctcataaggcgcctggaagcattcaagaacaccacgcttgtaaggacaaagcactcggtcacgggcgcctttacttcggagctccgcgctgctgctggacgagcgtccgttgagtcccagccccaatttttccaggaaatggcggtgagccctctagtgagatattttttggcctgggcctcagtttctccatctgtcaatgggggaagggtaaggcgggctagaggaccccgaccaggtcggctgcagccttcggaagctacggcccagggacgccacaccaaggcaggtctgcgggacgaaagaacccaagaacccgggcgcgcattggcgccggtcccgggctcaaggggcagcaacgaggagacgctggacctggccgttcctcgcacacatctctaaccttctgtgcctctcaagggagatggggtgagcatagccacctccactggagcccgaaaatccccggccgagataccgccactaaaaaggtacacatgcgtcaaagcctctcggagccatttccgctaacgtactcagggcgacgggcgtaagatggcggccgcgcaggcgcaaaatgtcgcagccgtagggaggctccgcctctgacgcttgccttgcatcacgtggtaatggccgctcaaaaaacgccttagcgaaaaccagagcgtgccctcgtcacgtgatggaggactcccagtacggcaaagggaaggcgccaaaagttgtcagatggcgaaggaaaccgcgaaattcgccattgtcacatgatggagcaacctatcgaaagcggagggaaaggtgccgaagtcacgtgactacgcacgcaaacactcccgcttgcaccacgtgcaactcacgcccaccccctcagccccccccttatctcttttcgcccctccctcccatttgggttgggcctgcgtcgaggcgcaacgcggcgtcaaagggggcggggcttcagccggtcacgtgttcccgcacctccccggcgcgcgcctgcccgcccgcccgctcgcccccggtccggactcctcctcctcctcttctcgccattgcagttggacccagcagcccggcgcgcaccgcgtggcttttgggggcagaccccggcgggctgtggcaggagggcggcggcggcggctgcggtcgaagaaggggacgccgacaagagttgaagtattgataacaccaaggaactctatcacaatttgaaaagataagcaaaagtttgatttccagacactacagaagaagtaaaaatgcgtccaatgcgaatttttgtgaatgatgaccgccatgtgatggcaaagcattcttccgtttatccaacacaagaggagctggaggcagtccagaacatggtgtcccacacggagcgggcgctcaaagctgtgtccgactggatagacgagcaggaaaagggtagcagcgagcaggcagagtccgataacatggatgtgcccccagaggacgacagtaaagaaggggctggggaacagaagacggagcacatgaccagaaccctgcggggagtgatgcgggtgggcctggtggcaaagggcctcctactcaagggggacttggatctggagctggtgctgctgtgtaaggagaagcccacaaccgccctcctggacaaggtggccgacaacctggccatccagcttgctgctgtaacagaagacaagtacgaaatactgcaatctgtcgacgatgctgcgattgtgataaaaaacacaaaagagcctccattgtccctgaccatccacctgacatcccctgttgtcagagaagaaatggagaaagtattagctggagaaacgctatcagtcaacgaccccccggacgttctggacaggcagaaatgccttgctgccttggcgtccctccgacacgccaagtggttccaggccagagccaacgggctgaagtcttgtgtcattgtgatccgggtcttgagggacctgtgcactcgcgtgcccacctggggtcccctccgaggctggcctctcgagctcctgtgtgagaaatccattggcacggccaacagaccgatgggtgctggcgaggccctgcggagagtgctggagtgcctggcgtcgggcatcgtgatgccagatggttctggcatttatgacccttgtgaaaaagaagccactgatgctattgggcatctagacagacagcaacgggaagatatcacacagagtgcgcagcacgcactgcggctcgctgccttcggccagctccataaagtcctaggcatggaccctctgccttccaagatgcccaagaaaccaaagaatgaaaacccagtggactacaccgttcagatcccaccaagcaccacctatgccattacgcccatgaaacgcccaatggaggaggacggggaggagaagtcgcccagcaaaaagaagaagaagattcagaagaaagaggagaaggcagagcccccccaggctatgaatgccctgatgcggttgaaccagctgaagccagggctgcagtacaagctggtgtcccagactgggcccgtccatgcccccatctttaccatgtctgtggaggttgatggcaattcattcgaggcctctgggccctccaaaaagacggccaagctgcacgtggccgttaaggtgttacaggacatgggcttgccgacgggtgctgaaggcagggactcgagcaagggggaggactcggctgaggagaccgaggcgaagccagcagtggtggcccctgccccagtggtagaagctgtctccacccctagtgcggcctttccctcagatgccactgccggaacgcagcaggggccgatcctgacaaagcacggcaagaacccagtcatggagctgaacgagaagaggcgtgggctcaagtacgagctcatctccgagaccgggggcagccacgacaagcgcttcgtcatggaggtcgaagtggatggacagaagttccaaggtgctggttccaacaaaaaggtggcgaaggcctacgctgctcttgctgccctagaaaagcttttccctgacacccctctcgcccttgatgccaacaaaaagaagagagccccagtacccgtcagagggggaccgaaatttgctgctaagccacataaccctggcttcggcatgggaggccccatgcacaacgaagtgcccccaccccccaaccttcgagggcggggaagaggcgggagcatccggggacgagggcgcgggcgaggatttggtggcgccaaccatggaggctacatgaatgccggtgctgggtatggaagctatgggtacggaggcaactctgcgacagcaggctacatgatgaaaacgatttcaccacatctgaatccagagaaaccggctttttttcttattgcgagcatgttaaaacgttgggaacatgtggggaattgtatattgcgctgaattaacttctcccgcctcttgtaatgctctggtgggttcttgtttgggaatgcgatattttgtggctggtttagctagagagtgaactctcaaaggtatcaaaactgtgcttccattattagtgcaagaaacagacaggctttaaggggtagatgacgtgaaattttgcaagtcttaattacagctgcagatgcatgggattctggatttttttgttgctttttagtttaatgggactttaaaagtaattgaggagaaagaaccgtgatgttccctgtttctccagtaaaggactggcttttgcttgggcagaggtggtgctgctgggtgtgcagctgccacagactccaaaggcgtagaagtttgtgccaacacacggagtcattctggctctctgctgaggcccctgttttctggcaggtgccctccttggaaactggttttggctctgatcagcggttctttttgcagcaaagcctgcatctgtgttgacttgcaagattttgcgtttattcaggcaaaaactggtcaaaatggttactacatgatttgttcccagaggtttgaaacattcagtgaaactttttaaaactttgattgcatgatgtattttttttttagaaagttattgtttgagaataatgtctttttataccaggaaaatagttatcctgaatgacgttgaaaactccccctcccctttatttttttttaatcaatacatgtgaaagtaacaag

SEQ ID NO: 377442 - DNA, 6044 bp, Homo sapiens
agactttcacgggaaacaggaggatttatttagatgtacaccggctcagtggatttgtatctgaaaagctgaccattgaacaaagactgagtgtggtttttataggcaaacttacagaagcaaaacaaaagcagttaatgatacagtcacaggtcatgtaatctatagcataactgctgacttagcataacttgtggctttgcacagctgttggccttgcagctgtgtcaaaagaaaaacagagtctacaaatcttactaaatacaaccattggcaaacagtcatatttaatggttcagaaaaggagagacagtaaaggaatttttcttttcaactttgctccggaggaggctgtctggagcccattcctttggcctcgacttttcagtgttataactgtccttgaagtaagctggctaagcagaggaaaacttgttcttgttttctttttaacccttaccccctgccacataatcacatctttacacttcttttttttttttttttttttttttaagatgggaagtcggagtctcgctctgtcgcccaggctggagtgcagtggtgccatctcggctcattgtaacctctgcctcccaggttcaagtgattcaagccattcttgtgcctctgcctcctgagtagctgggattataggcgcacaccaccacacctggcgaatttttttttttttttttttttgaggctgagtctcactctatcgcccaggctggagtgcaatggagcaatctcggctcactgcaacctccgcctcctgggttcaagcgatcctcctgtctcagcttcctgattagctgggattacaggcgccctccaccacacccagttaatttttctatttttagtggagacggtgtttcaccatgttggccaggctggtctcaaactcctgacctcaagtgatccgcccacctcagcttcccaaagtgctgggattacaagcgtgagccaccacgcccagccaggaaacccattttcaacacctccttgctcttttttttttctgagacagagtctcgctctgtcgcccagactggagtgcagtggcgcaatctcggctcactgcaacctccgcctgccaggtcaaacaattctcctgcctcagcctcccaagtaggtgggactacaggcatgtgccaccacacccggctaattttcttttgtatttttagtagagacggggtttcaccatgctggccaggctggtctcgaactcctgacctcgtgatccgcccgcctcggcctcccaaagtgctgggattacaaacgtgagccaccgcgcctggccttccttgctcttcttgctccaaatcctgggaacgtctgaatcaacaggcggacatctgtcaaaccttcctagcaactacgcctgcggatggccaacctgaccctggaagacagtggggtttagttaagcacagattgtacatcgggggcctcataaggcgcctggaagcattcaagaacaccacgcttgtaaggacaaagcactcggtcacgggcgcctttacttcggagctccgcgctgctgctggacgagcgtccgttgagtcccagccccaatttttccaggaaatggcggtgagccctctagtgagatattttttggcctgggcctcagtttctccatctgtcaatgggggaagggtaaggcgggctagaggaccccgaccaggtcggctgcagccttcggaagctacggcccagggacgccacaccaaggcaggtctgcgggacgaaagaacccaagaacccgggcgcgcattggcgccggtcccgggctcaaggggcagcaacgaggagacgctggacctggccgttcctcgcacacatctctaaccttctgtgcctctcaagggagatggggtgagcatagccacctccactggagcccgaaaatccccggccgagataccgccactaaaaaggtacacatgcgtcaaagcctctcggagccatttccgctaacgtactcagggcgacgggcgtaagatggcggccgcgcaggcgcaaaatgtcgcagccgtagggaggctccgcctctgacgcttgccttgcatcacgtggtaatggccgctcaaaaaacgccttagcgaaaaccagagcgtgccctcgtcacgtgatggaggactcccagtacggcaaagggaaggcgccaaaagttgtcagatggcgaaggaaaccgcgaaattcgccattgtcacatgatggagcaacctatcgaaagcggagggaaaggtgccgaagtcacgtgactacgcacgcaaacactcccgcttgcaccacgtgcaactcacgcccaccccctcagccccccccttatctcttttcgcccctccctcccatttgggttgggcctgcgtcgaggcgcaacgcggcgtcaaagggggcggggcttcagccggtcacgtgttcccgcacctccccggcgcgcgcctgcccgcccgcccgctcgcccccggtccggactcctcctcctcctcttctcgccattgcagttggacccagcagcccggcgcgcaccgcgtggcttttgggggcagaccccggcgggctgtggcaggagggcggcggcggcggctgcggtcgaagaaggggacgccgacaagagttgaagtattgataacaccaaggaactctatcacaatttgaaaagataagcaaaagtttgatttccagacactacagaagaagtaaaaatgcgtccaatgcgaatttttgtgaatgatgaccgccatgtgatggcaaagcattcttccgtttatccaacacaagaggagctggaggcagtccagaacatggtgtcccacacggagcgggcgctcaaagctgtgtccgactggatagacgagcaggaaaagggtagcagcgagcaggcagagtccgataacatggatgtgcccccagaggacgacagtaaagaaggggctggggaacagaagacggagcacatgaccagaaccctgcggggagtgatgcgggtgggcctggtggcaaagggcctcctactcaagggggacttggatctggagctggtgctgctgtgtaaggagaagcccacaaccgccctcctggacaaggtggccgacaacctggccatccagcttgctgctgtaacagaagacaagtacgaaatactgcaatctgtcgacgatgctgcgattgtgataaaaaacacaaaagagcctccattgtccctgaccatccacctgacatcccctgttgtcagagaagaaatggagaaagtattagctggaggccagagccaacgggctgaagtcttgtgtcattgtgatccgggtcttgagggacctgtgcactcgcgtgcccacctggggtcccctccgaggctggcctctcgagctcctgtgtgagaaatccattggcacggccaacagaccgatgggtgctggcgaggccctgcggagagtgctggagtgcctggcgtcgggcatcgtgatgccagatggttctggcatttatgacccttgtgaaaaagaagccactgatgctattgggcatctagacagacagcaacgggaagatatcacacagagtgcgcagcacgcactgcggctcgctgccttcggccagctccataaagtcctaggcatggaccctctgccttccaagatgcccaagaaaccaaagaatgaaaacccagtggactacaccgttcagatcccaccaagcaccacctatgccattacgcccatgaaacgcccaatggaggaggacggggaggagaagtcgcccagcaaaaagaagaagaagattcagaagaaagaggagaaggcagagcccccccaggctatgaatgccctgatgcggttgaaccagctgaagccagggctgcagtacaagctggtgtcccagactgggcccgtccatgcccccatctttaccatgtctgtggaggttgatggcaattcattcgaggcctctgggccctccaaaaagacggccaagctgcacgtggccgttaaggtgttacaggacatgggcttgccgacgggtgctgaaggcagggactcgagcaagggggaggactcggctgaggagaccgaggcgaagccagcagtggtggcccctgccccagtggtagaagctgtctccacccctagtgcggcctttccctcagatgccactgccggaacgcagcaggggccgatcctgacaaagcacggcaagaacccagtcatggagctgaacgagaagaggcgtgggctcaagtacgagctcatctccgagaccgggggcagccacgacaagcgcttcgtcatggaggtcgaagtggatggacagaagttccaaggtgctggttccaacaaaaaggtggcgaaggcctacgctgctcttgctgccctagaaaagcttttccctgacacccctctcgcccttgatgccaacaaaaagaagagagccccagtacccgtcagagggggaccgaaatttgctgctaagccacataaccctggcttcggcatgggaggccccatgcacaacgaagtgcccccaccccccaaccttcgagggcggggaagaggcgggagcatccggggacgagggcgcgggcgaggatttggtggcgccaaccatggaggctacatgaatgccggtgctgggtatggaagctatgggtacggaggcaactctgcgacagcaggctacagtgactttttcacagactgctacggctatcatgattttgggtcttcctagagcgtctaaaagtattgcacacaaaatcaactttttactccaatttcctccaactccaaaacccaaagtgtccgtgctgtgtccctgtgcttcactgggtttctcaaccgtggcttttcaccgcagcttgtctgaaactcttagcctgcagaatttaagacaatggcagtttttatcgtgatttgcctttgaacttggtcctattgaagttcacaataagtggaaaacaattttttcagagaatgtatttttgtgcagaattgcacagaattctagagacagcgttgttcggcatcaaggcaaaagcccacctttgctttttatggaaagcattactttatttaaagagacagacaatgacgcattttaatctacctttgtcttaatttacagcaggttttgtatgaatttttaaccttttaacaaactcccaaatctggttgatgcctttgacagtgatgaaaacgatttcaccacatctgaatccagagaaaccggctttttttcttattgcgagcatgttaaaacgttgggaacatgtggggaattgtatattgcgctgaattaacttctcccgcctcttgtaatgctctggtgggttcttgtttgggaatgcgatattttgtggctggtttagctagagagtgaactctcaaaggtatcaaaactgtgcttccattattagtgcaagaaacagacaggctttaaggggtagatgacgtgaaattttgcaagtcttaattacagctgcagatgcatgggattctggatttttttgttgctttttagtttaatgggactttaaaagtaattgaggagaaagaaccgtgatgttccctgtttctccagtaaaggactggcttttgcttgggcagaggtggtgctgctgggtgtgcagctgccacagactccaaaggcgtagaagtttgtgccaacacacggagtcattctggctctctgctgaggcccctgttttctggcaggtgccctccttggaaactggttttggctctgatcagcggttctttttgcagcaaagcctgcatctgtgttgacttgcaagattttgcgtttattcaggcaaaaactggtcaaaatggttactacatgatttgttcccagaggtttgaaacattcagtgaaactttttaaaactttgattgcatgatgtattttttttttagaaagttattgtttgagaataatgtctttttataccaggaaaatagttatcctgaatgacgttgaaaactccccctcccctttatttttttttaatcaatacatgtgaaagtaacaag

SEQ ID NO: 377443 - DNA, 3625 bp, Homo sapiens
ttcatacaaaacctgctgtaaattaagacaaaggtagattaaaatgcgtcattgtctgtctctttaaataaagtaatgctttccataaaaagcaaaggtgggcttttgccttgatgccgaacaacgcagtctctagaattttgtgcaattctgcacaaaaatacattctctgaaaaaattgttttccagacactacagaagaagtaaaaatgcgtccaatgcgaatttttgtgaatgatgaccgccatgtgatggcaaagcattcttccgtttatccaacacaagaggagctggaggcagtccagaacatggtgtcccacacggagcgggcgctcaaagctgtgtccgactggatagacgagcaggaaaagggtagcagcgagcaggcagagtccgataacatggatgtgcccccagaggacgacagtaaagaaggggctggggaacagaagacggagcacatgaccagaaccctgcggggagtgatgcgggtgggcctggtggcaaagggcctcctactcaagggggacttggatctggagctggtgctgctgtgtaaggagaagcccacaaccgccctcctggacaaggtggccgacaacctggccatccagcttgctgctgtaacagaagacaagtacgaaatactgcaatctgtcgacgatgctgcgattgtgataaaaaacacaaaagagcctccattgtccctgaccatccacctgacatcccctgttgtcagagaagaaatggagaaagtattagctggagaaacgctatcagtcaacgaccccccggacgttctggacaggcagaaatgccttgctgccttggcgtccctccgacacgccaagtggttccaggccagagccaacgggctgaagtcttgtgtcattgtgatccgggtcttgagggacctgtgcactcgcgtgcccacctggggtcccctccgaggctggcctctcgagctcctgtgtgagaaatccattggcacggccaacagaccgatgggtgctggcgaggccctgcggagagtgctggagtgcctggcgtcgggcatcgtgatgccagatggttctggcatttatgacccttgtgaaaaagaagccactgatgctattgggcatctagacagacagcaacgggaagatatcacacagagtgcgcagcacgcactgcggctcgctgccttcggccagctccataaagtcctaggcatggaccctctgccttccaagatgcccaagaaaccaaagaatgaaaacccagtggactacaccgttcagatcccaccaagcaccacctatgccattacgcccatgaaacgcccaatggaggaggacggggaggagaagtcgcccagcaaaaagaagaagaagattcagaagaaagaggagaaggcagagcccccccaggctatgaatgccctgatgcggttgaaccagctgaagccagggctgcagtacaagctggtgtcccagactgggcccgtccatgcccccatctttaccatgtctgtggaggttgatggcaattcattcgaggcctctgggccctccaaaaagacggccaagctgcacgtggccgttaaggtgttacaggacatgggcttgccgacgggtgctgaaggcagggactcgagcaagggggaggactcggctgaggagaccgaggcgaagccagcagtggtggcccctgccccagtggtagaagctgtctccacccctagtgcggcctttccctcagatgccactgccggaacgcagcaggggccgatcctgacaaagcacggcaagaacccagtcatggagctgaacgagaagaggcgtgggctcaagtacgagctcatctccgagaccgggggcagccacgacaagcgcttcgtcatggaggtcgaagtggatggacagaagttccaaggtgctggttccaacaaaaaggtggcgaaggcctacgctgctcttgctgccctagaaaagcttttccctgacacccctctcgcccttgatgccaacaaaaagaagagagccccagtacccgtcagagggggaccgaaatttgctgctaagccacataaccctggcttcggcatgggaggccccatgcacaacgaagtgcccccaccccccaaccttcgagggcggggaagaggcgggagcatccggggacgagggcgcgggcgaggatttggtggcgccaaccatggaggctacatgaatgccggtgctgggtatggaagctatgggtacggaggcaactctgcgacagcaggctacagtgactttttcacagactgctacggctatcatgattttgggtcttcctagagcgtctaaaagtattgcacacaaaatcaactttttactccaatttcctccaactccaaaacccaaagtgtccgtgctgtgtccctgtgcttcactgggtttctcaaccgtggcttttcaccgcagcttgtctgaaactcttagcctgcagaatttaagacaatggcagtttttatcgtgatttgcctttgaacttggtcctattgaagttcacaataagtggaaaacaattttttcagagaatgtatttttgtgcagaattgcacagaattctagagacagcgttgttcggcatcaaggcaaaagcccacctttgctttttatggaaagcattactttatttaaagagacagacaatgacgcattttaatctacctttgtcttaatttacagcaggttttgtatgaatttttaaccttttaacaaactcccaaatctggttgatgcctttgacagtgatgaaaacgatttcaccacatctgaatccagagaaaccggctttttttcttattgcgagcatgttaaaacgttgggaacatgtggggaattgtatattgcgctgaattaacttctcccgcctcttgtaatgctctggtgggttcttgtttgggaatgcgatattttgtggctggtttagctagagagtgaactctcaaaggtatcaaaactgtgcttccattattagtgcaagaaacagacaggctttaaggggtagatgacgtgaaattttgcaagtcttaattacagctgcagatgcatgggattctggatttttttgttgctttttagtttaatgggactttaaaagtaattgaggagaaagaaccgtgatgttccctgtttctccagtaaaggactggcttttgcttgggcagaggtggtgctgctgggtgtgcagctgccacagactccaaaggcgtagaagtttgtgccaacacacggagtcattctggctctctgctgaggcccctgttttctggcaggtgccctccttggaaactggttttggctctgatcagcggttctttttgcagcaaagcctgcatctgtgttgacttgcaagattttgcgtttattcaggcaaaaactggtcaaaatggttactacatgatttgttcccagaggtttgaaacattcagtgaaactttttaaaactttgattgcatgatgtattttttttttagaaagttattgtttgagaataatgtctttttataccaggaaaatagttatcctgaatgacgttgaaaactccccctcccctttatttttttttaatcaatacatgtgaaagtaacaag

SEQ ID NO: 377444 - DNA, 5490 bp, Homo sapiens
agactttcacgggaaacaggaggatttatttagatgtacaccggctcagtggatttgtatctgaaaagctgaccattgaacaaagactgagtgtggtttttataggcaaacttacagaagcaaaacaaaagcagttaatgatacagtcacaggtcatgtaatctatagcataactgctgacttagcataacttgtggctttgcacagctgttggccttgcagctgtgtcaaaagaaaaacagagtctacaaatcttactaaatacaaccattggcaaacagtcatatttaatggttcagaaaaggagagacagtaaaggaatttttcttttcaactttgctccggaggaggctgtctggagcccattcctttggcctcgacttttcagtgttataactgtccttgaagtaagctggctaagcagaggaaaacttgttcttgttttctttttaacccttaccccctgccacataatcacatctttacacttcttttttttttttttttttttttttaagatgggaagtcggagtctcgctctgtcgcccaggctggagtgcagtggtgccatctcggctcattgtaacctctgcctcccaggttcaagtgattcaagccattcttgtgcctctgcctcctgagtagctgggattataggcgcacaccaccacacctggcgaatttttttttttttttttttttgaggctgagtctcactctatcgcccaggctggagtgcaatggagcaatctcggctcactgcaacctccgcctcctgggttcaagcgatcctcctgtctcagcttcctgattagctgggattacaggcgccctccaccacacccagttaatttttctatttttagtggagacggtgtttcaccatgttggccaggctggtctcaaactcctgacctcaagtgatccgcccacctcagcttcccaaagtgctgggattacaagcgtgagccaccacgcccagccaggaaacccattttcaacacctccttgctcttttttttttctgagacagagtctcgctctgtcgcccagactggagtgcagtggcgcaatctcggctcactgcaacctccgcctgccaggtcaaacaattctcctgcctcagcctcccaagtaggtgggactacaggcatgtgccaccacacccggctaattttcttttgtatttttagtagagacggggtttcaccatgctggccaggctggtctcgaactcctgacctcgtgatccgcccgcctcggcctcccaaagtgctgggattacaaacgtgagccaccgcgcctggccttccttgctcttcttgctccaaatcctgggaacgtctgaatcaacaggcggacatctgtcaaaccttcctagcaactacgcctgcggatggccaacctgaccctggaagacagtggggtttagttaagcacagattgtacatcgggggcctcataaggcgcctggaagcattcaagaacaccacgcttgtaaggacaaagcactcggtcacgggcgcctttacttcggagctccgcgctgctgctggacgagcgtccgttgagtcccagccccaatttttccaggaaatggcggtgagccctctagtgagatattttttggcctgggcctcagtttctccatctgtcaatgggggaagggtaaggcgggctagaggaccccgaccaggtcggctgcagccttcggaagctacggcccagggacgccacaccaaggcaggtctgcgggacgaaagaacccaagaacccgggcgcgcattggcgccggtcccgggctcaaggggcagcaacgaggagacgctggacctggccgttcctcgcacacatctctaaccttctgtgcctctcaagggagatggggtgagcatagccacctccactggagcccgaaaatccccggccgagataccgccactaaaaaggtacacatgcgtcaaagcctctcggagccatttccgctaacgtactcagggcgacgggcgtaagatggcggccgcgcaggcgcaaaatgtcgcagccgtagggaggctccgcctctgacgcttgccttgcatcacgtggtaatggccgctcaaaaaacgccttagcgaaaaccagagcgtgccctcgtcacgtgatggaggactcccagtacggcaaagggaaggcgccaaaagttgtcagatggcgaaggaaaccgcgaaattcgccattgtcacatgatggagcaacctatcgaaagcggagggaaaggtgccgaagtcacgtgactacgcacgcaaacactcccgcttgcaccacgtgcaactcacgcccaccccctcagccccccccttatctcttttcgcccctccctcccatttgggttgggcctgcgtcgaggcgcaacgcggcgtcaaagggggcggggcttcagccggtcacgtgttcccgcacctccccggcgcgcgcctgcccgcccgcccgctcgcccccggtccggactcctcctcctcctcttctcgccattgcagttggacccagcagcccggcgcgcaccgcgtggcttttgggggcagaccccggcgggctgtggcaggagggcggcggcggcggctgcggtcgaagaaggggacgccgacaagagttgaagtattgataacaccaaggaactctatcacaatttgaaaagataagcaaaagtttgatttccagacactacagaagaagtaaaaatgcgtccaatgcgaatttttgtgaatgatgaccgccatgtgatggcaaagcattcttccgtttatccaacacaagaggagctggaggcagtccagaacatggtgtcccacacggagcgggcgctcaaagctgtgtccgactggatagacgagcaggaaaagggtagcagcgagcaggcagagtccgataacatggatgtgcccccagaggacgacagtaaagaaggggctggggaacagaagacggagcacatgaccagaaccctgcggggagtgatgcgggtgggcctggtggcaaagggcctcctactcaagggggacttggatctggagctggtgctgctgtgtaaggagaagcccacaaccgccctcctggacaaggtggccgacaacctggccatccagcttgctgctgtaacagaagacaagtacgaaatactgcaatctgtcgacgatgctgcgattgtgataaaaaacacaaaagagcctccattgtccctgaccatccacctgacatcccctgttgtcagagaagaaatggagaaagtattagctggagaaacgctatcagtcaacgaccccccggacgttctggacaggcagaaatgccttgctgccttggcgtccctccgacacgccaagtggttccaggccagagccaacgggctgaagtcttgtgtcattgtgatccgggtcttgagggacctgtgcactcgcgtgcccacctggggtcccctccgaggctggcctctcgagctcctgtgtgagaaatccattggcacggccaacagaccgatgggtgctggcgaggccctgcggagagtgctggagtgcctggcgtcgggcatcgtgatgccagatggttctggcatttatgacccttgtgaaaaagaagccactgatgctattgggcatctagacagacagcaacgggaagatatcacacagagtgcgcagcacgcactgcggctcgctgccttcggccagctccataaagtcctaggcatggaccctctgccttccaagatgcccaagaaaccaaagaatgaaaacccagtggactacaccgttcagatcccaccaagcaccacctatgccattacgcccatgaaacgcccaatggaggaggacggggaggagaagtcgcccagcaaaaagaagaagaagattcagaagaaagaggagaaggcagagcccccccaggctatgaatgccctgatgcggttgaaccagctgaagccagggctgcagtacaagctggtgtcccagactgggcccgtccatgcccccatctttaccatgtctgtggaggttgatggcaattcattcgaggcctctgggccctccaaaaagacggccaagctgcacgtggccgttaaggtgttacaggacatgggcttgccgacgggtgctgaaggcagggactcgagcaagggggaggactcggctgaggagaccgaggcgaagccagcagtggtggcccctgccccagtggtagaagctgtctccacccctagtgcggcctttccctcagatgccactgccggaacgcagcaggggccgatcctgacaaagcacggcaagaacccagtcatggagctgaacgagaagaggcgtgggctcaagtacgagctcatctccgagaccgggggcagccacgacaagcgcttcgtcatggaggtcgaagtggatggacagaagttccaaggtgctggttccaacaaaaaggtggcgaaggcctacgctgctcttgctgccctagaaaagcttttccctgacacccctctcgcccttgatgccaacaaaaagaagagagccccagtacccgtcagagggggaccgaaatttgctgctaagccacataaccctggcttcggcatgggaggccccatgcacaacgaagtgcccccaccccccaaccttcgagggcggggaagaggcgggagcatccggggacgagggcgcgggcgaggatttggtggcgccaaccatggaggctacatgaatgccggtgctgggtatggaagctatgggtacggaggcaactctgcgacagcaggctacagtcagttctacagcaacggagggcattctgggaatgccagtggcggtggcggcgggggcggtggtggctcctccggctatggctcctactaccaaggtgacaactacaactcaccggtgcccccaaaacacgctgggaagaagcagccgcacgggggccagcagaagccctcctacggctcgggctaccagtcccaccagggccagcagcagtcctacaaccagagcccctacagcaactatggccctccacagggcaagcagaaaggctataaccatggacaaggcagctactcctactcgaactcctacaactctcccgggggcgggggcggatccgactacaactacgagagcaaattcaactacagtggtagtggaggccgaagcggcgggaacagctacggctcaggcggggcatcctacaacccagggtcacacgggggctacggcggaggttctgggggcggctcctcataccaaggcaaacaaggaggctactcacagtcgaactacaactccccggggtccggccagaactacagtggccctcccagctcctaccagtcctcacaaggcggctatggcagaaacgcagaccacagcatgaactaccagtacagataagcccccgcggggcggagatttctaccttctgcacttactccccatactgatctataggagtggtggggtaccgagctcg

SEQ ID NO: 377445 - DNA, 5350 bp, Homo sapiens
agactttcacgggaaacaggaggatttatttagatgtacaccggctcagtggatttgtatctgaaaagctgaccattgaacaaagactgagtgtggtttttataggcaaacttacagaagcaaaacaaaagcagttaatgatacagtcacaggtcatgtaatctatagcataactgctgacttagcataacttgtggctttgcacagctgttggccttgcagctgtgtcaaaagaaaaacagagtctacaaatcttactaaatacaaccattggcaaacagtcatatttaatggttcagaaaaggagagacagtaaaggaatttttcttttcaactttgctccggaggaggctgtctggagcccattcctttggcctcgacttttcagtgttataactgtccttgaagtaagctggctaagcagaggaaaacttgttcttgttttctttttaacccttaccccctgccacataatcacatctttacacttcttttttttttttttttttttttttaagatgggaagtcggagtctcgctctgtcgcccaggctggagtgcagtggtgccatctcggctcattgtaacctctgcctcccaggttcaagtgattcaagccattcttgtgcctctgcctcctgagtagctgggattataggcgcacaccaccacacctggcgaatttttttttttttttttttttgaggctgagtctcactctatcgcccaggctggagtgcaatggagcaatctcggctcactgcaacctccgcctcctgggttcaagcgatcctcctgtctcagcttcctgattagctgggattacaggcgccctccaccacacccagttaatttttctatttttagtggagacggtgtttcaccatgttggccaggctggtctcaaactcctgacctcaagtgatccgcccacctcagcttcccaaagtgctgggattacaagcgtgagccaccacgcccagccaggaaacccattttcaacacctccttgctcttttttttttctgagacagagtctcgctctgtcgcccagactggagtgcagtggcgcaatctcggctcactgcaacctccgcctgccaggtcaaacaattctcctgcctcagcctcccaagtaggtgggactacaggcatgtgccaccacacccggctaattttcttttgtatttttagtagagacggggtttcaccatgctggccaggctggtctcgaactcctgacctcgtgatccgcccgcctcggcctcccaaagtgctgggattacaaacgtgagccaccgcgcctggccttccttgctcttcttgctccaaatcctgggaacgtctgaatcaacaggcggacatctgtcaaaccttcctagcaactacgcctgcggatggccaacctgaccctggaagacagtggggtttagttaagcacagattgtacatcgggggcctcataaggcgcctggaagcattcaagaacaccacgcttgtaaggacaaagcactcggtcacgggcgcctttacttcggagctccgcgctgctgctggacgagcgtccgttgagtcccagccccaatttttccaggaaatggcggtgagccctctagtgagatattttttggcctgggcctcagtttctccatctgtcaatgggggaagggtaaggcgggctagaggaccccgaccaggtcggctgcagccttcggaagctacggcccagggacgccacaccaaggcaggtctgcgggacgaaagaacccaagaacccgggcgcgcattggcgccggtcccgggctcaaggggcagcaacgaggagacgctggacctggccgttcctcgcacacatctctaaccttctgtgcctctcaagggagatggggtgagcatagccacctccactggagcccgaaaatccccggccgagataccgccactaaaaaggtacacatgcgtcaaagcctctcggagccatttccgctaacgtactcagggcgacgggcgtaagatggcggccgcgcaggcgcaaaatgtcgcagccgtagggaggctccgcctctgacgcttgccttgcatcacgtggtaatggccgctcaaaaaacgccttagcgaaaaccagagcgtgccctcgtcacgtgatggaggactcccagtacggcaaagggaaggcgccaaaagttgtcagatggcgaaggaaaccgcgaaattcgccattgtcacatgatggagcaacctatcgaaagcggagggaaaggtgccgaagtcacgtgactacgcacgcaaacactcccgcttgcaccacgtgcaactcacgcccaccccctcagccccccccttatctcttttcgcccctccctcccatttgggttgggcctgcgtcgaggcgcaacgcggcgtcaaagggggcggggcttcagccggtcacgtgttcccgcacctccccggcgcgcgcctgcccgcccgcccgctcgcccccggtccggactcctcctcctcctcttctcgccattgcagttggacccagcagcccggcgcgcaccgcgtggcttttgggggcagaccccggcgggctgtggcaggagggcggcggcggcggctgcggtcgaagaaggggacgccgacaagagttgaagtattgataacaccaaggaactctatcacaatttgaaaagataagcaaaagtttgatttccagacactacagaagaagtaaaaatgcgtccaatgcgaatttttgtgaatgatgaccgccatgtgatggcaaagcattcttccgtttatccaacacaagaggagctggaggcagtccagaacatggtgtcccacacggagcgggcgctcaaagctgtgtccgactggatagacgagcaggaaaagggtagcagcgagcaggcagagtccgataacatggatgtgcccccagaggacgacagtaaagaaggggctggggaacagaagacggagcacatgaccagaaccctgcggggagtgatgcgggtgggcctggtggcaaagggcctcctactcaagggggacttggatctggagctggtgctgctgtgtaaggagaagcccacaaccgccctcctggacaaggtggccgacaacctggccatccagcttgctgctgtaacagaagacaagtacgaaatactgcaatctgtcgacgatgctgcgattgtgataaaaaacacaaaagagcctccattgtccctgaccatccacctgacatcccctgttgtcagagaagaaatggagaaagtattagctggagaaacgctatcagtcaacgaccccccggacgttctggacaggcagaaatgccttgctgccttggcgtccctccgacacgccaagtggttccaggccagagccaacgggctgaagtcttgtgtcattgtgatccgggtcttgagggacctgtgcactcgcgtgcccacctggggtcccctccgaggctggcctctcgagctcctgtgtgagaaatccattggcacggccaacagaccgatgggtgctggcgaggccctgcggagagtgctggagtgcctggcgtcgggcatcgtgatgccagatggttctggcatttatgacccttgtgaaaaagaagccactgatgctattgggcatctagacagacagcaacgggaagatatcacacagagtgcgcagcacgcactgcggctcgctgccttcggccagctccataaagtcctaggcatggaccctctgccttccaagatgcccaagaaaccaaagaatgaaaacccagtggactacaccgttcagatcccaccaagcaccacctatgccattacgcccatgaaacgcccaatggaggaggacggggaggagaagtcgcccagcaaaaagaagaagaagattcagaagaaagaggagaaggcagagcccccccaggctatgaatgccctgatgcggttgaaccagctgaagccagggctgcagtacaagctggtgtcccagactgggcccgtccatgcccccatctttaccatgtctgtggaggttgatggcaattcattcgaggcctctgggccctccaaaaagacggccaagctgcacgtggccgttaaggtgttacaggacatgggcttgccgacgggtgctgaaggcagggactcgagcaagggggaggactcggctgaggagaccgaggcgaagccagcagtggtggcccctgccccagtggtagaagctgtctccacccctagtgcggcctttccctcagatgccactgccggaacgcagcaggggccgatcctgacaaagcacggcaagaacccagtcatggagctgaacgagaagaggcgtgggctcaagtacgagctcatctccgagaccgggggcagccacgacaagcgcttcgtcatggaggtcgaagtggatggacagaagttccaaggtgctggttccaacaaaaaggtggcgaaggcctacgctgctcttgctgccctagaaaagcttttccctgacacccctctcgcccttgatgccaacaaaaagaagagagccccagtacccgtcagagggggaccgaaatttgctgctaagccacataaccctggcttcggcatgggaggccccatgcacaacgaagtgcccccaccccccaaccttcgagggcggggaagaggcgggagcatccggggacgagggcgcgggcgaggatttggtggcgccaaccatggaggctacatgaatgccggtgctgggtatggaagctatgggtacggaggcaactctgcgacagcaggctacagtgactttttcacagactgctacggctatcatgattttgggtcttcctagagcgtctaaaagtattgcacacaaaatcaactttttactccaatttcctccaactccaaaacccaaagtgtccgtgctgtgtccctgtgcttcactgggtttctcaaccgtggcttttcaccgcagcttgtctgaaactcttagcctgcagaatttaagacaatggcagtttttatcgtgatttgcctttgaacttggtcctattgaagttcacaataagtggaaaacaattttttcagagaatgtatttttgtgcagaattgcacagaattctagagacagcgttgttcggcatcaaggcaaaagcccacctttgctttttatggaaagcattactttatttaaagagacagacaatgacgcattttaatctacctttgtcttaatttacagcaggttttgtatgaatttttaaccttttaacaaaaactccccaaaatcttgggttggaatgcccttttggaccagtgattggaaaaaaccgatttttcaacccacccttctggaaaatcccc

SEQ ID NO: 377446 - DNA, 5460 bp, Homo sapiens
agactttcacgggaaacaggaggatttatttagatgtacaccggctcagtggatttgtatctgaaaagctgaccattgaacaaagactgagtgtggtttttataggcaaacttacagaagcaaaacaaaagcagttaatgatacagtcacaggtcatgtaatctatagcataactgctgacttagcataacttgtggctttgcacagctgttggccttgcagctgtgtcaaaagaaaaacagagtctacaaatcttactaaatacaaccattggcaaacagtcatatttaatggttcagaaaaggagagacagtaaaggaatttttcttttcaactttgctccggaggaggctgtctggagcccattcctttggcctcgacttttcagtgttataactgtccttgaagtaagctggctaagcagaggaaaacttgttcttgttttctttttaacccttaccccctgccacataatcacatctttacacttcttttttttttttttttttttttttaagatgggaagtcggagtctcgctctgtcgcccaggctggagtgcagtggtgccatctcggctcattgtaacctctgcctcccaggttcaagtgattcaagccattcttgtgcctctgcctcctgagtagctgggattataggcgcacaccaccacacctggcgaatttttttttttttttttttttgaggctgagtctcactctatcgcccaggctggagtgcaatggagcaatctcggctcactgcaacctccgcctcctgggttcaagcgatcctcctgtctcagcttcctgattagctgggattacaggcgccctccaccacacccagttaatttttctatttttagtggagacggtgtttcaccatgttggccaggctggtctcaaactcctgacctcaagtgatccgcccacctcagcttcccaaagtgctgggattacaagcgtgagccaccacgcccagccaggaaacccattttcaacacctccttgctcttttttttttctgagacagagtctcgctctgtcgcccagactggagtgcagtggcgcaatctcggctcactgcaacctccgcctgccaggtcaaacaattctcctgcctcagcctcccaagtaggtgggactacaggcatgtgccaccacacccggctaattttcttttgtatttttagtagagacggggtttcaccatgctggccaggctggtctcgaactcctgacctcgtgatccgcccgcctcggcctcccaaagtgctgggattacaaacgtgagccaccgcgcctggccttccttgctcttcttgctccaaatcctgggaacgtctgaatcaacaggcggacatctgtcaaaccttcctagcaactacgcctgcggatggccaacctgaccctggaagacagtggggtttagttaagcacagattgtacatcgggggcctcataaggcgcctggaagcattcaagaacaccacgcttgtaaggacaaagcactcggtcacgggcgcctttacttcggagctccgcgctgctgctggacgagcgtccgttgagtcccagccccaatttttccaggaaatggcggtgagccctctagtgagatattttttggcctgggcctcagtttctccatctgtcaatgggggaagggtaaggcgggctagaggaccccgaccaggtcggctgcagccttcggaagctacggcccagggacgccacaccaaggcaggtctgcgggacgaaagaacccaagaacccgggcgcgcattggcgccggtcccgggctcaaggggcagcaacgaggagacgctggacctggccgttcctcgcacacatctctaaccttctgtgcctctcaagggagatggggtgagcatagccacctccactggagcccgaaaatccccggccgagataccgccactaaaaaggtacacatgcgtcaaagcctctcggagccatttccgctaacgtactcagggcgacgggcgtaagatggcggccgcgcaggcgcaaaatgtcgcagccgtagggaggctccgcctctgacgcttgccttgcatcacgtggtaatggccgctcaaaaaacgccttagcgaaaaccagagcgtgccctcgtcacgtgatggaggactcccagtacggcaaagggaaggcgccaaaagttgtcagatggcgaaggaaaccgcgaaattcgccattgtcacatgatggagcaacctatcgaaagcggagggaaaggtgccgaagtcacgtgactacgcacgcaaacactcccgcttgcaccacgtgcaactcacgcccaccccctcagccccccccttatctcttttcgcccctccctcccatttgggttgggcctgcgtcgaggcgcaacgcggcgtcaaagggggcggggcttcagccggtcacgtgttcccgcacctccccggcgcgcgcctgcccgcccgcccgctcgcccccggtccggactcctcctcctcctcttctcgccattgcagttggacccagcagcccggcgcgcaccgcgtggcttttgggggcagaccccggcgggctgtggcaggagggcggcggcggcggctgcggtcgaagaaggggacgccgacaagagttgaagtattgataacaccaaggaactctatcacaatttgaaaagataagcaaaagtttgatttccagacactacagaagaagtaaaaatgcgtccaatgcgaatttttgtgaatgatgaccgccatgtgatggcaaagcattcttccgtttatccaacacaagaggagctggaggcagtccagaacatggtgtcccacacggagcgggcgctcaaagctgtgtccgactggatagacgagcaggaaaagggtagcagcgagcaggcagagtccgataacatggatgtgcccccagaggacgacagtaaagaaggggctggggaacagaagacggagcacatgaccagaaccctgcggggagtgatgcgggtgggcctggtggcaaagggcctcctactcaagggggacttggatctggagctggtgctgctgtgtaaggagaagcccacaaccgccctcctggacaaggtggccgacaacctggccatccagcttgctgctgtaacagaagacaagtacgaaatactgcaatctgtcgacgatgctgcgattgtgataaaaaacacaaaagagcctccattgtccctgaccatccacctgacatcccctgttgtcagagaagaaatggagaaagtattagctggagaaacgctatcagtcaacgaccccccggacgttctggacaggcagaaatgccttgctgccttggcgtccctccgacacgccaagtggttccaggccagagccaacgggctgaagtcttgtgtcattgtgatccgggtcttgagggacctgtgcactcgcgtgcccacctggggtcccctccgaggctggcctctcgagctcctgtgtgagaaatccattggcacggccaacagaccgatgggtgctggcgaggccctgcggagagtgctggagtgcctggcgtcgggcatcgtgatgccagatggttctggcatttatgacccttgtgaaaaagaagccactgatgctattgggcatctagacagacagcaacgggaagatatcacacagagtgcgcagcacgcactgcggctcgctgccttcggccagctccataaagtcctaggcatggaccctctgccttccaagatgcccaagaaaccaaagaatgaaaacccagtggactacaccgttcagatcccaccaagcaccacctatgccattacgcccatgaaacgcccaatggaggaggacggggaggagaagtcgcccagcaaaaagaagaagaagattcagaagaaagaggagaaggcagagcccccccaggctatgaatgccctgatgcggttgaaccagctgaagccagggctgcagtacaagctggtgtcccagactgggcccgtccatgcccccatctttaccatgtctgtggaggttgatggcaattcattcgaggcctctgggccctccaaaaagacggccaagctgcacgtggccgttaaggtgttacaggacatgggcttgccgacgggtgctgaaggcagggactcgagcaagggggaggactcggctgaggagaccgaggcgaagccagcagtggtggcccctgccccagtggtagaagctgtctccacccctagtgcggcctttccctcagatgccactgccggaacgcagcaggggccgatcctgacaaagcacggcaagaacccagtcatggagctgaacgagaagaggcgtgggctcaagtacgagctcatctccgagaccgggggcagccacgacaagcgcttcgtcatggaggtcgaagtggatggacagaagttccaaggtgctggttccaacaaaaaggtggcgaaggcctacgctgctcttgctgccctagaaaagcttttccctgacacccctctcgcccttgatgccaacaaaaagaagagagccccagtacccgtcagagggggaccgaaatttgctgctaagccacataaccctggcttcggcatgggaggccccatgcacaacgaagtgcccccaccccccaaccttcgagggcggggaagaggcgggagcatccggggacgagggcgcgggcgaggatttggtggcgccaaccatggaggctacatgaatgccggtgctgggtatggaagctatgggtacggaggcaactctgcgacagcaggctacagtcagttctacagcaacggagggcattctgggaatgccagtggcggtggcggcgggggcggtggtggctcctccggctatggctcctactaccaaggtgacaactacaactcaccggtgcccccaaaacacgctgggaagaagcagccgcacgggggccagcagaagccctcctacggctcgggctaccagtcccaccagggccagcagcagtcctacaaccagagcccctacagcaactatggccctccacagggcaagcagaaaggctataaccatggacaaggcagctactcctactcgaactcctacaactctcccgggggcgggggcggatccgactacaactacgagagcaaattcaactacagtggtagtggaggccgaagcggcgggaacagctacggctcaggcggggcatcctacaacccagggtcacacgggggctacggcggaggttgctgtgctccgggtgggtacaggggctcagcctctgaggatggtgacctggtttgtaactgtccctttacccacaccaggagagagaaataaggaacagtcccctgggaggtgtccaggaccaggagggcacaggaagggaattttaggcatctaaggattcttatttccagtatgaaatctattcaagacctttgctgtcctcctgtggatgcag

SEQ ID NO: 377447 - DNA, 5454 bp, Homo sapiens
agactttcacgggaaacaggaggatttatttagatgtacaccggctcagtggatttgtatctgaaaagctgaccattgaacaaagactgagtgtggtttttataggcaaacttacagaagcaaaacaaaagcagttaatgatacagtcacaggtcatgtaatctatagcataactgctgacttagcataacttgtggctttgcacagctgttggccttgcagctgtgtcaaaagaaaaacagagtctacaaatcttactaaatacaaccattggcaaacagtcatatttaatggttcagaaaaggagagacagtaaaggaatttttcttttcaactttgctccggaggaggctgtctggagcccattcctttggcctcgacttttcagtgttataactgtccttgaagtaagctggctaagcagaggaaaacttgttcttgttttctttttaacccttaccccctgccacataatcacatctttacacttcttttttttttttttttttttttttaagatgggaagtcggagtctcgctctgtcgcccaggctggagtgcagtggtgccatctcggctcattgtaacctctgcctcccaggttcaagtgattcaagccattcttgtgcctctgcctcctgagtagctgggattataggcgcacaccaccacacctggcgaatttttttttttttttttttttgaggctgagtctcactctatcgcccaggctggagtgcaatggagcaatctcggctcactgcaacctccgcctcctgggttcaagcgatcctcctgtctcagcttcctgattagctgggattacaggcgccctccaccacacccagttaatttttctatttttagtggagacggtgtttcaccatgttggccaggctggtctcaaactcctgacctcaagtgatccgcccacctcagcttcccaaagtgctgggattacaagcgtgagccaccacgcccagccaggaaacccattttcaacacctccttgctcttttttttttctgagacagagtctcgctctgtcgcccagactggagtgcagtggcgcaatctcggctcactgcaacctccgcctgccaggtcaaacaattctcctgcctcagcctcccaagtaggtgggactacaggcatgtgccaccacacccggctaattttcttttgtatttttagtagagacggggtttcaccatgctggccaggctggtctcgaactcctgacctcgtgatccgcccgcctcggcctcccaaagtgctgggattacaaacgtgagccaccgcgcctggccttccttgctcttcttgctccaaatcctgggaacgtctgaatcaacaggcggacatctgtcaaaccttcctagcaactacgcctgcggatggccaacctgaccctggaagacagtggggtttagttaagcacagattgtacatcgggggcctcataaggcgcctggaagcattcaagaacaccacgcttgtaaggacaaagcactcggtcacgggcgcctttacttcggagctccgcgctgctgctggacgagcgtccgttgagtcccagccccaatttttccaggaaatggcggtgagccctctagtgagatattttttggcctgggcctcagtttctccatctgtcaatgggggaagggtaaggcgggctagaggaccccgaccaggtcggctgcagccttcggaagctacggcccagggacgccacaccaaggcaggtctgcgggacgaaagaacccaagaacccgggcgcgcattggcgccggtcccgggctcaaggggcagcaacgaggagacgctggacctggccgttcctcgcacacatctctaaccttctgtgcctctcaagggagatggggtgagcatagccacctccactggagcccgaaaatccccggccgagataccgccactaaaaaggtacacatgcgtcaaagcctctcggagccatttccgctaacgtactcagggcgacgggcgtaagatggcggccgcgcaggcgcaaaatgtcgcagccgtagggaggctccgcctctgacgcttgccttgcatcacgtggtaatggccgctcaaaaaacgccttagcgaaaaccagagcgtgccctcgtcacgtgatggaggactcccagtacggcaaagggaaggcgccaaaagttgtcagatggcgaaggaaaccgcgaaattcgccattgtcacatgatggagcaacctatcgaaagcggagggaaaggtgccgaagtcacgtgactacgcacgcaaacactcccgcttgcaccacgtgcaactcacgcccaccccctcagccccccccttatctcttttcgcccctccctcccatttgggttgggcctgcgtcgaggcgcaacgcggcgtcaaagggggcggggcttcagccggtcacgtgttcccgcacctccccggcgcgcgcctgcccgcccgcccgctcgcccccggtccggactcctcctcctcctcttctcgccattgcagttggacccagcagcccggcgcgcaccgcgtggcttttgggggcagaccccggcgggctgtggcaggagggcggcggcggcggctgcggtcgaagaaggggacgccgacaagagttgaagtattgataacaccaaggaactctatcacaatttgaaaagataagcaaaagtttgatttccagacactacagaagaagtaaaaatgcgtccaatgcgaatttttgtgaatgatgaccgccatgtgatggcaaagcattcttccgtttatccaacacaagaggagctggaggcagtccagaacatggtgtcccacacggagcgggcgctcaaagctgtgtccgactggatagacgagcaggaaaagggtagcagcgagcaggcagagtccgataacatggatgtgcccccagaggacgacagtaaagaaggggctggggaacagaagacggagcacatgaccagaaccctgcggggagtgatgcgggtgggcctggtggcaaagggcctcctactcaagggggacttggatctggagctggtgctgctgtgtaaggagaagcccacaaccgccctcctggacaaggtggccgacaacctggccatccagcttgctgctgtaacagaagacaagtacgaaatactgcaatctgtcgacgatgctgcgattgtgataaaaaacacaaaagagcctccattgtccctgaccatccacctgacatcccctgttgtcagagaagaaatggagaaagtattagctggagaaacgctatcagtcaacgaccccccggacgttctggacaggcagaaatgccttgctgccttggcgtccctccgacacgccaagtggttccaggccagagccaacgggctgaagtcttgtgtcattgtgatccgggtcttgagggacctgtgcactcgcgtgcccacctggggtcccctccgaggctggcctctcgagctcctgtgtgagaaatccattggcacggccaacagaccgatgggtgctggcgaggccctgcggagagtgctggagtgcctggcgtcgggcatcgtgatgccagatggttctggcatttatgacccttgtgaaaaagaagccactgatgctattgggcatctagacagacagcaacgggaagatatcacacagagtgcgcagcacgcactgcggctcgctgccttcggccagctccataaagtcctaggcatggaccctctgccttccaagatgcccaagaaaccaaagaatgaaaacccagtggactacaccgttcagatcccaccaagcaccacctatgccattacgcccatgaaacgcccaatggaggaggacggggaggagaagtcgcccagcaaaaagaagaagaagattcagaagaaagaggagaaggcagagcccccccaggctatgaatgccctgatgcggttgaaccagctgaagccagggctgcagtacaagctggtgtcccagactgggcccgtccatgcccccatctttaccatgtctgtggaggttgatggcaattcattcgaggcctctgggccctccaaaaagacggccaagctgcacgtggccgttaaggtgttacaggacatgggcttgccgacgggtgctgaaggcagggactcgagcaagggggaggactcggctgaggagaccgaggcgaagccagcagtggtggcccctgccccagtggtagaagctgtctccacccctagtgcggcctttccctcagatgccactgccggaacgcagcaggggccgatcctgacaaagcacggcaagaacccagtcatggagctgaacgagaagaggcgtgggctcaagtacgagctcatctccgagaccgggggcagccacgacaagcgcttcgtcatggaggtcgaagtggatggacagaagttccaaggtgctggttccaacaaaaaggtggcgaaggcctacgctgctcttgctgccctagaaaagcttttccctgacacccctctcgcccttgatgccaacaaaaagaagagagccccagtacccgtcagagggggaccgaaatttgctgctaagccacataaccctggcttcggcatgggaggccccatgcacaacgaagtgcccccaccccccaaccttcgagggcggggaagaggcgggagcatccggggacgagggcgcgggcgaggatttggtggcgccaaccatggaggctacatgaatgccggtgctgggtatggaagctatgggtacggaggcaactctgcgacagcaggctacagtgactttttcacagactgctacggctatcatgattttgggtcttcctagagcgtctaaaagtattgcacacaaaatcaactttttactccaatttcctccaactccaaaacccaaagtgtccgtgctgtgtccctgtgcttcactgggtttctcaaccgtggcttttcaccgcagcttgtctgaaactcttagcctgcagaatttaagacaatggcagtttttatcgtgatttgcctttgaacttggtcctatttatattgaagttcacaaataaggttggaaaaaccaaatttttttttccagggaaggaaatgggtaatttctttgggttgggcaagaaaattttgggcaccagggggaaaaaacttttcccttagagggaagagcaaaccccaaggcccgacatgttgaggaaattttcacacgcgggggggacgccaaaaattttccggaaaagaggggcgtgcggtccacaatataaagaaaaaaagagggcggggccccccacccacaagaaaagaaccccccctgtttttttttttttgtgtgggggcgcaccccaattatatagtatgtgagactgtgctacaacacgctgggggggcgggggacaccaaaaccacacgcaggggcggtccccaaaattttttttataaaccagattttt

SEQ ID NO: 377448 - DNA, 2860 bp, Homo sapiens
  misc_feature (1)..(1): n is a, c, g, or t
  misc_feature (8)..(8): n is a, c, g, or t
  misc_feature (16)..(16): n is a, c, g, or t
  misc_feature (55)..(55): n is a, c, g, or t
  misc_feature (60)..(60): n is a, c, g, or t
  misc_feature (90)..(90): n is a, c, g, or t
ncaaaaancggccaanttgaagtgccgttaggtgtccagacatgggcttgttccnttggngtccttccgacaacgccaagtggttccagnccaaagccagagccaacgggctgaagtcttgtgtcattgtgatccgggtcttgagggacctgtgcactcgcgtgcccacctggggtcccctccgaggctggcctctcgagctcctgtgtgagaaatccattggcacggccaacagaccgatgggtgctggcgaggccctgcggagagtgctggagtgcctggcgtcgggcatcgtgatgccagatggttctggcatttatgacccttgtgaaaaagaagccactgatgctattgggcatctagacagacagcaacgggaagatatcacacagagtgcgcagcacgcactgcggctcgctgccttcggccagctccataaagtcctaggcatggaccctctgccttccaagatgcccaagaaaccaaagaatgaaaacccagtggactacaccgttcagatcccaccaagcaccacctatgccattacgcccatgaaacgcccaatggaggaggacggggaggagaagtcgcccagcaaaaagaagaagaagattcagaagaaagaggagaaggcagagcccccccaggctatgaatgccctgatgcggttgaaccagctgaagccagggctgcagtacaagctggtgtcccagactgggcccgtccatgcccccatctttaccatgtctgtggaggttgatggcaattcattcgaggcctctgggccctccaaaaagacggccaagctgcacgtggccgttaaggtgttacaggacatgggcttgccgacgggtgctgaaggcagggactcgagcaagggggaggactcggctgaggagaccgaggcgaagccagcagtggtggcccctgccccagtggtagaagctgtctccacccctagtgcggcctttccctcagatgccactgccggaacgcagcaggggccgatcctgacaaagcacggcaagaacccagtcatggagctgaacgagaagaggcgtgggctcaagtacgagctcatctccgagaccgggggcagccacgacaagcgcttcgtcatggaggtcgaagtggatggacagaagttccaaggtgctggttccaacaaaaaggtggcgaaggcctacgctgctcttgctgccctagaaaagcttttccctgacacccctctcgcccttgatgccaacaaaaagaagagagccccagtacccgtcagagggggaccgaaatttgctgctaagccacataaccctggcttcggcatgggaggccccatgcacaacgaagtgcccccaccccccaaccttcgagggcggggaagaggcgggagcatccggggacgagggcgcgggcgaggatttggtggcgccaaccatggaggctacatgaatgccggtgctgggtatggaagctatgggtacggaggcaactctgcgacagcaggctacagtgactttttcacagactgctacggctatcatgattttgggtcttcctagagcgtctaaaagtattgcacacaaaatcaactttttactccaatttcctccaactccaaaacccaaagtgtccgtgctgtgtccctgtgcttcactgggtttctcaaccgtggcttttcaccgcagcttgtctgaaactcttagcctgcagaatttaagacaatggcagtttttatcgtgatttgcctttgaacttggtcctattgaagttcacaataagtggaaaacaattttttcagagaatgtatttttgtgcagaattgcacagaattctagagacagcgttgttcggcatcaaggcaaaagcccacctttgctttttatggaaagcattactttatttaaagagacagacaatgacgcattttaatctacctttgtcttaatttacagcaggttttgtatgaatttttaaccttttaacaaactcccaaatctggttgatgcctttgacagtgatgaaaacgatttcaccacatctgaatccagagaaaccggctttttttcttattgcgagcatgttaaaacgttgggaacatgtggggaattgtatattgcgctgaattaacttctcccgcctcttgtaatgctctggtgggttcttgtttgggaatgcgatattttgtggctggtttagctagagagtgaactctcaaaggtatcaaaactgtgcttccattattagtgcaagaaacagacaggctttaaggggtagatgacgtgaaattttgcaagtcttaattacagctgcagatgcatgggattctggatttttttgttgctttttagtttaatgggactttaaaagtaattgaggagaaagaaccgtgatgttccctgtttctccagtaaaggactggcttttgcttgggcagaggtggtgctgctgggtgtgcagctgccacagactccaaaggcgtagaagtttgtgccaacacacggagtcattctggctctctgctgaggcccctgttttctggcaggtgccctccttggaaactggttttggctctgatcagcggttctttttgcagcaaagcctgcatctgtgttgacttgcaagattttgcgtttattcaggcaaaaactggtcaaaatggttactacatgatttgttcccagaggtttgaaacattcagtgaaactttttaaaactttgattgcatgatgtattttttttttagaaagttattgtttgagaataatgtctttttataccaggaaaatagttatcctgaatgacgttgaaaactccccctcccctttatttttttttaatcaatacatgtgaaagtaacaag

SEQ ID NO: 377449 - DNA, 2799 bp, Homo sapiens
cacgcatacacacacacactcatgcacacacacactcttacccacgcattcacgcagacacacatgcacacacacactcctcacatacccacgcattcacgcatacacacagacacacactcatgcacacacacactcgtatgcacactcagtgacacacacattcctcaacagaccgatgggtgctggcgaggccctgcggagagtgctggagtgcctggcgtcgggcatcgtgatgccagatggttctggcatttatgacccttgtgaaaaagaagccactgatgctattgggcatctagacagacagcaacgggaagatatcacacagagtgcgcagcacgcactgcggctcgctgccttcggccagctccataaagtcctaggcatggaccctctgccttccaagatgcccaagaaaccaaagaatgaaaacccagtggactacaccgttcagatcccaccaagcaccacctatgccattacgcccatgaaacgcccaatggaggaggacggggaggagaagtcgcccagcaaaaagaagaagaagattcagaagaaagaggagaaggcagagcccccccaggctatgaatgccctgatgcggttgaaccagctgaagccagggctgcagtacaagctggtgtcccagactgggcccgtccatgcccccatctttaccatgtctgtggaggttgatggcaattcattcgaggcctctgggccctccaaaaagacggccaagctgcacgtggccgttaaggtgttacaggacatgggcttgccgacgggtgctgaaggcagggactcgagcaagggggaggactcggctgaggagaccgaggcgaagccagcagtggtggcccctgccccagtggtagaagctgtctccacccctagtgcggcctttccctcagatgccactgccggaacgcagcaggggccgatcctgacaaagcacggcaagaacccagtcatggagctgaacgagaagaggcgtgggctcaagtacgagctcatctccgagaccgggggcagccacgacaagcgcttcgtcatggaggtcgaagtggatggacagaagttccaaggtgctggttccaacaaaaaggtggcgaaggcctacgctgctcttgctgccctagaaaagcttttccctgacacccctctcgcccttgatgccaacaaaaagaagagagccccagtacccgtcagagggggaccgaaatttgctgctaagccacataaccctggcttcggcatgggaggccccatgcacaacgaagtgcccccaccccccaaccttcgagggcggggaagaggcgggagcatccggggacgagggcgcgggcgaggatttggtggcgccaaccatggaggctacatgaatgccggtgctgggtatggaagctatgggtacggaggcaactctgcgacagcaggctacagtgactttttcacagactgctacggctatcatgattttgggtcttcctagagcgtctaaaagtattgcacacaaaatcaactttttactccaatttcctccaactccaaaacccaaagtgtccgtgctgtgtccctgtgcttcactgggtttctcaaccgtggcttttcaccgcagcttgtctgaaactcttagcctgcagaatttaagacaatggcagtttttatcgtgatttgcctttgaacttggtcctattgaagttcacaataagtggaaaacaattttttcagagaatgtatttttgtgcagaattgcacagaattctagagacagcgttgttcggcatcaaggcaaaagcccacctttgctttttatggaaagcattactttatttaaagagacagacaatgacgcattttaatctacctttgtcttaatttacagcaggttttgtatgaatttttaaccttttaacaaactcccaaatctggttgatgcctttgacagtgatgaaaacgatttcaccacatctgaatccagagaaaccggctttttttcttattgcgagcatgttaaaacgttgggaacatgtggggaattgtatattgcgctgaattaacttctcccgcctcttgtaatgctctggtgggttcttgtttgggaatgcgatattttgtggctggtttagctagagagtgaactctcaaaggtatcaaaactgtgcttccattattagtgcaagaaacagacaggctttaaggggtagatgacgtgaaattttgcaagtcttaattacagctgcagatgcatgggattctggatttttttgttgctttttagtttaatgggactttaaaagtaattgaggagaaagaaccgtgatgttccctgtttctccagtaaaggactggcttttgcttgggcagaggtggtgctgctgggtgtgcagctgccacagactccaaaggcgtagaagtttgtgccaacacacggagtcattctggctctctgctgaggcccctgttttctggcaggtgccctccttggaaactggttttggctctgatcagcggttctttttgcagcaaagcctgcatctgtgttgacttgcaagattttgcgtttattcaggcaaaaactggtcaaaatggttactacatgatttgttcccagaggtttgaaacattcagtgaaactttttaaaactttgattgcatgatgtattttttttttagaaagttattgtttgagaataatgtctttttataccaggaaaatagttatcctgaatgacgttgaaaactccccctcccctttatttttttttaatcaatacatgtgaaagtaacaag

SEQ ID NO: 377450 - DNA, 2586 bp, Homo sapiens
actccagagggtacaccgccgcccggcagatggttctggcatttatgacccttgtgaaaaagaagccactgatgctattgggcatctagacagacagcaacgggaagatatcacacagagtgcgcagcacgcactgcggctcgctgccttcggccagctccataaagtcctaggcatggaccctctgccttccaagatgcccaagaaaccaaagaatgaaaacccagtggactacaccgttcagatcccaccaagcaccacctatgccattacgcccatgaaacgcccaatggaggaggacggggaggagaagtcgcccagcaaaaagaagaagaagattcagaagaaagaggagaaggcagagcccccccaggctatgaatgccctgatgcggttgaaccagctgaagccagggctgcagtacaagctggtgtcccagactgggcccgtccatgcccccatctttaccatgtctgtggaggttgatggcaattcattcgaggcctctgggccctccaaaaagacggccaagctgcacgtggccgttaaggtgttacaggacatgggcttgccgacgggtgctgaaggcagggactcgagcaagggggaggactcggctgaggagaccgaggcgaagccagcagtggtggcccctgccccagtggtagaagctgtctccacccctagtgcggcctttccctcagatgccactgccggaacgcagcaggggccgatcctgacaaagcacggcaagaacccagtcatggagctgaacgagaagaggcgtgggctcaagtacgagctcatctccgagaccgggggcagccacgacaagcgcttcgtcatggaggtcgaagtggatggacagaagttccaaggtgctggttccaacaaaaaggtggcgaaggcctacgctgctcttgctgccctagaaaagcttttccctgacacccctctcgcccttgatgccaacaaaaagaagagagccccagtacccgtcagagggggaccgaaatttgctgctaagccacataaccctggcttcggcatgggaggccccatgcacaacgaagtgcccccaccccccaaccttcgagggcggggaagaggcgggagcatccggggacgagggcgcgggcgaggatttggtggcgccaaccatggaggctacatgaatgccggtgctgggtatggaagctatgggtacggaggcaactctgcgacagcaggctacagtgactttttcacagactgctacggctatcatgattttgggtcttcctagagcgtctaaaagtattgcacacaaaatcaactttttactccaatttcctccaactccaaaacccaaagtgtccgtgctgtgtccctgtgcttcactgggtttctcaaccgtggcttttcaccgcagcttgtctgaaactcttagcctgcagaatttaagacaatggcagtttttatcgtgatttgcctttgaacttggtcctattgaagttcacaataagtggaaaacaattttttcagagaatgtatttttgtgcagaattgcacagaattctagagacagcgttgttcggcatcaaggcaaaagcccacctttgctttttatggaaagcattactttatttaaagagacagacaatgacgcattttaatctacctttgtcttaatttacagcaggttttgtatgaatttttaaccttttaacaaactcccaaatctggttgatgcctttgacagtgatgaaaacgatttcaccacatctgaatccagagaaaccggctttttttcttattgcgagcatgttaaaacgttgggaacatgtggggaattgtatattgcgctgaattaacttctcccgcctcttgtaatgctctggtgggttcttgtttgggaatgcgatattttgtggctggtttagctagagagtgaactctcaaaggtatcaaaactgtgcttccattattagtgcaagaaacagacaggctttaaggggtagatgacgtgaaattttgcaagtcttaattacagctgcagatgcatgggattctggatttttttgttgctttttagtttaatgggactttaaaagtaattgaggagaaagaaccgtgatgttccctgtttctccagtaaaggactggcttttgcttgggcagaggtggtgctgctgggtgtgcagctgccacagactccaaaggcgtagaagtttgtgccaacacacggagtcattctggctctctgctgaggcccctgttttctggcaggtgccctccttggaaactggttttggctctgatcagcggttctttttgcagcaaagcctgcatctgtgttgacttgcaagattttgcgtttattcaggcaaaaactggtcaaaatggttactacatgatttgttcccagaggtttgaaacattcagtgaaactttttaaaactttgattgcatgatgtattttttttttagaaagttattgtttgagaataatgtctttttataccaggaaaatagttatcctgaatgacgttgaaaactccccctcccctttatttttttttaatcaatacatgtgaaagtaacaag

SEQ ID NO: 377451 - DNA, 3186 bp, Homo sapiens
catacctggaccttctgaaactattccaagaaatcgaagaggggggatatctctctaactcattctatgaggccagtatcaccctcggagaaggtccaggtatccggcatgcatggaccctctgccttccaagatgcccaagaaaccaaagaatgaaaacccagtggactacaccgttcagatcccaccaagcaccacctatgccattacgcccatgaaacgcccaatggaggaggacggggaggagaagtcgcccagcaaaaagaagaagaagattcagaagaaaggtacaggccgggcgcggtggctcacgcctgtaatcccagcactttgggaggccgaggcgggagaatcgcttgagctcaggagttttgagaccatcagcctgggcaacatggcgaaaccccgtctctacaaaaaatacaaaaattagctgggtgtggtggcgcacctgtagtgccagctacttgggaggctgagatgggaggatggcttgagcctgggaggcggaggttgcagtgagcaactgtactccagcctgggcaacagagcgagaccttgcttaaaatcagtgttgaaaaattttagaagctaaataggtaaaaaagcaggaaggtgcagacctccactagtgctgctgctttatccatctggtcctgtgaaggctcaccctgaagctatgggatggctgcttttgtttcatttttctcacttgtgatttctgagtccttttaacaatgatgaggcatgattggggatgtggaagatgagtaggatggtggtgctacagctggaggccacaggagaggtgcaagctgggctcagtttgtgtggctgccccacccactgtgttacgccacagaggcagccctgggggttaggattggcagagctctcgtggagacctgccatcgtgctgatccagagccaccttgctattctctctgtagaggagaaggcagagcccccccaggctatgaatgccctgatgcggttgaaccagctgaagccagggctgcagtacaagctggtgtcccagactgggcccgtccatgcccccatctttaccatgtctgtggaggttgatggcaattcattcgaggcctctgggccctccaaaaagacggccaagctgcacgtggccgttaaggtgttacaggacatgggcttgccgacgggtgctgaaggcagggactcgagcaagggggaggactcggctgaggagaccgaggcgaagccagcagtggtggcccctgccccagtggtagaagctgtctccacccctagtgcggcctttccctcagatgccactgccggaacgcagcaggggccgatcctgacaaagcacggcaagaacccagtcatggagctgaacgagaagaggcgtgggctcaagtacgagctcatctccgagaccgggggcagccacgacaagcgcttcgtcatggaggtcgaagtggatggacagaagttccaaggtgctggttccaacaaaaaggtggcgaaggcctacgctgctcttgctgccctagaaaagcttttccctgacacccctctcgcccttgatgccaacaaaaagaagagagccccagtacccgtcagagggggaccgaaatttgctgctaagccacataaccctggcttcggcatgggaggccccatgcacaacgaagtgcccccaccccccaaccttcgagggcggggaagaggcgggagcatccggggacgagggcgcgggcgaggatttggtggcgccaaccatggaggctacatgaatgccggtgctgggtatggaagctatgggtacggaggcaactctgcgacagcaggctacagtgactttttcacagactgctacggctatcatgattttgggtcttcctagagcgtctaaaagtattgcacacaaaatcaactttttactccaatttcctccaactccaaaacccaaagtgtccgtgctgtgtccctgtgcttcactgggtttctcaaccgtggcttttcaccgcagcttgtctgaaactcttagcctgcagaatttaagacaatggcagtttttatcgtgatttgcctttgaacttggtcctattgaagttcacaataagtggaaaacaattttttcagagaatgtatttttgtgcagaattgcacagaattctagagacagcgttgttcggcatcaaggcaaaagcccacctttgctttttatggaaagcattactttatttaaagagacagacaatgacgcattttaatctacctttgtcttaatttacagcaggttttgtatgaatttttaaccttttaacaaactcccaaatctggttgatgcctttgacagtgatgaaaacgatttcaccacatctgaatccagagaaaccggctttttttcttattgcgagcatgttaaaacgttgggaacatgtggggaattgtatattgcgctgaattaacttctcccgcctcttgtaatgctctggtgggttcttgtttgggaatgcgatattttgtggctggtttagctagagagtgaactctcaaaggtatcaaaactgtgcttccattattagtgcaagaaacagacaggctttaaggggtagatgacgtgaaattttgcaagtcttaattacagctgcagatgcatgggattctggatttttttgttgctttttagtttaatgggactttaaaagtaattgaggagaaagaaccgtgatgttccctgtttctccagtaaaggactggcttttgcttgggcagaggtggtgctgctgggtgtgcagctgccacagactccaaaggcgtagaagtttgtgccaacacacggagtcattctggctctctgctgaggcccctgttttctggcaggtgccctccttggaaactggttttggctctgatcagcggttctttttgcagcaaagcctgcatctgtgttgacttgcaagattttgcgtttattcaggcaaaaactggtcaaaatggttactacatgatttgttcccagaggtttgaaacattcagtgaaactttttaaaactttgattgcatgatgtattttttttttagaaagttattgtttgagaataatgtctttttataccaggaaaatagttatcctgaatgacgttgaaaactccccctcccctttatttttttttaatcaatacatgtgaaagtaacaag

SEQ ID NO: 377452 - DNA, 2077 bp, Homo sapiens
tccccctccccgcacacacctacggctaggtacgaggccgcgtgttacaggacatgggcttgccgacgggtgctgaaggcagggactcgagcaagggggaggactcggctgaggagaccgaggcgaagccagcagtggtggcccctgccccagtggtagaagctgtctccacccctagtgcggcctttccctcagatgccactgccggaacgcagcaggggccgatcctgacaaagcacggcaagaacccagtcatggagctgaacgagaagaggcgtgggctcaagtacgagctcatctccgagaccgggggcagccacgacaagcgcttcgtcatggaggtcgaagtggatggacagaagttccaaggtgctggttccaacaaaaaggtggcgaaggcctacgctgctcttgctgccctagaaaagcttttccctgacacccctctcgcccttgatgccaacaaaaagaagagagccccagtacccgtcagagggggaccgaaatttgctgctaagccacataaccctggcttcggcatgggaggccccatgcacaacgaagtgcccccaccccccaaccttcgagggcggggaagaggcgggagcatccggggacgagggcgcgggcgaggatttggtggcgccaaccatggaggctacatgaatgccggtgctgggtatggaagctatgggtacggaggcaactctgcgacagcaggctacagtgactttttcacagactgctacggctatcatgattttgggtcttcctagagcgtctaaaagtattgcacacaaaatcaactttttactccaatttcctccaactccaaaacccaaagtgtccgtgctgtgtccctgtgcttcactgggtttctcaaccgtggcttttcaccgcagcttgtctgaaactcttagcctgcagaatttaagacaatggcagtttttatcgtgatttgcctttgaacttggtcctattgaagttcacaataagtggaaaacaattttttcagagaatgtatttttgtgcagaattgcacagaattctagagacagcgttgttcggcatcaaggcaaaagcccacctttgctttttatggaaagcattactttatttaaagagacagacaatgacgcattttaatctacctttgtcttaatttacagcaggttttgtatgaatttttaaccttttaacaaactcccaaatctggttgatgcctttgacagtgatgaaaacgatttcaccacatctgaatccagagaaaccggctttttttcttattgcgagcatgttaaaacgttgggaacatgtggggaattgtatattgcgctgaattaacttctcccgcctcttgtaatgctctggtgggttcttgtttgggaatgcgatattttgtggctggtttagctagagagtgaactctcaaaggtatcaaaactgtgcttccattattagtgcaagaaacagacaggctttaaggggtagatgacgtgaaattttgcaagtcttaattacagctgcagatgcatgggattctggatttttttgttgctttttagtttaatgggactttaaaagtaattgaggagaaagaaccgtgatgttccctgtttctccagtaaaggactggcttttgcttgggcagaggtggtgctgctgggtgtgcagctgccacagactccaaaggcgtagaagtttgtgccaacacacggagtcattctggctctctgctgaggcccctgttttctggcaggtgccctccttggaaactggttttggctctgatcagcggttctttttgcagcaaagcctgcatctgtgttgacttgcaagattttgcgtttattcaggcaaaaactggtcaaaatggttactacatgatttgttcccagaggtttgaaacattcagtgaaactttttaaaactttgattgcatgatgtattttttttttagaaagttattgtttgagaataatgtctttttataccaggaaaatagttatcctgaatgacgttgaaaactccccctcccctttatttttttttaatcaatacatgtgaaagtaacaag

SEQ ID NO: 377453 - DNA, 3729 bp, Homo sapiens
agactttcacgggaaacaggaggatttatttagatgtacaccggctcagtggatttgtatctgaaaagctgaccattgaacaaagactgagtgtggtttttataggcaaacttacagaagcaaaacaaaagcagttaatgatacagtcacaggtcatgtaatctatagcataactgctgacttagcataacttgtggctttgcacagctgttggccttgcagctgtgtcaaaagaaaaacagagtctacaaatcttactaaatacaaccattggcaaacagtcatatttaatggttcagaaaaggagagacagtaaaggaatttttcttttcaactttgctccggaggaggctgtctggagcccattcctttggcctcgacttttcagtgttataactgtccttgaagtaagctggctaagcagaggaaaacttgttcttgttttctttttaacccttaccccctgccacataatcacatctttacacttcttttttttttttttttttttttttaagatgggaagtcggagtctcgctctgtcgcccaggctggagtgcagtggtgccatctcggctcattgtaacctctgcctcccaggttcaagtgattcaagccattcttgtgcctctgcctcctgagtagctgggattataggcgcacaccaccacacctggcgaatttttttttttttttttttttgaggctgagtctcactctatcgcccaggctggagtgcaatggagcaatctcggctcactgcaacctccgcctcctgggttcaagcgatcctcctgtctcagcttcctgattagctgggattacaggcgccctccaccacacccagttaatttttctatttttagtggagacggtgtttcaccatgttggccaggctggtctcaaactcctgacctcaagtgatccgcccacctcagcttcccaaagtgctgggattacaagcgtgagccaccacgcccagccaggaaacccattttcaacacctccttgctcttttttttttctgagacagagtctcgctctgtcgcccagactggagtgcagtggcgcaatctcggctcactgcaacctccgcctgccaggtcaaacaattctcctgcctcagcctcccaagtaggtgggactacaggcatgtgccaccacacccggctaattttcttttgtatttttagtagagacggggtttcaccatgctggccaggctggtctcgaactcctgacctcgtgatccgcccgcctcggcctcccaaagtgctgggattacaaacgtgagccaccgcgcctggccttccttgctcttcttgctccaaatcctgggaacgtctgaatcaacaggcggacatctgtcaaaccttcctagcaactacgcctgcggatggccaacctgaccctggaagacagtggggtttagttaagcacagattgtacatcgggggcctcataaggcgcctggaagcattcaagaacaccacgcttgtaaggacaaagcactcggtcacgggcgcctttacttcggagctccgcgctgctgctggacgagcgtccgttgagtcccagccccaatttttccaggaaatggcggtgagccctctagtgagatattttttggcctgggcctcagtttctccatctgtcaatgggggaagggtaaggcgggctagaggaccccgaccaggtcggctgcagccttcggaagctacggcccagggacgccacaccaaggcaggtctgcgggacgaaagaacccaagaacccgggcgcgcattggcgccggtcccgggctcaaggggcagcaacgaggagacgctggacctggccgttcctcgcacacatctctaaccttctgtgcctctcaagggagatggggtgagcatagccacctccactggagcccgaaaatccccggccgagataccgccactaaaaaggtacacatgcgtcaaagcctctcggagccatttccgctaacgtactcagggcgacgggcgtaagatggcggccgcgcaggcgcaaaatgtcgcagccgtagggaggctccgcctctgacgcttgccttgcatcacgtggtaatggccgctcaaaaaacgccttagcgaaaaccagagcgtgccctcgtcacgtgatggaggactcccagtacggcaaagggaaggcgccaaaagttgtcagatggcgaaggaaaccgcgaaattcgccattgtcacatgatggagcaacctatcgaaagcggagggaaaggtgccgaagtcacgtgactacgcacgcaaacactcccgcttgcaccacgtgcaactcacgcccaccccctcagccccccccttatctcttttcgcccctccctcccatttgggttgggcctgcgtcgaggcgcaacgcggcgtcaaagggggcggggcttcagccggtcacgtgttcccgcacctccccggcgcgcgcctgcccgcccgcccgctcgcccccggtccggactcctcctcctcctcttctcgccattgcagttggacccagcagcccggcgcgcaccgcgtggcttttgggggcagaccccggcgggctgtggcaggagggcggcggcggcggctgcggtcgaagaaggggacgccgacaagagttgaagtattgataacaccaaggaactctatcacaatttgaaaagataagcaaaagtttgatttccagacactacagaagaagtaaaaatgcgtccaatgcgaatttttgtgaatgatgaccgccatgtgatggcaaagcattcttccgtttatccaacacaagaggagctggaggcagtccagaacatggtgtcccacacggagcgggcgctcaaagctgtgtccgactggatagacgagcaggaaaagggtagcagcgagcaggcagagtccgataacatggatgtgcccccagaggacgacagtaaagaaggggctggggaacagaagacggagcacatgaccagaaccctgcggggagtgatgcgggtgggcctggtggcaaagggcctcctactcaagggggacttggatctggagctggtgctgctgtgtaaggagaagcccacaaccgccctcctggacaaggtggccgacaacctggccatccagcttgctgctgtaacagaagacaagtacgaaatactgcaatctgtcgacgatgctgcgattgtgataaaaaacacaaaagagcctccattgtccctgaccatccacctgacatcccctgttgtcagagaagaaatggagaaagtattagctggagaaacgctatcagtcaacgaccccccggacgttctggacaggcagaaatgccttgctgccttggcgtccctccgacacgccaagtggttccaggccagagccaacgggctgaagtcttgtgtcattgtgatccgggtcttgagggacctgtgcactcgcgtgcccacctggggtcccctccgaggctggcctctcgagctcctgtgtgagaaatccattggcacggccaacagaccgatgggtgctggcgaggccctgcggagagtgctggagtgcctggcgtcgggcatcgtgatgccagatggttctggcatttatgacccttgtgaaaaagaagccactgatgctattgggcatctagacagacagcaacgggaagatatcacacagagtgcgcagcacgcactgcgtctctctgccttcggctatacatcagatcctaccatgcata

SEQ ID NO: 377454 - DNA, 4081 bp, Homo sapiens
  misc_feature (4079)..(4079): n is a, c, g, or t
agactttcacgggaaacaggaggatttatttagatgtacaccggctcagtggatttgtatctgaaaagctgaccattgaacaaagactgagtgtggtttttataggcaaacttacagaagcaaaacaaaagcagttaatgatacagtcacaggtcatgtaatctatagcataactgctgacttagcataacttgtggctttgcacagctgttggccttgcagctgtgtcaaaagaaaaacagagtctacaaatcttactaaatacaaccattggcaaacagtcatatttaatggttcagaaaaggagagacagtaaaggaatttttcttttcaactttgctccggaggaggctgtctggagcccattcctttggcctcgacttttcagtgttataactgtccttgaagtaagctggctaagcagaggaaaacttgttcttgttttctttttaacccttaccccctgccacataatcacatctttacacttcttttttttttttttttttttttttaagatgggaagtcggagtctcgctctgtcgcccaggctggagtgcagtggtgccatctcggctcattgtaacctctgcctcccaggttcaagtgattcaagccattcttgtgcctctgcctcctgagtagctgggattataggcgcacaccaccacacctggcgaatttttttttttttttttttttgaggctgagtctcactctatcgcccaggctggagtgcaatggagcaatctcggctcactgcaacctccgcctcctgggttcaagcgatcctcctgtctcagcttcctgattagctgggattacaggcgccctccaccacacccagttaatttttctatttttagtggagacggtgtttcaccatgttggccaggctggtctcaaactcctgacctcaagtgatccgcccacctcagcttcccaaagtgctgggattacaagcgtgagccaccacgcccagccaggaaacccattttcaacacctccttgctcttttttttttctgagacagagtctcgctctgtcgcccagactggagtgcagtggcgcaatctcggctcactgcaacctccgcctgccaggtcaaacaattctcctgcctcagcctcccaagtaggtgggactacaggcatgtgccaccacacccggctaattttcttttgtatttttagtagagacggggtttcaccatgctggccaggctggtctcgaactcctgacctcgtgatccgcccgcctcggcctcccaaagtgctgggattacaaacgtgagccaccgcgcctggccttccttgctcttcttgctccaaatcctgggaacgtctgaatcaacaggcggacatctgtcaaaccttcctagcaactacgcctgcggatggccaacctgaccctggaagacagtggggtttagttaagcacagattgtacatcgggggcctcataaggcgcctggaagcattcaagaacaccacgcttgtaaggacaaagcactcggtcacgggcgcctttacttcggagctccgcgctgctgctggacgagcgtccgttgagtcccagccccaatttttccaggaaatggcggtgagccctctagtgagatattttttggcctgggcctcagtttctccatctgtcaatgggggaagggtaaggcgggctagaggaccccgaccaggtcggctgcagccttcggaagctacggcccagggacgccacaccaaggcaggtctgcgggacgaaagaacccaagaacccgggcgcgcattggcgccggtcccgggctcaaggggcagcaacgaggagacgctggacctggccgttcctcgcacacatctctaaccttctgtgcctctcaagggagatggggtgagcatagccacctccactggagcccgaaaatccccggccgagataccgccactaaaaaggtacacatgcgtcaaagcctctcggagccatttccgctaacgtactcagggcgacgggcgtaagatggcggccgcgcaggcgcaaaatgtcgcagccgtagggaggctccgcctctgacgcttgccttgcatcacgtggtaatggccgctcaaaaaacgccttagcgaaaaccagagcgtgccctcgtcacgtgatggaggactcccagtacggcaaagggaaggcgccaaaagttgtcagatggcgaaggaaaccgcgaaattcgccattgtcacatgatggagcaacctatcgaaagcggagggaaaggtgccgaagtcacgtgactacgcacgcaaacactcccgcttgcaccacgtgcaactcacgcccaccccctcagccccccccttatctcttttcgcccctccctcccatttgggttgggcctgcgtcgaggcgcaacgcggcgtcaaagggggcggggcttcagccggtcacgtgttcccgcacctccccggcgcgcgcctgcccgcccgcccgctcgcccccggtccggactcctcctcctcctcttctcgccattgcagttggacccagcagcccggcgcgcaccgcgtggcttttgggggcagaccccggcgggctgtggcaggagggcggcggcggcggctgcggtcgaagaaggggacgccgacaagagttgaagtattgataacaccaaggaactctatcacaatttgaaaagataagcaaaagtttgatttccagacactacagaagaagtaaaaatgcgtccaatgcgaatttttgtgaatgatgaccgccatgtgatggcaaagcattcttccgtttatccaacacaagaggagctggaggcagtccagaacatggtgtcccacacggagcgggcgctcaaagctgtgtccgactggatagacgagcaggaaaagggtagcagcgagcaggcagagtccgataacatggatgtgcccccagaggacgacagtaaagaaggggctggggaacagaagacggagcacatgaccagaaccctgcggggagtgatgcgggtgggcctggtggcaaagggcctcctactcaagggggacttggatctggagctggtgctgctgtgtaaggagaagcccacaaccgccctcctggacaaggtggccgacaacctggccatccagcttgctgctgtaacagaagacaagtacgaaatactgcaatctgtcgacgatgctgcgattgtgataaaaaacacaaaagagcctccattgtccctgaccatccacctgacatcccctgttgtcagagaagaaatggagaaagtattagctggaggccagagccaacgggctgaagtcttgtgtcattgtgatccgggtcttgagggacctgtgcactcgcgtgcccacctggggtcccctccgaggctggcctctcgagctcctgtgtgagaaatccattggcacggccaacagaccgatgggtgctggcgaggccctgcggagagtgctggagtgcctggcgtcgggcatcgtgatgccagcacgcactgcggctcgctgccttcggccagctccataaagtcctaggcatggaccctctgccttccaagatgcccaagaaaccaaagaatgaaaacccagtggactacaccgttcagatcccaccaagcaccacctatgccattacgcccatgaaacgcccaatggaggaggacggggaggagaagtcgcccagcaaaaagaagaagaagattcagaagaaaggatggagatgaagatgaggaagctgagtcagctacgggcaagcgggcagtgaagatgaagaggatgacgaaagtcgattaccaagaagcagaagacgaggagggatgactagacaggcaaaaaaggaaaaggttaactaaaaaaaaaaaggggcggacctataacctcaattccggttcagaattaagtggtacctcgattaaaaggcgcgccacgggatggaccgaaagaaggttccaacaacaacaggaatgaggggggaagaacaaatcgggcgtttttaagttaaggagggttttaattggaatgggggcttgttgaaatggtgtttttggggttaaagttaattctgttgttgtaataaaaagngg

SEQ ID NO: 377455 - DNA, 1213 bp, Homo sapiens
atatgatctagaggatccctactactacgagagcaaatcaactacagtggtagtggaggccgaagcggcgggaacagctacggctcaggcggggcatcctacaacccaggtcacacgggggctacggcggaggttctggggggggctcctcataccaaggcaaacaaggaggctactcacagtcgaactacaactccccggggtccggccagaactacaggggccctcccagctcctaccagtcccaccagggccagcagcagtcctacaaccagagcccctacagcaactatggccctccacagggcaagcagaaaggctataaccatggacaaggcagctactcctactcgaactcctacaactctcccgggggcgggggcggatccgactacaactacgagagcaaattcaactacagtggtagtggaggccgaagcggcgggaacagctacggctcaggcggggcatcctacaacccagggtcacacgggggctacggcggaggttctgggggcggctcctcataccaaggcaaacaaggaggctactcacagtcgaactacaactccccggggtccggccagaactacagtggccctcccagctcctaccagtcctcacaaggcggctatggcagaaacgcagaccacagcatgaactaccagtacagataagcccccgcggggcggagatttctaccttctgcacttactccccatcagaagatcgagttttatgcatcacagttaacatgtcagctggccctccaggcccccgcccccatcccgtccacgttgctgtgtcgtgaggtgcagcgggtcaccctgtggcccgtcctgtgacccatatttagccgtgtttgggactccgtgtcttcaatggtttgttagttgccattacaactttgtctgggtagagtttttgagtttttgcagttcagtatccctctgtctattcacacttcgtgttagtggtaactcagtttgtctttaaatagttacagaagggatacgtcatttgttaatgcttttgtgaagtgagttaaacgagctttctgtattttaatgctttagtgtttcagttttataagtgaagattttattttaaaaaccagtgggaaagagtggggggtttctttttatgtctgggtcattcaggcagtacatctgaattaagctgaatgtagacaaataaagaaaaacaaaactgc

SEQ ID NO: 377456 - DNA, 774 bp, Homo sapiens
  misc_feature (19)..(19): n is a, c, g, or t
  misc_feature (64)..(64): n is a, c, g, or t
  misc_feature (66)..(66): n is a, c, g, or t
  misc_feature (73)..(73): n is a, c, g, or t
  misc_feature (75)..(75): n is a, c, g, or t
  misc_feature (120)..(120): n is a, c, g, or t
  misc_feature (124)..(124): n is a, c, g, or t
  misc_feature (128)..(128): n is a, c, g, or t
  misc_feature (131)..(131): n is a, c, g, or t
  misc_feature (140)..(140): n is a, c, g, or t
  misc_feature (143)..(143): n is a, c, g, or t
  misc_feature (146)..(146): n is a, c, g, or t
  misc_feature (155)..(155): n is a, c, g, or t
  misc_feature (197)..(197): n is a, c, g, or t
  misc_feature (204)..(204): n is a, c, g, or t
  misc_feature (239)..(239): n is a, c, g, or t
  misc_feature (245)..(245): n is a, c, g, or t
  misc_feature (259)..(259): n is a, c, g, or t
  misc_feature (282)..(282): n is a, c, g, or t
  misc_feature (287)..(287): n is a, c, g, or t
  misc_feature (291)..(291): n is a, c, g, or t
  misc_feature (300)..(300): n is a, c, g, or t
  misc_feature (304)..(304): n is a, c, g, or t
  misc_feature (312)..(312): n is a, c, g, or t
  misc_feature (316)..(316): n is a, c, g, or t
  misc_feature (321)..(321): n is a, c, g, or t
  misc_feature (328)..(328): n is a, c, g, or t
  misc_feature (352)..(352): n is a, c, g, or t
  misc_feature (359)..(359): n is a, c, g, or t
  misc_feature (379)..(379): n is a, c, g, or t
  misc_feature (384)..(384): n is a, c, g, or t
  misc_feature (406)..(407): n is a, c, g, or t
  misc_feature (424)..(424): n is a, c, g, or t
  misc_feature (440)..(440): n is a, c, g, or t
gtggaacttcttcaaaaanggtattcaaaaaacttgttgctttcccatttattttaggttgcanangaaaacnanaacaagggctttttataggtgggtaggatagacggtggaaaattntttngcanatntctttatanttnacnaggcttgcnatgatggcgattggggatttcttgggattttttttttggttngcgtttnttatgttttatattggggacttttaaaaaatgtanattggngggaggatataganacacgtggattgtttcccttgtnttctnccangtaataganactnggctcttntgcnttggngcgagangttgttttcttgtctgtgtttttncttgctnctatttttttcttattaggnttttnttagttttttcctattttcatnntatttttttttttggtntttttgtttttttttnttttttttttttgcaggtgccctccttggaaactggttttggctctgatcagcggttctttttgcagcaaagcctgcatctgtgttgacttgcaagattttgcgtttattcaggcaaaaactggtcaaaatggttactacatgatttgttcccagaggtttgaaacattcagtgaaactttttaaaactttgattgcatgatgtattttttttttagaaagttattgtttgagaataatgtctttttataccaggaaaatagttatcctgaatgacgttgaaaactccccctcccctttatttttttttaatcaatacatgtgaaagtaacaag

SEQ ID NO: 377457 - DNA, 586 bp, Homo sapiens
gtatctacaggatctaaacaccgcaatctatgaactaccagtacagataagcccccgcggggcggagatttctaccttctgcacttactccccatcagaagatcgagttttatgcatcacagttaacatgtcagctggccctccaggcccccgcccccatcccgtccacgttgctgtgtcgtgaggtgcagcgggtcaccctgtggcccgtcctgtgacccatatttagccgtgtttgggactccgtgtcttcaatggtttgttagttgccattacaactttgtctgggtagagtttttgagtttttgcagttcagtatccctctgtctattcacacttcgtgttagtggtaactcagtttgtctttaaatagttacagaagggatacgtcatttgttaatgcttttgtgaagtgagttaaacgagctttctgtattttaatgctttagtgtttcagttttataagtgaagattttattttaaaaaccagtgggaaagagtggggggtttctttttatgtctgggtcattcaggcagtacatctgaattaagctgaatgtagacaaataaagaaaaacaaaactgc

SEQ ID NO: 377458 - DNA, 289 bp, Homo sapiens
catggacaaggcagctactcctactcgaactcctacaactctcccgggggcgggggcggatccgactacaactacgagagcaaattcagtgagttggcttccagagcccctcggccgggccagggtccaggccccagcagtgcagcccacggagtggcagaagctcggcactgcccagacctctggctgagggccttaggaggaggacaagtggtgctggctgcgggcgggtgctaggaagatggggcgtgggacctcatggtgccgtctccgccactctctctggtgt

SEQ ID NO: 377459 - DNA, 378 bp, Homo sapiens
aattcagcttctgggaaactcagctgccctttagaaagctgccacatcccctttccacctgacagaaaccccttggtcaaactgtgccttgtcttcttattccatccatgaatagaaacgctatcagtcaacgaccccccggacgttctggacaggcagaaatgccttgctgccttggcgtccctccgacacgccaagtggttccaggtttgcattttgttcttctatttgtcttttggtagagaattcctaagttttaacttggctaactgtcaccataaagattccttaacattgacgatagccgtgccgagcttagcacctgcagctgcgcaggtcctaaaggagtgcacctcaacaaattcgaccccaaaagag

SEQ ID NO: 377460 - DNA, 450 bp, Homo sapiens
gggccccttcccatgtgatccctaccaccgttccccagaggctgtcccatcactgattagtttcgcttattctagaactttatgtaggtggaagcatgattctttttgaatttgttccaaatgtagccagtgggacacctcacaagtcagctccgatgtcctcaggacaagactgctatagtcaccagtgctttgttgctttctggcgctccggtaggatccaggctcacttggtatatcccctgctgcagattacggtccacttctcccgggagctgctttcagtaggtttttgttgttgttatatttttgtttatttatttatttcgagacattctcttgctgtgtcaggtaggctggagttcagtggtgcaatctcggctcatggcagtctcctccccagttcaaggaggtcaaggagttcaagaccagcctggtgaacatagtgaa

SEQ ID NO: 377461 - DNA, 652 bp, Homo sapiens
gtctcgatctcctgacctcgtgatccactcacctcggactcccaaagtgctgggattgcaggcatgagccacggctcccagccctaccattgcatttttaagcaccgtttggaaatcgcttctttcactagttatccctctttcaagtacccaaaacgtggccaaagacctggccaattagagagaccctgacatcccaggtgaaatcacttccgggtcatcatactcaagacgttggcctttctgttgcaggaataggtggagccagataaaattgttgattgctttgaggagaaagtgttttgaaagttgcattttattttttaggctgtaacagaagacaagtacgaaatactgcaatctgtcgacgatgctgcgattgtgataaaaaacacaaaagagcctccattgtccctgaccatccacctgacatcccctgttgtcagagaagaaatggagaaagtattagctggaggtagggaggccgagacacgccggcaggactttgaaaatgtggtgttccctcactattcaaatgtgctattcagttttagactgctttggtatacggtgtagattgaccacctttactctgagatcacatctcccgttggctttgagtacttgggagtttgacaaaacagtcgcacta

SEQ ID NO: 377462 - DNA, 527 bp, Homo sapiens
gagacacgccggcaggactttgaaaatgtggtgttccctcactattcaaatgtgctattcagttttagactgctttggtatacggtgtagattgaccacctttactctgagatcacatctcccgttggctttgagtacttgggagtttgacaaaacagtcgcactaaaagtgagtagcacttttcataggggactgcaccattttcctttatcttcatccttgaacgttctcaaacatgaatgtggaagttgcttttctatggagccattctctggctgtggagaagtgtccctggtgattccatggttttaaagatgagacaaccagatggtttctgcatgagcaccacgttggagtttaccaacagcctgtgctgcagctgagctgagggcctcttcgtttgtcctctgtcatggctcttttatcatttaaagtgacagaagcacaaagagctgatacagagttttggataaagttttaaactgttgtccaatttttcaaaccacatcattggacctcacgctaa

SEQ ID NO: 377463 - DNA, 6078 bp, Homo sapiens
agactttcacgggaaacaggaggatttatttagatgtacaccggctcagtggatttgtatctgaaaagctgaccattgaacaaagactgagtgtggtttttataggcaaacttacagaagcaaaacaaaagcagttaatgatacagtcacaggtcatgtaatctatagcataactgctgacttagcataacttgtggctttgcacagctgttggccttgcagctgtgtcaaaagaaaaacagagtctacaaatcttactaaatacaaccattgcaactttgctccggaggaggctgtctggagcccattcctttggcctcgacttttcagtgttataactgtccttgaagtaagctggctaagcagaggaaaacttgttcttgttttctttttaacccttaccccctgccacataatcacatctttacacttcttttttttttttttttttttttttaagatgggaagtcggagtctcgctctgtcgcccaggctggagtgcagtggtgccatctcggctcattgtaacctctgcctcccaggttcaagtgattcaagccattcttgtgcctctgcctcctgagtagctgggattataggcgcacaccaccacacctggcgaatttttttttttttttttttttgaggctgagtctcactctatcgcccaggctggagtgcaatggagcaatctcggctcactgcaacctccgcctcctgggttcaagcgatcctcctgtctcagcttcctgattagctgggattacaggcgccctccaccacacccagttaatttttctatttttagtggagacggtgtttcaccatgttggccaggctggtctcaaactcctgacctcaagtgatccgcccacctcagcttcccaaagtgctgggattacaagcgtgagccaccacgcccagccaggaaacccattttcaacacctccttgctcttttttttttctgagacagagtctcgctctgtcgcccagactggagtgcagtggcgcaatctcggctcactgcaacctccgcctgccaggtcaaacaattctcctgcctcagcctcccaagtaggtgggactacaggcatgtgccaccacacccggctaattttcttttgtatttttagtagagacggggtttcaccatgctggccaggctggtctcgaactcctgacctcgtgatccgcccgcctcggcctcccaaagtgctgggattacaaacgtgagccaccgcgcctggccttccttgctcttcttgctccaaatcctgggaacgtctgaatcaacaggcggacatctgtcaaaccttcctagcaactacgcctgcggatggccaacctgaccctggaagacagtggggtttagttaagcacagattgtacatcgggggcctcataaggcgcctggaagcattcaagaacaccacgcttgtaaggacaaagcactcggtcacgggcgcctttacttcggagctccgcgctgctgctggacgagcgtccgttgagtcccagccccaatttttccaggaaatggcggtgagccctctagtgagatattttttggcctgggcctcagtttctccatctgtcaatgggggaagggtaaggcgggctagaggaccccgaccaggtcggctgcagccttcggaagctacggcccagggacgccacaccaaggcaggtctgcgggacgaaagaacccaagaacccgggcgcgcattggcgccggtcccgggctcaaggggcagcaacgaggagacgctggacctggccgttcctcgcacacatctctaaccttctgtgcctctcaagggagatggggtgagcatagccacctccactggagcccgaaaatccccggccgagataccgccactaaaaaggtacacatgcgtcaaagcctctcggagccatttccgctaacgtactcagggcgacgggcgtaagatggcggccgcgcaggcgcaaaatgtcgcagccgtagggaggctccgcctctgacgcttgccttgcatcacgtggtaatggccgctcaaaaaacgccttagcgaaaaccagagcgtgccctcgtcacgtgatggaggactcccagtacggcaaagggaaggcgccaaaagttgtcagatggcgaaggaaaccgcgaaattcgccattgtcacatgatggagcaacctatcgaaagcggagggaaaggtgccgaagtcacgtgactacgcacgcaaacactcccgcttgcaccacgtgcaactcacgcccaccccctcagccccccccttatctcttttcgcccctccctcccatttgggttgggcctgcgtcgaggcgcaacgcggcgtcaaagggggcggggcttcagccggtcacgtgttcccgcacctccccggcgcgcgcctgcccgcccgcccgctcgcccccggtccggactcctcctcctcctcttctcgccattgcagttggacccagcagcccggcgcgcaccgcgtggcttttgggggcagaccccggcgggctgtggcaggagggcggcggcggcggctgcggtcgaagaaggggacgccgacaagagttgaagtattgataacaccaaggaactctatcacaatttgaaaagataagcaaaagtttgatttccagacactacagaagaagtaaaaatgcgtccaatgcgaatttttgtgaatgatgaccgccatgtgatggcaaagcattcttccgtttatccaacacaagaggagctggaggcagtccagaacatggtgtcccacacggagcgggcgctcaaagctgtgtccgactggatagacgagcaggaaaagggtagcagcgagcaggcagagtccgataacatggatgtgcccccagaggacgacagtaaagaaggggctggggaacagaagacggagcacatgaccagaaccctgcggggagtgatgcgggtgggcctggtggcaaagggcctcctactcaagggggacttggatctggagctggtgctgctgtgtaaggagaagcccacaaccgccctcctggacaaggtggccgacaacctggccatccagcttgctgctgtaacagaagacaagtacgaaatactgcaatctgtcgacgatgctgcgattgtgataaaaaacacaaaagagcctccattgtccctgaccatccacctgacatcccctgttgtcagagaagaaatggagaaagtattagctggagaaacgctatcagtcaacgaccccccggacgttctggacaggcagaaatgccttgctgccttggcgtccctccgacacgccaagtggttccaggccagagccaacgggctgaagtcttgtgtcattgtgatccgggtcttgagggacctgtgcactcgcgtgcccacctggggtcccctccgaggctggcctctcgagctcctgtgtgagaaatccattggcacggccaacagaccgatgggtgctggcgaggccctgcggagagtgctggagtgcctggcgtcgggcatcgtgatgccagatggttctggcatttatgacccttgtgaaaaagaagccactgatgctattgggcatctagacagacagcaacgggaagatatcacacagagtgcgcagcacgcactgcggctcgctgccttcggccagctccataaagtcctaggcatggaccctctgccttccaagatgcccaagaaaccaaagaatgaaaacccagtggactacaccgttcagatcccaccaagcaccacctatgccattacgcccatgaaacgcccaatggaggaggacggggaggagaagtcgcccagcaaaaagaagaagaagattcagaagaaagaggagaaggcagagcccccccaggctatgaatgccctgatgcggttgaaccagctgaagccagggctgcagtacaagctggtgtcccagactgggcccgtccatgcccccatctttaccatgtctgtggaggttgatggcaattcattcgaggcctctgggccctccaaaaagacggccaagctgcacgtggccgttaaggtgttacaggacatgggcttgccgacgggtgctgaaggcagggactcgagcaagggggaggactcggctgaggagaccgaggcgaagccagcagtggtggcccctgccccagtggtagaagctgtctccacccctagtgcggcctttccctcagatgccactgccggaacgcagcaggggccgatcctgacaaagcacggcaagaacccagtcatggagctgaacgagaagaggcgtgggctcaagtacgagctcatctccgagaccgggggcagccacgacaagcgcttcgtcatggaggtcgaagtggatggacagaagttccaaggtgctggttccaacaaaaaggtggcgaaggcctacgctgctcttgctgccctagaaaagcttttccctgacacccctctcgcccttgatgccaacaaaaagaagagagccccagtacccgtcagagggggaccgaaatttgctgctaagccacataaccctggcttcggcatgggaggccccatgcacaacgaagtgcccccaccccccaaccttcgagggcggggaagaggcgggagcatccggggacgagggcgcgggcgaggatttggtggcgccaaccatggaggctacatgaatgccggtgctgggtatggaagctatgggtacggaggcaactctgcgacagcaggctacagtgactttttcacagactgctacggctatcatgattttgggtcttcctagagcgtctaaaagtattgcacacaaaatcaactttttactccaatttcctccaactccaaaacccaaagtgtccgtgctgtgtccctgtgcttcactgggtttctcaaccgtggcttttcaccgcagcttgtctgaaactcttagcctgcagaatttaagacaatggcagtttttatcgtgatttgcctttgaacttggtcctattgaagttcacaataagtggaaaacaattttttcagagaatgtatttttgtgcagaattgcacagaattctagagacagcgttgttcggcatcaaggcaaaagcccacctttgctttttatggaaagcattactttatttaaagagacagacaatgacgcattttaatctacctttgtcttaatttacagcaggttttgtatgaatttttaaccttttaacaaactcccaaatctggttgatgcctttgacagtgatgaaaacgatttcaccacatctgaatccagagaaaccggctttttttcttattgcgagcatgttaaaacgttgggaacatgtggggaattgtatattgcgctgaattaacttctcccgcctcttgtaatgctctggtgggttcttgtttgggaatgcgatattttgtggctggtttagctagagagtgaactctcaaaggtatcaaaactgtgcttccattattagtgcaagaaacagacaggctttaaggggtagatgacgtgaaattttgcaagtcttaattacagctgcagatgcatgggattctggatttttttgttgctttttagtttaatgggactttaaaagtaattgaggagaaagaaccgtgatgttccctgtttctccagtaaaggactggcttttgcttgggcagaggtggtgctgctgggtgtgcagctgccacagactccaaaggcgtagaagtttgtgccaacacacggagtcattctggctctctgctgaggcccctgttttctggcaggtgccctccttggaaactggttttggctctgatcagcggttctttttgcagcaaagcctgcatctgtgttgacttgcaagattttgcgtttattcaggcaaaaactggtcaaaatggttactacatgatttgttcccagaggtttgaaacattcagtgaaactttttaaaactttgattgcatgatgtattttttttttagaaagttattgtttgagaataatgtctttttataccaggaaaatagttatcctgaatgacgttgaaaactccccctcccctttatttttttttaatcaatacatgtgaaagtaacaag

SEQ ID NO: 377464 - DNA, 5248 bp, Homo sapiens
agactttcacgggaaacaggaggatttatttagatgtacaccggctcagtggatttgtatctgaaaagctgaccattgaacaaagactgagtgtggtttttataggcaaacttacagaagcaaaacaaaagcagttaatgatacagtcacaggtcatgtaatctatagcataactgctgacttagcataacttgtggctttgcacagctgttggccttgcagctgtgtcaaaagaaaaacagagtctacaaatcttactaaatacaaccattggcaaacagtcatatttaatggttcagaaaaggagagacagtaaaggaatttttcttttcaactttgctccggaggaggctgtctggagcccattcctttggcctcgacttttcagtgttataactgtccttgaagtaagctggctaagcagaggaaaacttgttcttgttttctttttaacccttaccccctgccacataatcacatctttacacttcttttttttttttttttttttttttaagatgggaagtcggagtctcgctctgtcgcccaggctggagtgcagtggtgccatctcggctcattgtaacctctgcctcccaggttcaagtgattcaagccattcttgtgcctctgcctcctgagtagctgggattataggcgcacaccaccacacctggcgaatttttttttttttttttttttgaggaaatggcggtgagccctctagtgagatattttttggcctgggcctcagtttctccatctgtcaatgggggaagggtaaggcgggctagaggaccccgaccaggtcggctgcagccttcggaagctacggcccagggacgccacaccaaggcaggtctgcgggacgaaagaacccaagaacccgggcgcgcattggcgccggtcccgggctcaaggggcagcaacgaggagacgctggacctggccgttcctcgcacacatctctaaccttctgtgcctctcaagggagatggggtgagcatagccacctccactggagcccgaaaatccccggccgagataccgccactaaaaaggtacacatgcgtcaaagcctctcggagccatttccgctaacgtactcagggcgacgggcgtaagatggcggccgcgcaggcgcaaaatgtcgcagccgtagggaggctccgcctctgacgcttgccttgcatcacgtggtaatggccgctcaaaaaacgccttagcgaaaaccagagcgtgccctcgtcacgtgatggaggactcccagtacggcaaagggaaggcgccaaaagttgtcagatggcgaaggaaaccgcgaaattcgccattgtcacatgatggagcaacctatcgaaagcggagggaaaggtgccgaagtcacgtgactacgcacgcaaacactcccgcttgcaccacgtgcaactcacgcccaccccctcagccccccccttatctcttttcgcccctccctcccatttgggttgggcctgcgtcgaggcgcaacgcggcgtcaaagggggcggggcttcagccggtcacgtgttcccgcacctccccggcgcgcgcctgcccgcccgcccgctcgcccccggtccggactcctcctcctcctcttctcgccattgcagttggacccagcagcccggcgcgcaccgcgtggcttttgggggcagaccccggcgggctgtggcaggagggcggcggcggcggctgcggtcgaagaaggggacgccgacaagagttgaagtattgataacaccaaggaactctatcacaatttgaaaagataagcaaaagtttgatttccagacactacagaagaagtaaaaatgcgtccaatgcgaatttttgtgaatgatgaccgccatgtgatggcaaagcattcttccgtttatccaacacaagaggagctggaggcagtccagaacatggtgtcccacacggagcgggcgctcaaagctgtgtccgactggatagacgagcaggaaaagggtagcagcgagcaggcagagtccgataacatggatgtgcccccagaggacgacagtaaagaaggggctggggaacagaagacggagcacatgaccagaaccctgcggggagtgatgcgggtgggcctggtggcaaagggcctcctactcaagggggacttggatctggagctggtgctgctgtgtaaggagaagcccacaaccgccctcctggacaaggtggccgacaacctggccatccagcttgctgctgtaacagaagacaagtacgaaatactgcaatctgtcgacgatgctgcgattgtgataaaaaacacaaaagagcctccattgtccctgaccatccacctgacatcccctgttgtcagagaagaaatggagaaagtattagctggagaaacgctatcagtcaacgaccccccggacgttctggacaggcagaaatgccttgctgccttggcgtccctccgacacgccaagtggttccaggccagagccaacgggctgaagtcttgtgtcattgtgatccgggtcttgagggacctgtgcactcgcgtgcccacctggggtcccctccgaggctggcctctcgagctcctgtgtgagaaatccattggcacggccaacagaccgatgggtgctggcgaggccctgcggagagtgctggagtgcctggcgtcgggcatcgtgatgccagatggttctggcatttatgacccttgtgaaaaagaagccactgatgctattgggcatctagacagacagcaacgggaagatatcacacagagtgcgcagcacgcactgcggctcgctgccttcggccagctccataaagtcctaggcatggaccctctgccttccaagatgcccaagaaaccaaagaatgaaaacccagtggactacaccgttcagatcccaccaagcaccacctatgccattacgcccatgaaacgcccaatggaggaggacggggaggagaagtcgcccagcaaaaagaagaagaagattcagaagaaagaggagaaggcagagcccccccaggctatgaatgccctgatgcggttgaaccagctgaagccagggctgcagtacaagctggtgtcccagactgggcccgtccatgcccccatctttaccatgtctgtggaggttgatggcaattcattcgaggcctctgggccctccaaaaagacggccaagctgcacgtggccgttaaggtgttacaggacatgggcttgccgacgggtgctgaaggcagggactcgagcaagggggaggactcggctgaggagaccgaggcgaagccagcagtggtggcccctgccccagtggtagaagctgtctccacccctagtgcggcctttccctcagatgccactgccggaacgcagcaggggccgatcctgacaaagcacggcaagaacccagtcatggagctgaacgagaagaggcgtgggctcaagtacgagctcatctccgagaccgggggcagccacgacaagcgcttcgtcatggaggtcgaagtggatggacagaagttccaaggtgctggttccaacaaaaaggtggcgaaggcctacgctgctcttgctgccctagaaaagcttttccctgacacccctctcgcccttgatgccaacaaaaagaagagagccccagtacccgtcagagggggaccgaaatttgctgctaagccacataaccctggcttcggcatgggaggccccatgcacaacgaagtgcccccaccccccaaccttcgagggcggggaagaggcgggagcatccggggacgagggcgcgggcgaggatttggtggcgccaaccatggaggctacatgaatgccggtgctgggtatggaagctatgggtacggaggcaactctgcgacagcaggctacagtgactttttcacagactgctacggctatcatgattttgggtcttcctagagcgtctaaaagtattgcacacaaaatcaactttttactccaatttcctccaactccaaaacccaaagtgtccgtgctgtgtccctgtgcttcactgggtttctcaaccgtggcttttcaccgcagcttgtctgaaactcttagcctgcagaatttaagacaatggcagtttttatcgtgatttgcctttgaacttggtcctattgaagttcacaataagtggaaaacaattttttcagagaatgtatttttgtgcagaattgcacagaattctagagacagcgttgttcggcatcaaggcaaaagcccacctttgctttttatggaaagcattactttatttaaagagacagacaatgacgcattttaatctacctttgtcttaatttacagcaggttttgtatgaatttttaaccttttaacaaactcccaaatctggttgatgcctttgacagtgatgaaaacgatttcaccacatctgaatccagagaaaccggctttttttcttattgcgagcatgttaaaacgttgggaacatgtggggaattgtatattgcgctgaattaacttctcccgcctcttgtaatgctctggtgggttcttgtttgggaatgcgatattttgtggctggtttagctagagagtgaactctcaaaggtatcaaaactgtgcttccattattagtgcaagaaacagacaggctttaaggggtagatgacgtgaaattttgcaagtcttaattacagctgcagatgcatgggattctggatttttttgttgctttttagtttaatgggactttaaaagtaattgaggagaaagaaccgtgatgttccctgtttctccagtaaaggactggcttttgcttgggcagaggtggtgctgctgggtgtgcagctgccacagactccaaaggcgtagaagtttgtgccaacacacggagtcattctggctctctgctgaggcccctgttttctggcaggtgccctccttggaaactggttttggctctgatcagcggttctttttgcagcaaagcctgcatctgtgttgacttgcaagattttgcgtttattcaggcaaaaactggtcaaaatggttactacatgatttgttcccagaggtttgaaacattcagtgaaactttttaaaactttgattgcatgatgtattttttttttagaaagttattgtttgagaataatgtctttttataccaggaaaatagttatcctgaatgacgttgaaaactccccctcccctttatttttttttaatcaatacatgtgaaagtaacaag

SEQ ID NO: 377465 - DNA, 5947 bp, Homo sapiens
agactttcacgggaaacaggaggatttatttagatgtacaccggctcagtggatttgtatctgaaaagctgaccattgaacaaagactgagtgtggtttttataggcaaacttacagaagcaaaacaaaagcagttaatgatacagtcacaggtcatgtaatctatagcataactgctgacttagcataacttgtggctttgcacagctgttggccttgcagctgtgtcaaaagaaaaacagagtctacaaatcttactaaatacaaccattggcaaacagtcatatttaatggttcagaaaaggagagacagtaaaggaatttttcttttcaactttgctccggaggaggctgtctggagcccattcctttggcctcgacttttcagtgttataactgtccttgaagtaagctggctaagcagaggaaaacttgttcttgttttctttttaacccttaccccctgccacataatcacatctttacacttcttttttttttttttttttttttttaagatgggaagtcggagtctcgctctgtcgcccaggctggagtgcagtggtgccatctcggctcattgtaacctctgcctcccaggttcaagtgattcaagccattcttgtgcctctgcctcctgagtagctgggattataggcgcacaccaccacacctggcgaatttttttttttttttttttttgaggctgagtctcactctatcgcccaggctggagtgcaatggagcaatctcggctcactgcaacctccgcctcctgggttcaagcgatcctcctgtctcagcttcctgattagctgggattacaggcgccctccaccacacccagttaatttttctatttttagtggagacggtgtttcaccatgttggccaggctggtctcaaactcctgacctcaagtgatccgcccacctcagcttcccaaagtgctgggattacaagcgtgagccaccacgcccagccaggaaacccattttcaacacctccttgctcttttttttttctgagacagagtctcgctctgtcgcccagactggagtgcagtggcgcaatctcggctcactgcaacctccgcctgccaggtcaaacaattctcctgcctcagcctcccaagtaggtgggactacaggcatgtgccaccacacccggctaattttcttttgtatttttagtagagacggggtttcaccatgctggccaggctggtctcgaactcctgacctcgtgatccgcccgcctcggcctcccaaagtgctgggattacaaacgtgagccaccgcgcctggccttccttgctcttcttgctccaaatcctgggaacgtctgaatcaacaggcggacatctgtcaaaccttcctagcaactacgcctgcggatggccaacctgaccctggaagacagtggggtttagttaagcacagattgtacatcgggggcctcataaggcgcctggaagcattcaagaacaccacgcttgtaaggacaaagcactcggtcacgggcgcctttacttcggagctccgcgctgctgctggacgagcgtccgttgagtcccagccccaatttttccaggaaatggcggtgagccctctagtgagatattttttggcctgggcctcagtttctccatctgtcaatgggggaagggtaaggcgggctagaggaccccgaccaggtcggctgcagccttcggaagctacggcccagggacgccacaccaaggcaggtctgcgggacgaaagaacccaagaacccgggcgcgcattggcgccggtcccgggctcaaggggcagcaacgaggagacgctggacctggccgttcctcgcacacatctctaaccttctgtgcctctcaagggagatggggtgagcatagccacctccactggagcccgaaaatccccggccgagataccgccactaaaaaggtacacatgcgtcaaagcctctcggagccatttccgctaacgtactcagggcgacgggcgtaagatggcggccgcgcaggcgcaaaatgtcgcagccgtagggaggctccgcctctgacgcttgccttgcatcacgtggtaatggccgctcaaaaaacgccttagcgaaaaccagagcgtgccctcgtcacgtgatggaggactcccagtacggcaaagggaaggcgccaaaagttgtcagatggcgaaggaaaccgcgaaattcgccattgtcacatgatggagcaacctatcgaaagcggagggaaaggtgccgaagtcacgtgactacgcacgcaaacactcccgcttgcaccacgtgcaactcacgcccaccccctcagccccccccttatctcttttcgcccctccctcccatttgggttgggcctgcgtcgaggcgcaacgcggcgtcaaagggggcggggcttcagccggtcacgtgttcccgcacctccccggcgcgcgcctgcccgcccgcccgctcgcccccggtccggactcctcctcctcctcttctcgccattgcagttggacccagcagcccggcgcgcaccgcgtggcttttgggggcagaccccggcgggctgtggcaggagggcggcggcggcggctgcggtcgaagaaggggacgccgacaagagttgaagtattgataacaccaaggaactctatcacaatttgaaaagataagcaaaagtttgatttccagacactacagaagaagtaaaaatgcgtccaatgcgaatttttgtgaatgatgaccgccatgtgatggcaaagcattcttccgtttatccaacacaagaggagctggaggcagtccagaacatggtgtcccacacggagcgggcgctcaaagctgtgtccgactggatagacgagcaggaaaagggtagcagcgagcaggcagagtccgataacatggatgtgcccccagaggacgacagtaaagaaggggctggggaacagaagacggagcacatgaccagaaccctgcggggagtgatgcgggtgggcctggtggcaaagggcctcctactcaagggggacttggatctggagctggtgctgctgtgtaaggagaagcccacaaccgccctcctggacaaggtggccgacaacctggccatccagcttgctgctgtaacagaagacaagtacgaaatactgcaatctgtcgacgatgctgcgattgtgataaaaaacacaaaagagcctccattgtccctgaccatccacctgacatcccctgttgtcagagaagaaatggagaaagtattagctggagaaacgctatcagtcaacgaccccccggacgttctggacaggcagaaatgccttgctgccttggcgtccctccgacacgccaagtggttccaggccagagccaacgggctgaagtcttgtgtcattgtgatccgggtcttgagggacctgtgcactcgcgtgcccacctggggtcccctccgaggctggcctctcgagctcctgtgtgagaaatccattggcacggccaacagaccgatgggtgctggcgaggccctgcggagagtgctggagtgcctggcgtcgggcatcgtgatgccagatggttctggcatttatgacccttgtgaaaaagaagccactgatgctattgggcatctagacagacagcaacgggaagatatcacacagagtgcgcagcacgcactgcggctcgctgccttcggccagctccataaagtcctaggcatggaccctctgccttccaagatgcccaagaaaccaaagaatgaaaacccagtggactacaccgttcagatcccaccaagcaccacctatgccattacgcccatgaaacgcccaatggaggaggacggggaggagaagtcgcccagcaaaaagaagaagaagattcagaagaaagaggagaaggcagagcccccccaggctatgaatgccctgatgcggttgaaccagctgaagccagggctgcagtacaagctggtgtcccagactgggcccgtccatgcccccatctttaccatgtctgtggaggttgatggcaattcattcgaggcctctgggccctccaaaaagacggccaagctgcacgtggccgttaaggtgttacaggacatgggcttgccgacgggtgctgaaggcagggactcgagcaagggggaggactcggctgaggagaccgaggcgaagccagcagtggtggcccctgccccagtggtagaagctgtctccacccctagtgcggcctttccctcagatgccactgccggaacgcagcaggggccgatcctgacaaagcacggcaagaacccagtcatggagctgaacgagaagaggcgtgggctcaagtacgagctcatctccgagaccgggggcagccacgacaagcgcttcgtcatggaggtcgaagtggatggacagaagttccaaggtgctggttccaacaaaaaggtggcgaaggcctacgctgctcttgctgccctagaaaagcttttccctgacacccctctcgcccttgatgccaacaaaaagaagagagccccagtacccgtcagagggggaccgaaatttgctgctaagccacataaccctggcttcggcatgggaggccccatgcacaacgaagtgcccccaccccccaaccttcgagggcggggaagaggcgggagcatccggggacgagggcgcgggcgaggatttggtggcgccaaccatggaggctacatgaatgccggtgctgggtatggaagctatgggtacggaggcaactctgcgacagcaggctacagtcagttctacagcaacggagggcattctgggaatgccagtggcggtggcggcgggggcggtggtggctcctccggctatggctcctactaccaaggtgacaactacaactcaccggtgcccccaaaacacgctgggaagaagcagccgcacgggggccagcagaagccctcctacggctcgggctaccagtcccaccagggccagcagcagtcctacaaccagagcccctacagcaactatggccctccacagggcaagcagaaaggctataaccatggacaaggcagctactcctactcgaactcctacaactctcccgggggcgggggcggatccgactacaactacgagagcaaattcaactacagtggtagtggaggccgaagcggcgggaacagctacggctcaggcggggcatcctacaacccagggtcacacgggggctacggcggaggttctgggggcggctcctcataccaaggcaaacaaggaggctactcacagtcgaactacaactccccggggtccggccagaactacagtggccctcccagctcctaccagtcctcacaaggcggctatggcagaaacgcagaccacagcatgaactaccagtacagataagcccccgcggggcggagatttctaccttctgcacttactccccatcagaagatcgagttttatgcatcacagttaacatgtcagctggccctccaggcccccgcccccatcccgtccacgttgctgtgtcgtgaggtgcagcgggtcaccctgtggcccgtcctgtgacccatatttagccgtgtttgggactccgtgtcttcaatggtttgttagttgccattacaactttgtctgggtagagtttttgagtttttgcagttcagtatccctctgtctattcacacttcgtgttagtggtaactcagtttgtctttaaatagttacagaagggatacgtcatttgttaatgcttttgtgaagtgagttaaacgagctttctgtattttaatgctttagtgtttcagttttataagtgaagattttattttaaaaaccagtgggaaagagtggggggtttctttttatgtctgggtcattcaggcagtacatctgaattaagctgaatgtagacaaataaagaaaaacaaaactgc

SEQ ID NO: 377466 - DNA, 6581 bp, Homo sapiens
  misc_feature (4932)..(4932): n is a, c, g, or t
  misc_feature (5059)..(5059): n is a, c, g, or t
  misc_feature (5062)..(5062): n is a, c, g, or t
  misc_feature (5083)..(5083): n is a, c, g, or t
  misc_feature (5213)..(5213): n is a, c, g, or t
agactttcacgggaaacaggaggatttatttagatgtacaccggctcagtggatttgtatctgaaaagctgaccattgaacaaagactgagtgtggtttttataggcaaacttacagaagcaaaacaaaagcagttaatgatacagtcacaggtcatgtaatctatagcataactgctgacttagcataacttgtggctttgcacagctgttggccttgcagctgtgtcaaaagaaaaacagagtctacaaatcttactaaatacaaccattggcaaacagtcatatttaatggttcagaaaaggagagacagtaaaggaatttttcttttcaactttgctccggaggaggctgtctggagcccattcctttggcctcgacttttcagtgttataactgtccttgaagtaagctggctaagcagaggaaaacttgttcttgttttctttttaacccttaccccctgccacataatcacatctttacacttcttttttttttttttttttttttttaagatgggaagtcggagtctcgctctgtcgcccaggctggagtgcagtggtgccatctcggctcattgtaacctctgcctcccaggttcaagtgattcaagccattcttgtgcctctgcctcctgagtagctgggattataggcgcacaccaccacacctggcgaatttttttttttttttttttttgaggctgagtctcactctatcgcccaggctggagtgcaatggagcaatctcggctcactgcaacctccgcctcctgggttcaagcgatcctcctgtctcagcttcctgattagctgggattacaggcgccctccaccacacccagttaatttttctatttttagtggagacggtgtttcaccatgttggccaggctggtctcaaactcctgacctcaagtgatccgcccacctcagcttcccaaagtgctgggattacaagcgtgagccaccacgcccagccaggaaacccattttcaacacctccttgctcttttttttttctgagacagagtctcgctctgtcgcccagactggagtgcagtggcgcaatctcggctcactgcaacctccgcctgccaggtcaaacaattctcctgcctcagcctcccaagtaggtgggactacaggcatgtgccaccacacccggctaattttcttttgtatttttagtagagacggggtttcaccatgctggccaggctggtctcgaactcctgacctcgtgatccgcccgcctcggcctcccaaagtgctgggattacaaacgtgagccaccgcgcctggccttccttgctcttcttgctccaaatcctgggaacgtctgaatcaacaggcggacatctgtcaaaccttcctagcaactacgcctgcggatggccaacctgaccctggaagacagtggggtttagttaagcacagattgtacatcgggggcctcataaggcgcctggaagcattcaagaacaccacgcttgtaaggacaaagcactcggtcacgggcgcctttacttcggagctccgcgctgctgctggacgagcgtccgttgagtcccagccccaatttttccaggaaatggcggtgagccctctagtgagatattttttggcctgggcctcagtttctccatctgtcaatgggggaagggtaaggcgggctagaggaccccgaccaggtcggctgcagccttcggaagctacggcccagggacgccacaccaaggcaggtctgcgggacgaaagaacccaagaacccgggcgcgcattggcgccggtcccgggctcaaggggcagcaacgaggagacgctggacctggccgttcctcgcacacatctctaaccttctgtgcctctcaagggagatggggtgagcatagccacctccactggagcccgaaaatccccggccgagataccgccactaaaaaggtacacatgcgtcaaagcctctcggagccatttccgctaacgtactcagggcgacgggcgtaagatggcggccgcgcaggcgcaaaatgtcgcagccgtagggaggctccgcctctgacgcttgccttgcatcacgtggtaatggccgctcaaaaaacgccttagcgaaaaccagagcgtgccctcgtcacgtgatggaggactcccagtacggcaaagggaaggcgccaaaagttgtcagatggcgaaggaaaccgcgaaattcgccattgtcacatgatggagcaacctatcgaaagcggagggaaaggtgccgaagtcacgtgactacgcacgcaaacactcccgcttgcaccacgtgcaactcacgcccaccccctcagccccccccttatctcttttcgcccctccctcccatttgggttgggcctgcgtcgaggcgcaacgcggcgtcaaagggggcggggcttcagccggtcacgtgttcccgcacctccccggcgcgcgcctgcccgcccgcccgctcgcccccggtccggactcctcctcctcctcttctcgccattgcagttggacccagcagcccggcgcgcaccgcgtggcttttgggggcagaccccggcgggctgtggcaggagggcggcggcggcggctgcggtcgaagaaggggacgccgacaagagttgaagtattgataacaccaaggaactctatcacaatttgaaaagataagcaaaagtttgatttccagacactacagaagaagtaaaaatgcgtccaatgcgaatttttgtgaatgatgaccgccatgtgatggcaaagcattcttccgtttatccaacacaagaggagctggaggcagtccagaacatggtgtcccacacggagcgggcgctcaaagctgtgtccgactggatagacgagcaggaaaagggtagcagcgagcaggcagagtccgataacatggatgtgcccccagaggacgacagtaaagaaggggctggggaacagaagacggagcacatgaccagaaccctgcggggagtgatgcgggtgggcctggtggcaaagggcctcctactcaagggggacttggatctggagctggtgctgctgtgtaaggagaagcccacaaccgccctcctggacaaggtggccgacaacctggccatccagcttgctgctgtaacagaagacaagtacgaaatactgcaatctgtcgacgatgctgcgattgtgataaaaaacacaaaagagcctccattgtccctgaccatccacctgacatcccctgttgtcagagaagaaatggagaaagtattagctggagaaacgctatcagtcaacgaccccccggacgttctggacaggcagaaatgccttgctgccttggcgtccctccgacacgccaagtggttccaggccagagccaacgggctgaagtcttgtgtcattgtgatccgggtcttgagggacctgtgcactcgcgtgcccacctggggtcccctccgaggctggcctctcgagctcctgtgtgagaaatccattggcacggccaacagaccgatgggtgctggcgaggccctgcggagagtgctggagtgcctggcgtcgggcatcgtgatgccagatggttctggcatttatgacccttgtgaaaaagaagccactgatgctattgggcatctagacagacagcaacgggaagatatcacacagagtgcgcagcacgcactgcggctcgctgccttcggccagctccataaagtcctaggcatggaccctctgccttccaagatgcccaagaaaccaaagaatgaaaacccagtggactacaccgttcagatcccaccaagcaccacctatgccattacgcccatgaaacgcccaatggaggaggacggggaggagaagtcgcccagcaaaaagaagaagaagattcagaagaaagaggagaaggcagagcccccccaggctatgaatgccctgatgcggttgaaccagctgaagccagggctgcagtacaagctggtgtcccagactgggcccgtccatgcccccatctttaccatgtctgtggaggttgatggcaattcattcgaggcctctgggccctccaaaaagacggccaagctgcacgtggccgttaaggtgttacaggacatgggcttgccgacgggtgctgaaggcagggactcgagcaagggggaggactcggctgaggagaccgaggcgaagccagcagtggtggcccctgccccagtggtagaagctgtctccacccctagtgcggcctttccctcagatgccactgccggaacgcagcaggggccgatcctgacaaagcacggcaagaacccagtcatggagctgaacgagaagaggcgtgggctcaagtacgagctcatctccgagaccgggggcagccacgacaagcgcttcgtcatggaggtcgaagtggatggacagaagttccaaggtgctggttccaacaaaaaggtggcgaaggcctacgctgctcttgctgccctagaaaagcttttccctgacacccctctcgcccttgatgccaacaaaaagaagagagccccagtacccgtcagagggggaccgaaatttgctgctaagccacataaccctggcttcggcatgggaggccccatgcacaacgaagtgcccccaccccccaaccttcgagggcggggaagaggcgggagcatccggggacgagggcgcgggcgaggatttggtggcgccaaccatggaggctacatgaatgccggtgctgggtatggaagctatgggtacggaggcaactctgcgacagcaggctacagtaagtgtgcgtttctgtctgtctgacctgggaagcagctgcagtgtagcgtctgggcctgagttagcaaagggtggccagagcagcctcgaggaggctgtagaaggggcacacacctttttgcggtgattaggtcagacggccctngacccccaccccttcccggccccacagtgggattgattgtgttaatacacgaactcgtgtaactgcaaagttccttaaaagttagaattttaaatttctctgctttaagccatgcgaagcaccaatnttntgaatacgcttttccggccantgcacagctcttgtcttgagaaggagccttcattggggggttacaggagcagagaaatctaaaacatgaatttcaaatgtggcgctctgtgccctttttcaaaagaattctaatttcttctctctgctcngtctcccccttttgtaggtgactttttcacagactgctacggctatcatgattttgggtcttcctagagcgtctaaaagtattgcacacaaaatcaactttttactccaatttcctccaactccaaaacccaaagtgtccgtgctgtgtccctgtgcttcactgggtttctcaaccgtggcttttcaccgcagcttgtctgaaactcttagcctgcagaatttaagacaatggcagtttttatcgtgatttgcctttgaacttggtcctattgaagttcacaataagtggaaaacaattttttcagagaatgtatttttgtgcagaattgcacagaattctagagacagcgttgttcggcatcaaggcaaaagcccacctttgctttttatggaaagcattactttatttaaagagacagacaatgacgcattttaatctacctttgtcttaatttacagcaggttttgtatgaatttttaaccttttaacaaactcccaaatctggttgatgcctttgacagtgatgaaaacgatttcaccacatctgaatccagagaaaccggctttttttcttattgcgagcatgttaaaacgttgggaacatgtggggaattgtatattgcgctgaattaacttctcccgcctcttgtaatgctctggtgggttcttgtttgggaatgcgatattttgtggctggtttagctagagagtgaactctcaaaggtatcaaaactgtgcttccattattagtgcaagaaacagacaggctttaaggggtagatgacgtgaaattttgcaagtcttaattacagctgcagatgcatgggattctggatttttttgttgctttttagtttaatgggactttaaaagtaattgaggagaaagaaccgtgatgttccctgtttctccagtaaaggactggcttttgcttgggcagaggtggtgctgctgggtgtgcagctgccacagactccaaaggcgtagaagtttgtgccaacacacggagtcattctggctctctgctgaggcccctgttttctggcaggtgccctccttggaaactggttttggctctgatcagcggttctttttgcagcaaagcctgcatctgtgttgacttgcaagattttgcgtttattcaggcaaaaactggtcaaaatggttactacatgatttgttcccagaggtttgaaacattcagtgaaactttttaaaactttgattgcatgatgtattttttttttagaaagttattgtttgagaataatgtctttttataccaggaaaatagttatcctgaatgacgttgaaaactccccctcccctttatttttttttaatcaatacatgtgaaagtaacaag

SEQ ID NO: 377467 - DNA, 6289 bp, Homo sapiens
agactttcacgggaaacaggaggatttatttagatgtacaccggctcagtggatttgtatctgaaaagctgaccattgaacaaagactgagtgtggtttttataggcaaacttacagaagcaaaacaaaagcagttaatgatacagtcacaggtcatgtaatctatagcataactgctgacttagcataacttgtggctttgcacagctgttggccttgcagctgtgtcaaaagaaaaacagagtctacaaatcttactaaatacaaccattggcaaacagtcatatttaatggttcagaaaaggagagacagtaaaggaatttttcttttcaactttgctccggaggaggctgtctggagcccattcctttggcctcgacttttcagtgttataactgtccttgaagtaagctggctaagcagaggaaaacttgttcttgttttctttttaacccttaccccctgccacataatcacatctttacacttcttttttttttttttttttttttttaagatgggaagtcggagtctcgctctgtcgcccaggctggagtgcagtggtgccatctcggctcattgtaacctctgcctcccaggttcaagtgattcaagccattcttgtgcctctgcctcctgagtagctgggattataggcgcacaccaccacacctggcgaatttttttttttttttttttttgaggctgagtctcactctatcgcccaggctggagtgcaatggagcaatctcggctcactgcaacctccgcctcctgggttcaagcgatcctcctgtctcagcttcctgattagctgggattacaggcgccctccaccacacccagttaatttttctatttttagtggagacggtgtttcaccatgttggccaggctggtctcaaactcctgacctcaagtgatccgcccacctcagcttcccaaagtgctgggattacaagcgtgagccaccacgcccagccaggaaacccattttcaacacctccttgctcttttttttttctgagacagagtctcgctctgtcgcccagactggagtgcagtggcgcaatctcggctcactgcaacctccgcctgccaggtcaaacaattctcctgcctcagcctcccaagtaggtgggactacaggcatgtgccaccacacccggctaattttcttttgtatttttagtagagacggggtttcaccatgctggccaggctggtctcgaactcctgacctcgtgatccgcccgcctcggcctcccaaagtgctgggattacaaacgtgagccaccgcgcctggccttccttgctcttcttgctccaaatcctgggaacgtctgaatcaacaggcggacatctgtcaaaccttcctagcaactacgcctgcggatggccaacctgaccctggaagacagtggggtttagttaagcacagattgtacatcgggggcctcataaggcgcctggaagcattcaagaacaccacgcttgtaaggacaaagcactcggtcacgggcgcctttacttcggagctccgcgctgctgctggacgagcgtccgttgagtcccagccccaatttttccaggaaatggcggtgagccctctagtgagatattttttggcctgggcctcagtttctccatctgtcaatgggggaagggtaaggcgggctagaggaccccgaccaggtcggctgcagccttcggaagctacggcccagggacgccacaccaaggcaggtctgcgggacgaaagaacccaagaacccgggcgcgcattggcgccggtcccgggctcaaggggcagcaacgaggagacgctggacctggccgttcctcgcacacatctctaaccttctgtgcctctcaagggagatggggtgagcatagccacctccactggagcccgaaaatccccggccgagataccgccactaaaaaggtacacatgcgtcaaagcctctcggagccatttccgctaacgtactcagggcgacgggcgtaagatggcggccgcgcaggcgcaaaatgtcgcagccgtagggaggctccgcctctgacgcttgccttgcatcacgtggtaatggccgctcaaaaaacgccttagcgaaaaccagagcgtgccctcgtcacgtgatggaggactcccagtacggcaaagggaaggcgccaaaagttgtcagatggcgaaggaaaccgcgaaattcgccattgtcacatgatggagcaacctatcgaaagcggagggaaaggtgccgaagtcacgtgactacgcacgcaaacactcccgcttgcaccacgtgcaactcacgcccaccccctcagccccccccttatctcttttcgcccctccctcccatttgggttgggcctgcgtcgaggcgcaacgcggcgtcaaagggggcggggcttcagccggtcacgtgttcccgcacctccccggcgcgcgcctgcccgcccgcccgctcgcccccggtccggactcctcctcctcctcttctcgccattgcagttggacccagcagcccggcgcgcaccgcgtggcttttgggggcagaccccggcgggctgtggcaggagggcggcggcggcggctgcggtcgaagaaggggacgccgacaagagttgaagtattgataacaccaaggaactctatcacaatttgaaaagataagcaaaagtttgatttccagacactacagaagaagtaaaaatgcgtccaatgcgaatttttgtgaatgatgaccgccatgtgatggcaaagcattcttccgtttatccaacacaagaggagctggaggcagtccagaacatggtgtcccacacggagcgggcgctcaaagctgtgtccgactggatagacgagcaggaaaagggtagcagcgagcaggcagagtccgataacatggatgtgcccccagaggacgacagtaaagaaggggctggggaacagaagacggagcacatgaccagaaccctgcggggagtgatgcgggtgggcctggtggcaaagggcctcctactcaagggggacttggatctggagctggtgctgctgtgtaaggagaagcccacaaccgccctcctggacaaggtggccgacaacctggccatccagcttgctgctgtaacagaagacaagtacgaaatactgcaatctgtcgacgatgctgcgattgtgataaaaaacacaaaagagcctccattgtccctgaccatccacctgacatcccctgttgtcagagaagaaatggagaaagtattagctggagaaacgctatcagtcaacgaccccccggacgttctggacaggcagaaatgccttgctgccttggcgtccctccgacacgccaagtggttccaggccagagccaacgggctgaagtcttgtgtcattgtgatccgggtcttgagggacctgtgcactcgcgtgcccacctggggtcccctccgaggctggcctctcgagctcctgtgtgagaaatccattggcacggccaacagaccgatgggtgctggcgaggccctgcggagagtgctggagtgcctggcgtcgggcatcgtgatgccagatggttctggcatttatgacccttgtgaaaaagaagccactgatgctattgggcatctagacagacagcaacgggaagatatcacacagagtgcgcagcacgcactgcggctcgctgccttcggccagctccataaagtcctaggcatggaccctctgccttccaagatgcccaagaaaccaaagaatgaaaacccagtggactacaccgttcagatcccaccaagcaccacctatgccattacgcccatgaaacgcccaatggaggaggacggggaggagaagtcgcccagcaaaaagaagaagaagattcagaagaaagaggagaaggcagagcccccccaggctatgaatgccctgatgcggttgaaccagctgaagccagggctgcagtacaagctggtgtcccagactgggcccgtccatgcccccatctttaccatgtctgtggaggttgatggcaattcattcgaggcctctgggccctccaaaaagacggccaagctgcacgtggccgttaaggtgttacaggacatgggcttgccgacgggtgctgaaggcagggactcgagcaagggggaggactcggctgaggagaccgaggcgaagccagcagtggtggcccctgccccagtggtagaagctgtctccacccctagtgcggcctttccctcagatgccactgccggaacgcagcaggggccgatcctgacaaagcacggcaagaacccagtcatggagctgaacgagaagaggcgtgggctcaagtacgagctcatctccgagaccgggggcagccacgacaagcgcttcgtcatggaggtcgaagtggatggacagaagttccaaggtgctggttccaacaaaaaggtggcgaaggcctacgctgctcttgctgccctagaaaagcttttccctgacacccctctcgcccttgatgccaacaaaaagaagagagccccagtacccgtcagagggggaccgaaatttgctgctaagccacataaccctggcttcggcatgggaggccccatgcacaacgaagtgcccccaccccccaaccttcgagggcggggaagaggcgggagcatccggggacgagggcgcgggcgaggatttggtggcgccaaccatggaggctacatgaatgccggtgctgggtatggaagctatgggtacggaggcaactctgcgacagcaggctacagtgactttttcacagactgctacggctatcatgattttgggtcttcctagagcgtctaaaagtattgcacacaaaatcaactttttactccaatttcctccaactccaaaacccaaagtgtccgtgctgtgtccctgtgcttcactgggtttctcaaccgtggcttttcaccgcagcttgtctgaaactcttagcctgcagaatttaagacaatggcagtttttatcgtgatttgcctttgaacttggtcctattgaagttcacaataagtggaaaacaattttttcagagaatgtatttttgtgcagaattgcacagaattctagagacagcgttgttcggcatcaaggcaaaagcccacctttgctttttatggaaagcattactttatttaaagagacagacaatgacgcattttaatctacctttgtcttaatttacagcaggttttgtatgaatttttaaccttttaacaaactcccaaatctggttgatgcctttgacagtgatgaaaacgatttcaccacatctgaatccagagaaaccggctttttttcttattgcgagcatgttaaaacgttgggaacatgtggggaattgtatattgcgctgaattaacttctcccgcctcttgtaatgctctggtgggttcttgtttgggaatgcgatattttgtggctggtttagctagagagtgaactctcaaaggtatcaaaactgtgcttccattattagtgcaagaaacagacaggctttaaggggtagatgacgtgaaattttgcaagtcttaattacagctgcagatgcatgggattctggatttttttgttgctttttagtttaatgggactttaaaagtaattgaggagaaagaaccgtgatgttccctgtttctccagtaaaggactggcttttgcttgggcagaggtggtgctgctgggtgtgcagctgccacagactccaaaggcgtagaagtttgtgccaacacacggagtcattctggctctctgctgaggcccctgttttctggcaggtgccctccttggaaactggttttggctctgatcagcggttctttttgcagcaaagcctgcatctgtgttgacttgcaagattttgcgtttattcaggcaaaaactggtcaaaatggttactacatgatttgttcccagaggtttgaaacattcagtgaaactttttaaaactttgattgcatgatgtattttttttttagaaagttattgtttgagaataatgtctttttataccaggaaaatagttatcctgaatgacgttgaaaactccccctcccctttatttttttttaatcaatacatgtgaaagtaacaagaaaaaaaacgacaacagggggggcgtccaaaaatacatgaggggccaaattagcgcgtcccgctttgtcaacgggcccaaggggtgtattatagaagacgggcgcgatacaagcagacgggacaagcgacgggatttggagaacacttggggg

SEQ ID NO: 377468 - DNA, 6038 bp, Homo sapiens
agactttcacgggaaacaggaggatttatttagatgtacaccggctcagtggatttgtatctgaaaagctgaccattgaacaaagactgagtgtggtttttataggcaaacttacagaagcaaaacaaaagcagttaatgatacagtcacaggtcatgtaatctatagcataactgctgacttagcataacttgtggctttgcacagctgttggccttgcagctgtgtcaaaagaaaaacagagtctacaaatcttactaaatacaaccattggcaaacagtcatatttaatggttcagaaaaggagagacagtaaaggaatttttcttttcaactttgctccggaggaggctgtctggagcccattcctttggcctcgacttttcagtgttataactgtccttgaagtaagctggctaagcagaggaaaacttgttcttgttttctttttaacccttaccccctgccacataatcacatctttacacttcttttttttttttttttttttttttaagatgggaagtcggagtctcgctctgtcgcccaggctggagtgcagtggtgccatctcggctcattgtaacctctgcctcccaggttcaagtgattcaagccattcttgtgcctctgcctcctgagtagctgggattataggcgcacaccaccacacctggcgaatttttttttttttttttttttgaggctgagtctcactctatcgcccaggctggagtgcaatggagcaatctcggctcactgcaacctccgcctcctgggttcaagcgatcctcctgtctcagcttcctgattagctgggattacaggcgccctccaccacacccagttaatttttctatttttagtggagacggtgtttcaccatgttggccaggctggtctcaaactcctgacctcaagtgatccgcccacctcagcttcccaaagtgctgggattacaagcgtgagccaccacgcccagccaggaaacccattttcaacacctccttgctcttttttttttctgagacagagtctcgctctgtcgcccagactggagtgcagtggcgcaatctcggctcactgcaacctccgcctgccaggtcaaacaattctcctgcctcagcctcccaagtaggtgggactacaggcatgtgccaccacacccggctaattttcttttgtatttttagtagagacggggtttcaccatgctggccaggctggtctcgaactcctgacctcgtgatccgcccgcctcggcctcccaaagtgctgggattacaaacgtgagccaccgcgcctggccttccttgctcttcttgctccaaatcctgggaacgtctgaatcaacaggcggacatctgtcaaaccttcctagcaactacgcctgcggatggccaacctgaccctggaagacagtggggtttagttaagcacagattgtacatcgggggcctcataaggcgcctggaagcattcaagaacaccacgcttgtaaggacaaagcactcggtcacgggcgcctttacttcggagctccgcgctgctgctggacgagcgtccgttgagtcccagccccaatttttccaggaaatggcggtgagccctctagtgagatattttttggcctgggcctcagtttctccatctgtcaatgggggaagggtaaggcgggctagaggaccccgaccaggtcggctgcagccttcggaagctacggcccagggacgccacaccaaggcaggtctgcgggacgaaagaacccaagaacccgggcgcgcattggcgccggtcccgggctcaaggggcagcaacgaggagacgctggacctggccgttcctcgcacacatctctaaccttctgtgcctctcaagggagatggggtgagcatagccacctccactggagcccgaaaatccccggccgagataccgccactaaaaaggtacacatgcgtcaaagcctctcggagccatttccgctaacgtactcagggcgacgggcgtaagatggcggccgcgcaggcgcaaaatgtcgcagccgtagggaggctccgcctctgacgcttgccttgcatcacgtggtaatggccgctcaaaaaacgccttagcgaaaaccagagcgtgccctcgtcacgtgatggaggactcccagtacggcaaagggaaggcgccaaaagttgtcagatggcgaaggaaaccgcgaaattcgccattgtcacatgatggagcaacctatcgaaagcggagggaaaggtgccgaagtcacgtgactacgcacgcaaacactcccgcttgcaccacgtgcaactcacgcccaccccctcagccccccccttatctcttttcgcccctccctcccatttgggttgggcctgcgtcgaggcgcaacgcggcgtcaaagggggcggggcttcagccggtcacgtgttcccgcacctccccggcgcgcgcctgcccgcccgcccgctcgcccccggtccggactcctcctcctcctcttctcgccattgcagttggacccagcagcccggcgcgcaccgcgtggcttttgggggcagaccccggcgggctgtggcaggagggcggcggcggcggctgcggtcgaagaaggggacgccgacaagagttgaagtattgataacaccaaggaactctatcacaatttgaaaagataagcaaaagtttgatttccagacactacagaagaagtaaaaatgcgtccaatgcgaatttttgtgaatgatgaccgccatgtgatggcaaagcattcttccgtttatccaacacaagaggagctggaggcagtccagaacatggtgtcccacacggagcgggcgctcaaagctgtgtccgactggatagacgagcaggaaaagggtagcagcgagcaggcagagtccgataacatggatgtgcccccagaggacgacagtaaagaaggggctggggaacagaagacggagcacatgaccagaaccctgcggggagtgatgcgggtgggcctggtggcaaagggcctcctactcaagggggacttggatctggagctggtgctgctgtgtaaggagaagcccacaaccgccctcctggacaaggtggccgacaacctggccatccagcttgctgctgtaacagaagacaagtacgaaatactgcaatctgtcgacgatgctgcgattgtgataaaaaacacaaaagagcctccattgtccctgaccatccacctgacatcccctgttgtcagagaagaaatggagaaagtattagctggagaaacgctatcagtcaacgaccccccggacgttctggacaggcagaaatgccttgctgccttggcgtccctccgacacgccaagtggttccaggccagagccaacgggctgaagtcttgtgtcattgtgatccgggtcttgagggacctgtgcactcgcgtgcccacctggggtcccctccgaggctggcctctcgagctcctgtgtgagaaatccattggcacggccaacagaccgatgggtgctggcgaggccctgcggagagtgctggagtgcctggcgtcgggcatcgtgatgccagcacgcactgcggctcgctgccttcggccagctccataaagtcctaggcatggaccctctgccttccaagatgcccaagaaaccaaagaatgaaaacccagtggactacaccgttcagatcccaccaagcaccacctatgccattacgcccatgaaacgcccaatggaggaggacggggaggagaagtcgcccagcaaaaagaagaagaagattcagaagaaagaggagaaggcagagcccccccaggctatgaatgccctgatgcggttgaaccagctgaagccagggctgcagtacaagctggtgtcccagactgggcccgtccatgcccccatctttaccatgtctgtggaggttgatggcaattcattcgaggcctctgggccctccaaaaagacggccaagctgcacgtggccgttaaggtgttacaggacatgggcttgccgacgggtgctgaaggcagggactcgagcaagggggaggactcggctgaggagaccgaggcgaagccagcagtggtggcccctgccccagtggtagaagctgtctccacccctagtgcggcctttccctcagatgccactgccggaacgcagcaggggccgatcctgacaaagcacggcaagaacccagtcatggagctgaacgagaagaggcgtgggctcaagtacgagctcatctccgagaccgggggcagccacgacaagcgcttcgtcatggaggtcgaagtggatggacagaagttccaaggtgctggttccaacaaaaaggtggcgaaggcctacgctgctcttgctgccctagaaaagcttttccctgacacccctctcgcccttgatgccaacaaaaagaagagagccccagtacccgtcagagggggaccgaaatttgctgctaagccacataaccctggcttcggcatgggaggccccatgcacaacgaagtgcccccaccccccaaccttcgagggcggggaagaggcgggagcatccggggacgagggcgcgggcgaggatttggtggcgccaaccatggaggctacatgaatgccggtgctgggtatggaagctatgggtacggaggcaactctgcgacagcaggctacagtgactttttcacagactgctacggctatcatgattttgggtcttcctagagcgtctaaaagtattgcacacaaaatcaactttttactccaatttcctccaactccaaaacccaaagtgtccgtgctgtgtccctgtgcttcactgggtttctcaaccgtggcttttcaccgcagcttgtctgaaactcttagcctgcagaatttaagacaatggcagtttttatcgtgatttgcctttgaacttggtcctattgaagttcacaataagtggaaaacaattttttcagagaatgtatttttgtgcagaattgcacagaattctagagacagcgttgttcggcatcaaggcaaaagcccacctttgctttttatggaaagcattactttatttaaagagacagacaatgacgcattttaatctacctttgtcttaatttacagcaggttttgtatgaatttttaaccttttaacaaactcccaaatctggttgatgcctttgacagtgatgaaaacgatttcaccacatctgaatccagagaaaccggctttttttcttattgcgagcatgttaaaacgttgggaacatgtggggaattgtatattgcgctgaattaacttctcccgcctcttgtaatgctctggtgggttcttgtttgggaatgcgatattttgtggctggtttagctagagagtgaactctcaaaggtatcaaaactgtgcttccattattagtgcaagaaacagacaggctttaaggggtagatgacgtgaaattttgcaagtcttaattacagctgcagatgcatgggattctggatttttttgttgctttttagtttaatgggactttaaaagtaattgaggagaaagaaccgtgatgttccctgtttctccagtaaaggactggcttttgcttgggcagaggtggtgctgctgggtgtgcagctgccacagactccaaaggcgtagaagtttgtgccaacacacggagtcattctggctctctgctgaggcccctgttttctggcaggtgccctccttggaaactggttttggctctgatcagcggttctttttgcagcaaagcctgcatctgtgttgacttgcaagattttgcgtttattcaggcaaaaactggtcaaaatggttactacatgatttgttcccagaggtttgaaacattcagtgaaactttttaaaactttgattgcatgatgtattttttttttagaaagttattgtttgagaataatgtctttttataccaggaaaatagttatcctgaatgacgttgaaaactccccctcccctttatttttttttaatcaatacatgtgaaagtaacaag

SEQ ID NO: 377469 - DNA, 5946 bp, Homo sapiens
agactttcacgggaaacaggaggatttatttagatgtacaccggctcagtggatttgtatctgaaaagctgaccattgaacaaagactgagtgtggtttttataggcaaacttacagaagcaaaacaaaagcagttaatgatacagtcacaggtcatgtaatctatagcataactgctgacttagcataacttgtggctttgcacagctgttggccttgcagctgtgtcaaaagaaaaacagagtctacaaatcttactaaatacaaccattggcaaacagtcatatttaatggttcagaaaaggagagacagtaaaggaatttttcttttcaactttgctccggaggaggctgtctggagcccattcctttggcctcgacttttcagtgttataactgtccttgaagtaagctggctaagcagaggaaaacttgttcttgttttctttttaacccttaccccctgccacataatcacatctttacacttcttttttttttttttttttttttttaagatgggaagtcggagtctcgctctgtcgcccaggctggagtgcagtggtgccatctcggctcattgtaacctctgcctcccaggttcaagtgattcaagccattcttgtgcctctgcctcctgagtagctgggattataggcgcacaccaccacacctggcgaatttttttttttttttttttttgaggctgagtctcactctatcgcccaggctggagtgcaatggagcaatctcggctcactgcaacctccgcctcctgggttcaagcgatcctcctgtctcagcttcctgattagctgggattacaggcgccctccaccacacccagttaatttttctatttttagtggagacggtgtttcaccatgttggccaggctggtctcaaactcctgacctcaagtgatccgcccacctcagcttcccaaagtgctgggattacaagcgtgagccaccacgcccagccaggaaacccattttcaacacctccttgctcttttttttttctgagacagagtctcgctctgtcgcccagactggagtgcagtggcgcaatctcggctcactgcaacctccgcctgccaggtcaaacaattctcctgcctcagcctcccaagtaggtgggactacaggcatgtgccaccacacccggctaattttcttttgtatttttagtagagacggggtttcaccatgctggccaggctggtctcgaactcctgacctcgtgatccgcccgcctcggcctcccaaagtgctgggattacaaacgtgagccaccgcgcctggccttccttgctcttcttgctccaaatcctgggaacgtctgaatcaacaggcggacatctgtcaaaccttcctagcaactacgcctgcggatggccaacctgaccctggaagacagtggggtttagttaagcacagattgtacatcgggggcctcataaggcgcctggaagcattcaagaacaccacgcttgtaaggacaaagcactcggtcacgggcgcctttacttcggagctccgcgctgctgctggacgagcgtccgttgagtcccagccccaatttttccaggaaatggcggtgagccctctagtgagatattttttggcctgggcctcagtttctccatctgtcaatgggggaagggtaaggcgggctagaggaccccgaccaggtcggctgcagccttcggaagctacggcccagggacgccacaccaaggcaggtctgcgggacgaaagaacccaagaacccgggcgcgcattggcgccggtcccgggctcaaggggcagcaacgaggagacgctggacctggccgttcctcgcacacatctctaaccttctgtgcctctcaagggagatggggtgagcatagccacctccactggagcccgaaaatccccggccgagataccgccactaaaaaggtacacatgcgtcaaagcctctcggagccatttccgctaacgtactcagggcgacgggcgtaagatggcggccgcgcaggcgcaaaatgtcgcagccgtagggaggctccgcctctgacgcttgccttgcatcacgtggtaatggccgctcaaaaaacgccttagcgaaaaccagagcgtgccctcgtcacgtgatggaggactcccagtacggcaaagggaaggcgccaaaagttgtcagatggcgaaggaaaccgcgaaattcgccattgtcacatgatggagcaacctatcgaaagcggagggaaaggtgccgaagtcacgtgactacgcacgcaaacactcccgcttgcaccacgtgcaactcacgcccaccccctcagccccccccttatctcttttcgcccctccctcccatttgggttgggcctgcgtcgaggcgcaacgcggcgtcaaagggggcggggcttcagccggtcacgtgttcccgcacctccccggcgcgcgcctgcccgcccgcccgctcgcccccggtccggactcctcctcctcctcttctcgccattgcagttggacccagcagcccggcgcgcaccgcgtggcttttgggggcagaccccggcgggctgtggcaggagggcggcggcggcggctgcggtcgaagaaggggacgccgacaagagttgaagtattgataacaccaaggaactctatcacaatttgaaaagataagcaaaagtttgatttccagacactacagaagaagtaaaaatgcgtccaatgcgaatttttgtgaatgatgaccgccatgtgatggcaaagcattcttccgtttatccaacacaagaggagctggaggcagtccagaacatggtgtcccacacggagcgggcgctcaaagctgtgtccgactggatagacgagcaggaaaagggtagcagcgagcaggcagagtccgataacatggatgtgcccccagaggacgacagtaaagaaggggctggggaacagaagacggagcacatgaccagaaccctgcggggagtgatgcgggtgggcctggtggcaaagggcctcctactcaagggggacttggatctggagctggtgctgctgtgtaaggagaagcccacaaccgccctcctggacaaggtggccgacaacctggccatccagcttgctgctgtaacagaagacaagtacgaaatactgcaatctgtcgacgatgctgcgattgtgataaaaaacacaaaagagcctccattgtccctgaccatccacctgacatcccctgttgtcagagaagaaatggagaaagtattagctggaggccagagccaacgggctgaagtcttgtgtcattgtgatccgggtcttgagggacctgtgcactcgcgtgcccacctggggtcccctccgaggctggcctctcgagctcctgtgtgagaaatccattggcacggccaacagaccgatgggtgctggcgaggccctgcggagagtgctggagtgcctggcgtcgggcatcgtgatgccagcacgcactgcggctcgctgccttcggccagctccataaagtcctaggcatggaccctctgccttccaagatgcccaagaaaccaaagaatgaaaacccagtggactacaccgttcagatcccaccaagcaccacctatgccattacgcccatgaaacgcccaatggaggaggacggggaggagaagtcgcccagcaaaaagaagaagaagattcagaagaaagaggagaaggcagagcccccccaggctatgaatgccctgatgcggttgaaccagctgaagccagggctgcagtacaagctggtgtcccagactgggcccgtccatgcccccatctttaccatgtctgtggaggttgatggcaattcattcgaggcctctgggccctccaaaaagacggccaagctgcacgtggccgttaaggtgttacaggacatgggcttgccgacgggtgctgaaggcagggactcgagcaagggggaggactcggctgaggagaccgaggcgaagccagcagtggtggcccctgccccagtggtagaagctgtctccacccctagtgcggcctttccctcagatgccactgccggaacgcagcaggggccgatcctgacaaagcacggcaagaacccagtcatggagctgaacgagaagaggcgtgggctcaagtacgagctcatctccgagaccgggggcagccacgacaagcgcttcgtcatggaggtcgaagtggatggacagaagttccaaggtgctggttccaacaaaaaggtggcgaaggcctacgctgctcttgctgccctagaaaagcttttccctgacacccctctcgcccttgatgccaacaaaaagaagagagccccagtacccgtcagagggggaccgaaatttgctgctaagccacataaccctggcttcggcatgggaggccccatgcacaacgaagtgcccccaccccccaaccttcgagggcggggaagaggcgggagcatccggggacgagggcgcgggcgaggatttggtggcgccaaccatggaggctacatgaatgccggtgctgggtatggaagctatgggtacggaggcaactctgcgacagcaggctacagtgactttttcacagactgctacggctatcatgattttgggtcttcctagagcgtctaaaagtattgcacacaaaatcaactttttactccaatttcctccaactccaaaacccaaagtgtccgtgctgtgtccctgtgcttcactgggtttctcaaccgtggcttttcaccgcagcttgtctgaaactcttagcctgcagaatttaagacaatggcagtttttatcgtgatttgcctttgaacttggtcctattgaagttcacaataagtggaaaacaattttttcagagaatgtatttttgtgcagaattgcacagaattctagagacagcgttgttcggcatcaaggcaaaagcccacctttgctttttatggaaagcattactttatttaaagagacagacaatgacgcattttaatctacctttgtcttaatttacagcaggttttgtatgaatttttaaccttttaacaaactcccaaatctggttgatgcctttgacagtgatgaaaacgatttcaccacatctgaatccagagaaaccggctttttttcttattgcgagcatgttaaaacgttgggaacatgtggggaattgtatattgcgctgaattaacttctcccgcctcttgtaatgctctggtgggttcttgtttgggaatgcgatattttgtggctggtttagctagagagtgaactctcaaaggtatcaaaactgtgcttccattattagtgcaagaaacagacaggctttaaggggtagatgacgtgaaattttgcaagtcttaattacagctgcagatgcatgggattctggatttttttgttgctttttagtttaatgggactttaaaagtaattgaggagaaagaaccgtgatgttccctgtttctccagtaaaggactggcttttgcttgggcagaggtggtgctgctgggtgtgcagctgccacagactccaaaggcgtagaagtttgtgccaacacacggagtcattctggctctctgctgaggcccctgttttctggcaggtgccctccttggaaactggttttggctctgatcagcggttctttttgcagcaaagcctgcatctgtgttgacttgcaagattttgcgtttattcaggcaaaaactggtcaaaatggttactacatgatttgttcccagaggtttgaaacattcagtgaaactttttaaaactttgattgcatgatgtattttttttttagaaagttattgtttgagaataatgtctttttataccaggaaaatagttatcctgaatgacgttgaaaactccccctcccctttatttttttttaatcaatacatgtgaaagtaacaag

SEQ ID NO: 377470 - DNA, 5232 bp, Homo sapiens
agactttcacgggaaacaggaggatttatttagatgtacaccggctcagtggatttgtatctgaaaagctgaccattgaacaaagactgagtgtggtttttataggcaaacttacagaagcaaaacaaaagcagttaatgatacagtcacaggtcatgtaatctatagcataactgctgacttagcataacttgtggctttgcacagctgttggccttgcagctgtgtcaaaagaaaaacagagtctacaaatcttactaaatacaaccattggcaaacagtcatatttaatggttcagaaaaggagagacagtaaaggaatttttcttttcaactttgctccggaggaggctgtctggagcccattcctttggcctcgacttttcagtgttataactgtccttgaagtaagctggctaagcagaggaaaacttgttcttgttttctttttaacccttaccccctgccacataatcacatctttacacttcttttttttttttttttttttttttaagatgggaagtcggagtctcgctctgtcgcccaggctggagtgcagtggtgccatctcggctcattgtaacctctgcctcccaggttcaagtgattcaagccattcttgtgcctctgcctcctgagtagctgggattataggcgcacaccaccacacctggcgaatttttttttttttttttttttgaggctgagtctcactctatcgcccaggctggagtgcaatggagcaatctcggctcactgcaacctccgcctcctgggttcaagcgatcctcctgtctcagcttcctgattagctgggattacaggcgccctccaccacacccagttaatttttctatttttagtggagacggtgtttcaccatgttggccaggctggtctcaaactcctgacctcaagtgatccgcccacctcagcttcccaaagtgctgggattacaagcgtgagccaccacgcccagccaggaaacccattttcaacacctccttgctcttttttttttctgagacagagtctcgctctgtcgcccagactggagtgcagtggcgcaatctcggctcactgcaacctccgcctgccaggtcaaacaattctcctgcctcagcctcccaagtaggtgggactacaggcatgtgccaccacacccggctaattttcttttgtatttttagtagagacggggtttcaccatgctggccaggctggtctcgaactcctgacctcgtgatccgcccgcctcggcctcccaaagtgctgggattacaaacgtgagccaccgcgcctggccttccttgctcttcttgctccaaatcctgggaacgtctgaatcaacaggcggacatctgtcaaaccttcctagcaactacgcctgcggatggccaacctgaccctggaagacagtggggtttagttaagcacagattgtacatcgggggcctcataaggcgcctggaagcattcaagaacaccacgcttgtaaggacaaagcactcggtcacgggcgcctttacttcggagctccgcgctgctgctggacgagcgtccgttgagtcccagccccaatttttccaggaaatggcggtgagccctctagtgagatattttttggcctgggcctcagtttctccatctgtcaatgggggaagggtaaggcgggctagaggaccccgaccaggtcggctgcagccttcggaagctacggcccagggacgccacaccaaggcaggtctgcgggacgaaagaacccaagaacccgggcgcgcattggcgccggtcccgggctcaaggggcagcaacgaggagacgctggacctggccgttcctcgcacacatctctaaccttctgtgcctctcaagggagatggggtgagcatagccacctccactggagcccgaaaatccccggccgagataccgccactaaaaaggtacacatgcgtcaaagcctctcggagccatttccgctaacgtactcagggcgacgggcgtaagatggcggccgcgcaggcgcaaaatgtcgcagccgtagggaggctccgcctctgacgcttgccttgcatcacgtggtaatggccgctcaaaaaacgccttagcgaaaaccagagcgtgccctcgtcacgtgatggaggactcccagtacggcaaagggaaggcgccaaaagttgtcagatggcgaaggaaaccgcgaaattcgccattgtcacatgatggagcaacctatcgaaagcggagggaaaggtgccgaagtcacgtgactacgcacgcaaacactcccgcttgcaccacgtgcaactcacgcccaccccctcagccccccccttatctcttttcgcccctccctcccatttgggttgggcctgcgtcgaggcgcaacgcggcgtcaaagggggcggggcttcagccggtcacgtgttcccgcacctccccggcgcgcgcctgcccgcccgcccgctcgcccccggtccggactcctcctcctcctcttctcgccattgcagttggacccagcagcccggcgcgcaccgcgtggcttttgggggcagaccccggcgggctgtggcaggagggcggcggcggcggctgcggtcgaagaaggggacgccgacaagagttgaagtattgataacaccaaggaactctatcacaatttgaaaagataagcaaaagtttgatttccagacactacagaagaagtaaaaatgcgtccaatgcgaatttttgtgaatgatgaccgccatgtgatggcaaagcattcttccgtttatccaacacaagaggagctggaggcagtccagaacatggtgtcccacacggagcgggcgctcaaagctgtgtccgactggatagacgagcaggaaaagggtagcagcgagcaggcagagtccgataacatggatgtgcccccagaggacgacagtaaagaaggggctggggaacagaagacggagcacatgaccagaaccctgcggggagtgatgcgggtgggcctggtggcaaagggcctcctactcaagggggacttggatctggagctggtgctgctgtgtaaggagaagcccacaaccgccctcctggacaaggtggccgacaacctggccatccagcttgctgctgtaacagaagacaagtacgaaatactgcaatctgtcgacgatgctgcgattgtgataaaaaacacaaaagagcctccattgtccctgaccatccacctgacatcccctgttgtcagagaagaaatggagaaagtattagctggagaaacgctatcagtcaacgaccccccggacgttctggacaggcagaaatgccttgctgccttggcgtccctccgacacgccaagtggttccaggccagagccaacgggctgaagtcttgtgtcattgtgatccgggtcttgagggacctgtgcactcgcgtgcccacctggggtcccctccgaggctggcctctcgagctcctgtgtgagaaatccattggcacggccaacagaccgatgggtgctggcgaggccctgcggagagtgctggagtgcctggcgtcgggcatcgtgatgccagatggttctggcatttatgacccttgtgaaaaagaagccactgatgctattgggcatctagacagacagcaacgggaagatatcacacagagtgcgcagcacgcactgcggctcgctgccttcggccagctccataaagtcctaggcatggaccctctgccttccaagatgcccaagaaaccaaagaatgaaaacccagtggactacaccgttcagatcccaccaagcaccacctatgccattacgcccatgaaacgcccaatggaggaggacggggaggagaagtcgcccagcaaaaagaagaagaagattcagaagaaagaggagaaggcagagcccccccaggctatgaatgccctgatgcggttgaaccagctgaagccagggctgcagtacaagctggtgtcccagactgggcccgtccatgcccccatctttaccatgtctgtggaggttgatggcaattcattcgaggcctctgggccctccaaaaagacggccaagctgcacgtggccgttaaggtgttacaggacatgggcttgccgacgggtgctgaaggcagggactcgagcaagggggaggactcggctgaggagaccgaggcgaagccagcagtggtggcccctgccccagtggtagaagctgtctccacccctagtgcggcctttccctcagatgccactgccggaacgcagcaggggccgatcctgacaaagcacggcaagaacccagtcatggagctgaacgagaagaggcgtgggctcaagtacgagctcatctccgagaccgggggcagccacgacaagcgcttcgtcatggaggtcgaagtggatggacagaagttccaaggtgctggttccaacaaaaaggtggcgaaggcctacgctgctcttgctgccctagaaaagcttttccctgacacccctctcgcccttgatgccaacaaaaagaagagagccccagtacccgtcagagggggaccgaaatttgctgctaagccacataaccctggcttcggcatgggaggccccatgcacaacgaagtgcccccaccccccaaccttcgagggcggggaagaggcgggagcatccggggacgagggcgcgggcgaggatttggtggcgccaaccatggaggctacatgaatgccggtgctgggtatggaagctatgggtacggaggcaactctgcgacagcaggctacacctccaggcccccgcccccatcccgtccacgttgctgtgtcgtgaggtgcagcgggtcaccctgtggcccgtcctgtgacccatatttagccgtgtttgggactccgtgtcttcaatggtttgttagttgccattacaactttgtctgggtagagtttttgagtttttgcagttcagtatccctctgtctattcacacttcgtgttagtggtaactcagtttgtctttaaatagttacagaagggatacgtcatttgttaatgcttttgtgaagtgagttaaacgagctttctgtattttaatgctttagtgtttcagttttataagtgaagattttattttaaaaaccagtgggaaagagtggggggtttctttttatgtctgggtcattcaggcagtacatctgaattaagctgaatgtagacaaataaagaaaaacaaaactgc

SEQ ID NO: 377471 - DNA, 5386 bp, Homo sapiens
agactttcacgggaaacaggaggatttatttagatgtacaccggctcagtggatttgtatctgaaaagctgaccattgaacaaagactgagtgtggtttttataggcaaacttacagaagcaaaacaaaagcagttaatgatacagtcacaggtcatgtaatctatagcataactgctgacttagcataacttgtggctttgcacagctgttggccttgcagctgtgtcaaaagaaaaacagagtctacaaatcttactaaatacaaccattggcaaacagtcatatttaatggttcagaaaaggagagacagtaaaggaatttttcttttcaactttgctccggaggaggctgtctggagcccattcctttggcctcgacttttcagtgttataactgtccttgaagtaagctggctaagcagaggaaaacttgttcttgttttctttttaacccttaccccctgccacataatcacatctttacacttcttttttttttttttttttttttttaagatgggaagtcggagtctcgctctgtcgcccaggctggagtgcagtggtgccatctcggctcattgtaacctctgcctcccaggttcaagtgattcaagccattcttgtgcctctgcctcctgagtagctgggattataggcgcacaccaccacacctggcgaatttttttttttttttttttttgaggctgagtctcactctatcgcccaggctggagtgcaatggagcaatctcggctcactgcaacctccgcctcctgggttcaagcgatcctcctgtctcagcttcctgattagctgggattacaggcgccctccaccacacccagttaatttttctatttttagtggagacggtgtttcaccatgttggccaggctggtctcaaactcctgacctcaagtgatccgcccacctcagcttcccaaagtgctgggattacaagcgtgagccaccacgcccagccaggaaacccattttcaacacctccttgctcttttttttttctgagacagagtctcgctctgtcgcccagactggagtgcagtggcgcaatctcggctcactgcaacctccgcctgccaggtcaaacaattctcctgcctcagcctcccaagtaggtgggactacaggcatgtgccaccacacccggctaattttcttttgtatttttagtagagacggggtttcaccatgctggccaggctggtctcgaactcctgacctcgtgatccgcccgcctcggcctcccaaagtgctgggattacaaacgtgagccaccgcgcctggccttccttgctcttcttgctccaaatcctgggaacgtctgaatcaacaggcggacatctgtcaaaccttcctagcaactacgcctgcggatggccaacctgaccctggaagacagtggggtttagttaagcacagattgtacatcgggggcctcataaggcgcctggaagcattcaagaacaccacgcttgtaaggacaaagcactcggtcacgggcgcctttacttcggagctccgcgctgctgctggacgagcgtccgttgagtcccagccccaatttttccaggaaatggcggtgagccctctagtgagatattttttggcctgggcctcagtttctccatctgtcaatgggggaagggtaaggcgggctagaggaccccgaccaggtcggctgcagccttcggaagctacggcccagggacgccacaccaaggcaggtctgcgggacgaaagaacccaagaacccgggcgcgcattggcgccggtcccgggctcaaggggcagcaacgaggagacgctggacctggccgttcctcgcacacatctctaaccttctgtgcctctcaagggagatggggtgagcatagccacctccactggagcccgaaaatccccggccgagataccgccactaaaaaggtacacatgcgtcaaagcctctcggagccatttccgctaacgtactcagggcgacgggcgtaagatggcggccgcgcaggcgcaaaatgtcgcagccgtagggaggctccgcctctgacgcttgccttgcatcacgtggtaatggccgctcaaaaaacgccttagcgaaaaccagagcgtgccctcgtcacgtgatggaggactcccagtacggcaaagggaaggcgccaaaagttgtcagatggcgaaggaaaccgcgaaattcgccattgtcacatgatggagcaacctatcgaaagcggagggaaaggtgccgaagtcacgtgactacgcacgcaaacactcccgcttgcaccacgtgcaactcacgcccaccccctcagccccccccttatctcttttcgcccctccctcccatttgggttgggcctgcgtcgaggcgcaacgcggcgtcaaagggggcggggcttcagccggtcacgtgttcccgcacctccccggcgcgcgcctgcccgcccgcccgctcgcccccggtccggactcctcctcctcctcttctcgccattgcagttggacccagcagcccggcgcgcaccgcgtggcttttgggggcagaccccggcgggctgtggcaggagggcggcggcggcggctgcggtcgaagaaggggacgccgacaagagttgaagtattgataacaccaaggaactctatcacaatttgaaaagataagcaaaagtttgatttccagacactacagaagaagtaaaaatgcgtccaatgcgaatttttgtgaatgatgaccgccatgtgatggcaaagcattcttccgtttatccaacacaagaggagctggaggcagtccagaacatggtgtcccacacggagcgggcgctcaaagctgtgtccgactggatagacgagcaggaaaagggtagcagcgagcaggcagagtccgataacatggatgtgcccccagaggacgacagtaaagaaggggctggggaacagaagacggagcacatgaccagaaccctgcggggagtgatgcgggtgggcctggtggcaaagggcctcctactcaagggggacttggatctggagctggtgctgctgtgtaaggagaagcccacaaccgccctcctggacaaggtggccgacaacctggccatccagcttgctcttgctattctctctgtagaggagaaggcagagcccccccaggctatgaatgccctgatgcggttgaaccagctgaagccagggctgcagtacaagctggtgtcccagactgggcccgtccatgcccccatctttaccatgtctgtggaggttgatggcaattcattcgaggcctctgggccctccaaaaagacggccaagctgcacgtggccgttaaggtgttacaggacatgggcttgccgacgggtgctgaaggcagggactcgagcaagggggaggactcggctgaggagaccgaggcgaagccagcagtggtggcccctgccccagtggtagaagctgtctccacccctagtgcggcctttccctcagatgccactgccggaacgcagcaggggccgatcctgacaaagcacggcaagaacccagtcatggagctgaacgagaagaggcgtgggctcaagtacgagctcatctccgagaccgggggcagccacgacaagcgcttcgtcatggaggtcgaagtggatggacagaagttccaaggtgctggttccaacaaaaaggtggcgaaggcctacgctgctcttgctgccctagaaaagcttttccctgacacccctctcgcccttgatgccaacaaaaagaagagagccccagtacccgtcagagggggaccgaaatttgctgctaagccacataaccctggcttcggcatgggaggccccatgcacaacgaagtgcccccaccccccaaccttcgagggcggggaagaggcgggagcatccggggacgagggcgcgggcgaggatttggtggcgccaaccatggaggctacatgaatgccggtgctgggtatggaagctatgggtacggaggcaactctgcgacagcaggctacagtgactttttcacagactgctacggctatcatgattttgggtcttcctagagcgtctaaaagtattgcacacaaaatcaactttttactccaatttcctccaactccaaaacccaaagtgtccgtgctgtgtccctgtgcttcactgggtttctcaaccgtggcttttcaccgcagcttgtctgaaactcttagcctgcagaatttaagacaatggcagtttttatcgtgatttgcctttgaacttggtcctattgaagttcacaataagtggaaaacaattttttcagagaatgtatttttgtgcagaattgcacagaattctagagacagcgttgttcggcatcaaggcaaaagcccacctttgctttttatggaaagcattactttatttaaagagacagacaatgacgcattttaatctacctttgtcttaatttacagcaggttttgtatgaatttttaaccttttaacaaactcccaaatctggttgatgcctttgacagtgatgaaaacgatttcaccacatctgaatccagagaaaccggctttttttcttattgcgagcatgttaaaacgttgggaacatgtggggaattgtatattgcgctgaattaacttctcccgcctcttgtaatgctctggtgggttcttgtttgggaatgcgatattttgtggctggtttagctagagagtgaactctcaaaggtatcaaaactgtgcttccattattagtgcaagaaacagacaggctttaaggggtagatgacgtgaaattttgcaagtcttaattacagctgcagatgcatgggattctggatttttttgttgctttttagtttaatgggactttaaaagtaattgaggagaaagaaccgtgatgttccctgtttctccagtaaaggactggcttttgcttgggcagaggtggtgctgctgggtgtgcagctgccacagactccaaaggcgtagaagtttgtgccaacacacggagtcattctggctctctgctgaggcccctgttttctggcaggtgccctccttggaaactggttttggctctgatcagcggttctttttgcagcaaagcctgcatctgtgttgacttgcaagattttgcgtttattcaggcaaaaactggtcaaaatggttactacatgatttgttcccagaggtttgaaacattcagtgaaactttttaaaactttgattgcatgatgtattttttttttagaaagttattgtttgagaataatgtctttttataccaggaaaatagttatcctgaatgacgttgaaaactccccctcccctttatttttttttaatcaatacatgtgaaagtaacaag

SEQ ID NO: 377472 - DNA, 5104 bp, Homo sapiens
agactttcacgggaaacaggaggatttatttagatgtacaccggctcagtggatttgtatctgaaaagctgaccattgaacaaagactgagtgtggtttttataggcaaacttacagaagcaaaacaaaagcagttaatgatacagtcacaggtcatgtaatctatagcataactgctgacttagcataacttgtggctttgcacagctgttggccttgcagctgtgtcaaaagaaaaacagagtctacaaatcttactaaatacaaccattggcaaacagtcatatttaatggttcagaaaaggagagacagtaaaggaatttttcttttcaactttgctccggaggaggctgtctggagcccattcctttggcctcgacttttcagtgttataactgtccttgaagtaagctggctaagcagaggaaaacttgttcttgttttctttttaacccttaccccctgccacataatcacatctttacacttcttttttttttttttttttttttttaagatgggaagtcggagtctcgctctgtcgcccaggctggagtgcagtggtgccatctcggctcattgtaacctctgcctcccaggttcaagtgattcaagccattcttgtgcctctgcctcctgagtagctgggattataggcgcacaccaccacacctggcgaatttttttttttttttttttttgaggctgagtctcactctatcgcccaggctggagtgcaatggagcaatctcggctcactgcaacctccgcctcctgggttcaagcgatcctcctgtctcagcttcctgattagctgggattacaggcgccctccaccacacccagttaatttttctatttttagtggagacggtgtttcaccatgttggccaggctggtctcaaactcctgacctcaagtgatccgcccacctcagcttcccaaagtgctgggattacaagcgtgagccaccacgcccagccaggaaacccattttcaacacctccttgctcttttttttttctgagacagagtctcgctctgtcgcccagactggagtgcagtggcgcaatctcggctcactgcaacctccgcctgccaggtcaaacaattctcctgcctcagcctcccaagtaggtgggactacaggcatgtgccaccacacccggctaattttcttttgtatttttagtagagacggggtttcaccatgctggccaggctggtctcgaactcctgacctcgtgatccgcccgcctcggcctcccaaagtgctgggattacaaacgtgagccaccgcgcctggccttccttgctcttcttgctccaaatcctgggaacgtctgaatcaacaggcggacatctgtcaaaccttcctagcaactacgcctgcggatggccaacctgaccctggaagacagtggggtttagttaagcacagattgtacatcgggggcctcataaggcgcctggaagcattcaagaacaccacgcttgtaaggacaaagcactcggtcacgggcgcctttacttcggagctccgcgctgctgctggacgagcgtccgttgagtcccagccccaatttttccaggaaatggcggtgagccctctagtgagatattttttggcctgggcctcagtttctccatctgtcaatgggggaagggtaaggcgggctagaggaccccgaccaggtcggctgcagccttcggaagctacggcccagggacgccacaccaaggcaggtctgcgggacgaaagaacccaagaacccgggcgcgcattggcgccggtcccgggctcaaggggcagcaacgaggagacgctggacctggccgttcctcgcacacatctctaaccttctgtgcctctcaagggagatggggtgagcatagccacctccactggagcccgaaaatccccggccgagataccgccactaaaaaggtacacatgcgtcaaagcctctcggagccatttccgctaacgtactcagggcgacgggcgtaagatggcggccgcgcaggcgcaaaatgtcgcagccgtagggaggctccgcctctgacgcttgccttgcatcacgtggtaatggccgctcaaaaaacgccttagcgaaaaccagagcgtgccctcgtcacgtgatggaggactcccagtacggcaaagggaaggcgccaaaagttgtcagatggcgaaggaaaccgcgaaattcgccattgtcacatgatggagcaacctatcgaaagcggagggaaaggtgccgaagtcacgtgactacgcacgcaaacactcccgcttgcaccacgtgcaactcacgcccaccccctcagccccccccttatctcttttcgcccctccctcccatttgggttgggcctgcgtcgaggcgcaacgcggcgtcaaagggggcggggcttcagccggtcacgtgttcccgcacctccccggcgcgcgcctgcccgcccgcccgctcgcccccggtccggactcctcctcctcctcttctcgccattgcagttggacccagcagcccggcgcgcaccgcgtggcttttgggggcagaccccggcgggctgtggcaggagggcggcggcggcggctgcggtcgaagaaggggacgccgacaagagttgaagtattgataacaccaaggaactctatcacaatttgaaaagataagcaaaagtttgatttccagacactacagaagaagtaaaaatgcgtccaatgcgaatttttgtgaatgatgaccgccatgtgatggcaaagcattcttccgtttatccaacacaagaggagctggaggcagtccagaacatggtgtcccacacggagcgggcgctcaaagctgtgtccgactggatagacgagcaggaaaagggtagcagcgagcaggcagagtccgataacatggatgtgcccccagaggacgacagtaaagaaggggctggggaacagaagacggagcacatgaccagaaccctgcggggagtgatgcgggtgggcctggtggcaaagggcctcctactcaagggggacttggatctggagctggtgctgctgtgtaaggagaagcccacaaccgccctcctggacaaggtggccgacaacctggccatccagcttgctgctgtaacagaagacaagtacgaaatactgcaatctgtcgacgatgctgcgattgtgataaaaaacacaaaagagcctccattgtccctgaccatccacctgacatcccctgttgtcagagaagaaatggagaaagtattagctggagaaacgctatcagtcaacgaccccccggacgttctggacaggcagaaatgccttgctgccttggcgtccctccgacacgccaagtggttccaggccagagccaacgggctgaagtcttgtgtcattgtgatccgggtcttgagggacctgtgcactcgcgtgcccacctggggtcccctccgaggctggcctctcgagctcctgtgtgagaaatccattggcacggccaacagaccgatgggtgctggcgaggccctgcggagagtgctggagtgcctggcgtcgggcatcgtgatgccagatggttctggcatttatgacccttgtgaaaaagaagccactgatgctattgggcatctagacagacagcaacgggaagatatcacacagagtgcgcagcacgcactgcggctcgctgccttcggccagctccataaagtcctaggcatggaccctctgccttccaagatgcccaagaaaccaaagaatgaaaacccagtggactacaccgttcagatcccaccaagcaccacctatgccattacgcccatgaaacgcccaatggaggaggacggggaggagaagtcgcccagcaaaaagaagaagaagattcagaagaaagaggagaaggcagagcccccccaggctatgaatgccctgatgcggttgaaccagctgaagccagggctgcagtacaagctggtgtcccagactgggcccgtccatgcccccatctttaccatgtctgtggaggttgatggcaattcattcgaggcctctgggccctccaaaaagacggccaagctgcacgtggccgttaaggtgttacaggacatgggcttgccgacgggtgctgaaggcagggactcgagcaagggggaggactcggctgaggagaccgaggcgaagccagcagtggtggcccctgccccagtggtagaagctgtctccacccctagtgcggcctttccctcagatgccactgccggaacgcagcaggggccgatcctgacaaagcacggcaagaacccagtcatggagctgaacgagaagaggcgtgggctcaagtacgagctcatctccgagaccgggggcagccacgacaagcgcttcgtcatggaggtcgaagtggatggacagaagttccaaggtgctggttccaacaaaaaggtggcgaaggcctacgctgctcttgctgccctagaaaagcttttccctgacacccctctcgcccttgatgccaacaaaaagaagagagccccagtacccgtcagagggggaccgaaatttgctgctaagccacataaccctggcttcggcatgggaggccccatgcacaacgaagtgcccccaccccccaaccttcgagggcggggaagaggcgggagcatccggggacgagggcgcgggcgaggatttggtggcgccaaccatggaggctacatgaatgccggtgctgggtatggaagctatgggtacggaggcaactctgcgacagcaggctacagtgactttttcacagactgctacggctatcatgattttgggtcttcctagagcgtctaaaagtattgcacacaaaatcaactttttactccaatttcctccaactccaaaacccaaagtgtccgtgctgtgtccctgtgcttcactgggtttctcaaccgtggcttttcaccgcagcttgtctgaaactcttagcctgcagaatttaagacaatggcagtttttatcgtgatttgcctttgaacttggtcctattgaagttcacaataagtggaaaacaattttttcagagaactaatcgagacagctgggatctctag

SEQ ID NO: 377473 - DNA, 4369 bp, Homo sapiens
  misc_feature (4258)..(4258): n is a, c, g, or t
  misc_feature (4283)..(4283): n is a, c, g, or t
  misc_feature (4320)..(4320): n is a, c, g, or t
  misc_feature (4322)..(4323): n is a, c, g, or t
agactttcacgggaaacaggaggatttatttagatgtacaccggctcagtggatttgtatctgaaaagctgaccattgaacaaagactgagtgtggtttttataggcaaacttacagaagcaaaacaaaagcagttaatgatacagtcacaggtcatgtaatctatagcataactgctgacttagcataacttgtggctttgcacagctgttggccttgcagctgtgtcaaaagaaaaacagagtctacaaatcttactaaatacaaccattggcaaacagtcatatttaatggttcagaaaaggagagacagtaaaggaatttttcttttcaactttgctccggaggaggctgtctggagcccattcctttggcctcgacttttcagtgttataactgtccttgaagtaagctggctaagcagaggaaaacttgttcttgttttctttttaacccttaccccctgccacataatcacatctttacacttcttttttttttttttttttttttttaagatgggaagtcggagtctcgctctgtcgcccaggctggagtgcagtggtgccatctcggctcattgtaacctctgcctcccaggttcaagtgattcaagccattcttgtgcctctgcctcctgagtagctgggattataggcgcacaccaccacacctggcgaatttttttttttttttttttttgaggctgagtctcactctatcgcccaggctggagtgcaatggagcaatctcggctcactgcaacctccgcctcctgggttcaagcgatcctcctgtctcagcttcctgattagctgggattacaggcgccctccaccacacccagttaatttttctatttttagtggagacggtgtttcaccatgttggccaggctggtctcaaactcctgacctcaagtgatccgcccacctcagcttcccaaagtgctgggattacaagcgtgagccaccacgcccagccaggaaacccattttcaacacctccttgctcttttttttttctgagacagagtctcgctctgtcgcccagactggagtgcagtggcgcaatctcggctcactgcaacctccgcctgccaggtcaaacaattctcctgcctcagcctcccaagtaggtgggactacaggcatgtgccaccacacccggctaattttcttttgtatttttagtagagacggggtttcaccatgctggccaggctggtctcgaactcctgacctcgtgatccgcccgcctcggcctcccaaagtgctgggattacaaacgtgagccaccgcgcctggccttccttgctcttcttgctccaaatcctgggaacgtctgaatcaacaggcggacatctgtcaaaccttcctagcaactacgcctgcggatggccaacctgaccctggaagacagtggggtttagttaagcacagattgtacatcgggggcctcataaggcgcctggaagcattcaagaacaccacgcttgtaaggacaaagcactcggtcacgggcgcctttacttcggagctccgcgctgctgctggacgagcgtccgttgagtcccagccccaatttttccaggaaatggcggtgagccctctagtgagatattttttggcctgggcctcagtttctccatctgtcaatgggggaagggtaaggcgggctagaggaccccgaccaggtcggctgcagccttcggaagctacggcccagggacgccacaccaaggcaggtctgcgggacgaaagaacccaagaacccgggcgcgcattggcgccggtcccgggctcaaggggcagcaacgaggagacgctggacctggccgttcctcgcacacatctctaaccttctgtgcctctcaagggagatggggtgagcatagccacctccactggagcccgaaaatccccggccgagataccgccactaaaaaggtacacatgcgtcaaagcctctcggagccatttccgctaacgtactcagggcgacgggcgtaagatggcggccgcgcaggcgcaaaatgtcgcagccgtagggaggctccgcctctgacgcttgccttgcatcacgtggtaatggccgctcaaaaaacgccttagcgaaaaccagagcgtgccctcgtcacgtgatggaggactcccagtacggcaaagggaaggcgccaaaagttgtcagatggcgaaggaaaccgcgaaattcgccattgtcacatgatggagcaacctatcgaaagcggagggaaaggtgccgaagtcacgtgactacgcacgcaaacactcccgcttgcaccacgtgcaactcacgcccaccccctcagccccccccttatctcttttcgcccctccctcccatttgggttgggcctgcgtcgaggcgcaacgcggcgtcaaagggggcggggcttcagccggtcacgtgttcccgcacctccccggcgcgcgcctgcccgcccgcccgctcgcccccggtccggactcctcctcctcctcttctcgccattgcagttggacccagcagcccggcgcgcaccgcgtggcttttgggggcagaccccggcgggctgtggcaggagggcggcggcggcggctgcggtcgaagaaggggacgccgacaagagttgaagtattgataacaccaaggaactctatcacaatttgaaaagataagcaaaagtttgatttccagacactacagaagaagtaaaaatgcgtccaatgcgaatttttgtgaatgatgaccgccatgtgatggcaaagcattcttccgtttatccaacacaagaggagctggaggcagtccagaacatggtgtcccacacggagcgggcgctcaaagctgtgtccgactggatagacgagcaggaaaagggtagcagcgagcaggcagagtccgataacatggatgtgcccccagaggacgacagtaaagaaggggctggggaacagaagacggagcacatgaccagaaccctgcggggagtgatgcgggtgggcctggtggcaaagggcctcctactcaagggggacttggatctggagctggtgctgctgtgtaaggagaagcccacaaccgccctcctggacaaggtggccgacaacctggccatccagcttgctgctgtaacagaagacaagtacgaaatactgcaatctgtcgacgatgctgcgattgtgataaaaaacacaaaagagcctccattgtccctgaccatccacctgacatcccctgttgtcagagaagaaatggagaaagtattagctggagaaacgctatcagtcaacgaccccccggacgttctggacaggcagaaatgccttgctgccttggcgtccctccgacacgccaagtggttccaggccagagccaacgggctgaagtcttgtgtcattgtgatccgggtcttgagggacctgtgcactcgcgtgcccacctggggtcccctccgaggctggcctctcgagctcctgtgtgagaaatccattggcacggccaacagaccgatgggtgctggcgaggccctgcggagagtgctggagtgcctggcgtcgggcatcgtgatgccagatggttctggcatttatgacccttgtgaaaaagaagccactgatgctattgggcatctagacagacagcaacgggaagatatcacacagagtgcgcagcacgcactgcggctcgctgccttcggccagctccataaagtcctaggcatggaccctctgccttccaagatgcccaagaaaccaaagaatgaaaacccagtggactacaccgttcagatcccaccaagcaccacctatgccattacgcccatgaaacgcccaatggaggaggacggggaggagaagtcgcccagcaaaaagaagaagaagattcagaagaaaggtacaggccgggcgcggtggctcacgcctgtaatcccagcactttgggaggccgaggcgggagaatcgcttgagctcaggagttttgagaccatcagcctgggcaacatggcgaaaccccgtctctacaaaaaatacaaaaattagctgggtgtggtggcgcacctgtagtgccagctacttgggaggctgagatgggaggatggcttgagcctgggaggcggaggttgcagtgagcaactgtactccagcctgggcaacagagcgagaccttgcttaaaatcagtgttgaaaaattttagaagctaaataggtaaaaaagcaggaaggtgcagacctccactagtgccgcgcactancacatttggctaaattttgtatttnttgtagagatggggtttcgccatgttgcccaggctgntnntcttaagataaatacatctttaaaaaaagaaatagatcactttggt

SEQ ID NO: 377474 - DNA, 3955 bp, Homo sapiens
agactttcacgggaaacaggaggatttatttagatgtacaccggctcagtggatttgtatctgaaaagctgaccattgaacaaagactgagtgtggtttttataggcaaacttacagaagcaaaacaaaagcagttaatgatacagtcacaggtcatgtaatctatagcataactgctgacttagcataacttgtggctttgcacagctgttggccttgcagctgtgtcaaaagaaaaacagagtctacaaatcttactaaatacaaccattggcaaacagtcatatttaatggttcagaaaaggagagacagtaaaggaatttttcttttcaactttgctccggaggaggctgtctggagcccattcctttggcctcgacttttcagtgttataactgtccttgaagtaagctggctaagcagaggaaaacttgttcttgttttctttttaacccttaccccctgccacataatcacatctttacacttcttttttttttttttttttttttttaagatgggaagtcggagtctcgctctgtcgcccaggctggagtgcagtggtgccatctcggctcattgtaacctctgcctcccaggttcaagtgattcaagccattcttgtgcctctgcctcctgagtagctgggattataggcgcacaccaccacacctggcgaatttttttttttttttttttttgaggctgagtctcactctatcgcccaggctggagtgcaatggagcaatctcggctcactgcaacctccgcctcctgggttcaagcgatcctcctgtctcagcttcctgattagctgggattacaggcgccctccaccacacccagttaatttttctatttttagtggagacggtgtttcaccatgttggccaggctggtctcaaactcctgacctcaagtgatccgcccacctcagcttcccaaagtgctgggattacaagcgtgagccaccacgcccagccaggaaacccattttcaacacctccttgctcttttttttttctgagacagagtctcgctctgtcgcccagactggagtgcagtggcgcaatctcggctcactgcaacctccgcctgccaggtcaaacaattctcctgcctcagcctcccaagtaggtgggactacaggcatgtgccaccacacccggctaattttcttttgtatttttagtagagacggggtttcaccatgctggccaggctggtctcgaactcctgacctcgtgatccgcccgcctcggcctcccaaagtgctgggattacaaacgtgagccaccgcgcctggccttccttgctcttcttgctccaaatcctgggaacgtctgaatcaacaggcggacatctgtcaaaccttcctagcaactacgcctgcggatggccaacctgaccctggaagacagtggggtttagttaagcacagattgtacatcgggggcctcataaggcgcctggaagcattcaagaacaccacgcttgtaaggacaaagcactcggtcacgggcgcctttacttcggagctccgcgctgctgctggacgagcgtccgttgagtcccagccccaatttttccaggaaatggcggtgagccctctagtgagatattttttggcctgggcctcagtttctccatctgtcaatgggggaagggtaaggcgggctagaggaccccgaccaggtcggctgcagccttcggaagctacggcccagggacgccacaccaaggcaggtctgcgggacgaaagaacccaagaacccgggcgcgcattggcgccggtcccgggctcaaggggcagcaacgaggagacgctggacctggccgttcctcgcacacatctctaaccttctgtgcctctcaagggagatggggtgagcatagccacctccactggagcccgaaaatccccggccgagataccgccactaaaaaggtacacatgcgtcaaagcctctcggagccatttccgctaacgtactcagggcgacgggcgtaagatggcggccgcgcaggcgcaaaatgtcgcagccgtagggaggctccgcctctgacgcttgccttgcatcacgtggtaatggccgctcaaaaaacgccttagcgaaaaccagagcgtgccctcgtcacgtgatggaggactcccagtacggcaaagggaaggcgccaaaagttgtcagatggcgaaggaaaccgcgaaattcgccattgtcacatgatggagcaacctatcgaaagcggagggaaaggtgccgaagtcacgtgactacgcacgcaaacactcccgcttgcaccacgtgcaactcacgcccaccccctcagccccccccttatctcttttcgcccctccctcccatttgggttgggcctgcgtcgaggcgcaacgcggcgtcaaagggggcggggcttcagccggtcacgtgttcccgcacctccccggcgcgcgcctgcccgcccgcccgctcgcccccggtccggactcctcctcctcctcttctcgccattgcagttggacccagcagcccggcgcgcaccgcgtggcttttgggggcagaccccggcgggctgtggcaggagggcggcggcggcggctgcggtcgaagaaggggacgccgacaagagttgaagtattgataacaccaaggaactctatcacaatttgaaaagataagcaaaagtttgatttccagacactacagaagaagtaaaaatgcgtccaatgcgaatttttgtgaatgatgaccgccatgtgatggcaaagcattcttccgtttatccaacacaagaggagctggaggcagtccagaacatggtgtcccacacggagcgggcgctcaaagctgtgtccgactggatagacgagcaggaaaagggtagcagcgagcaggcagagtccgataacatggatgtgcccccagaggacgacagtaaagaaggggctggggaacagaagacggagcacatgaccagaaccctgcggggagtgatgcgggtgggcctggtggcaaagggcctcctactcaagggggacttggatctggagctggtgctgctgtgtaaggagaagcccacaaccgccctcctggacaaggtggccgacaacctggccatccagcttgctgctgtaacagaagacaagtacgaaatactgcaatctgtcgacgatgctgcgattgtgataaaaaacacaaaagagcctccattgtccctgaccatccacctgacatcccctgttgtcagagaagaaatggagaaagtattagctggagaaacgctatcagtcaacgaccccccggacgttctggacaggcagaaatgccttgctgccttggcgtccctccgacacgccaagtggttccaggccagagccaacgggctgaagtcttgtgtcattgtgatccgggtcttgagggacctgtgcactcgcgtgcccacctggggtcccctccgaggctggcctctcgagctcctgtgtgagaaatccattggcacggccaacagaccgatgggtgctggcgaggccctgcggagagtgctggagtgcctggcgtcgggcatcgtgatgccagatggttctggcatttatgacccttgtgaaaaagaagccactgatgctattgggcatctagacagacagcaacgggaagatatcacacagagtgcgcagcacgcactgcggctcgctgccttcggccagctccataaagtcctaggcatggaccctctgccttccaagatgcccaagaaaccaaagaatgaaaacccagtggactacaccgttcagatcccaccaagcaccacctatgccattacgcccatgaaacgcccaatggaggaggacggggaggagaagtcgcccagcaaaaagaagaagaagattcagaagaaagaggaagaagaggaaagaagaaaagaagaggaaagaagaaaagaataaggaagaag

SEQ ID NO: 377475 - DNA, 2412 bp, Homo sapiens
gagctggaactgggcacacgccatgcccaagaaaccaaagaatgaaaacccagtggactacaccgttcagatcccaccaagcaccacctatgccattacgcccatgaaacgcccaatggaggaggacggggaggagaagtcgcccagcaaaaagaagaagaagattcagaagaaagaggagaaggcagagcccccccaggctatgaatgccctgatgcggttgaaccagctgaagccagggctgcagtacaagctggtgtcccagactgggcccgtccatgcccccatctttaccatgtctgtggaggttgatggcaattcattcgaggcctctgggccctccaaaaagacggccaagctgcacgtggccgttaaggtgttacaggacatgggcttgccgacgggtgctgaaggcagggactcgagcaagggggaggactcggctgaggagaccgaggcgaagccagcagtggtggcccctgccccagtggtagaagctgtctccacccctagtgcggcctttccctcagatgccactgccggaacgcagcaggggccgatcctgacaaagcacggcaagaacccagtcatggagctgaacgagaagaggcgtgggctcaagtacgagctcatctccgagaccgggggcagccacgacaagcgcttcgtcatggaggtcgaagtggatggacagaagttccaaggtgctggttccaacaaaaaggtggcgaaggcctacgctgctcttgctgccctagaaaagcttttccctgacacccctctcgcccttgatgccaacaaaaagaagagagccccagtacccgtcagagggggaccgaaatttgctgctaagccacataaccctggcttcggcatgggaggccccatgcacaacgaagtgcccccaccccccaaccttcgagggcggggaagaggcgggagcatccggggacgagggcgcgggcgaggatttggtggcgccaaccatggaggctacatgaatgccggtgctgggtatggaagctatgggtacggaggcaactctgcgacagcaggctacagtgactttttcacagactgctacggctatcatgattttgggtcttcctagagcgtctaaaagtattgcacacaaaatcaactttttactccaatttcctccaactccaaaacccaaagtgtccgtgctgtgtccctgtgcttcactgggtttctcaaccgtggcttttcaccgcagcttgtctgaaactcttagcctgcagaatttaagacaatggcagtttttatcgtgatttgcctttgaacttggtcctattgaagttcacaataagtggaaaacaattttttcagagaatgtatttttgtgcagaattgcacagaattctagagacagcgttgttcggcatcaaggcaaaagcccacctttgctttttatggaaagcattactttatttaaagagacagacaatgacgcattttaatctacctttgtcttaatttacagcaggttttgtatgaatttttaaccttttaacaaactcccaaatctggttgatgcctttgacagtgatgaaaacgatttcaccacatctgaatccagagaaaccggctttttttcttattgcgagcatgttaaaacgttgggaacatgtggggaattgtatattgcgctgaattaacttctcccgcctcttgtaatgctctggtgggttcttgtttgggaatgcgatattttgtggctggtttagctagagagtgaactctcaaaggtatcaaaactgtgcttccattattagtgcaagaaacagacaggctttaaggggtagatgacgtgaaattttgcaagtcttaattacagctgcagatgcatgggattctggatttttttgttgctttttagtttaatgggactttaaaagtaattgaggagaaagaaccgtgatgttccctgtttctccagtaaaggactggcttttgcttgggcagaggtggtgctgctgggtgtgcagctgccacagactccaaaggcgtagaagtttgtgccaacacacggagtcattctggctctctgctgaggcccctgttttctggcaggtgccctccttggaaactggttttggctctgatcagcggttctttttgcagcaaagcctgcatctgtgttgacttgcaagattttgcgtttattcaggcaaaaactggtcaaaatggttactacatgatttgttcccagaggtttgaaacattcagtgaaactttttaaaactttgattgcatgatgtattttttttttagaaagttattgtttgagaataatgtctttttataccaggaaaatagttatcctgaatgacgttgaaaactccccctcccctttatttttttttaatcaatacatgtgaaagtaacaag

SEQ ID NO: 377476 - DNA, 4037 bp, Homo sapiens
agactttcacgggaaacaggaggatttatttagatgtacaccggctcagtggatttgtatctgaaaagctgaccattgaacaaagactgagtgtggtttttataggcaaacttacagaagcaaaacaaaagcagttaatgatacagtcacaggtcatgtaatctatagcataactgctgacttagcataacttgtggctttgcacagctgttggccttgcagctgtgtcaaaagaaaaacagagtctacaaatcttactaaatacaaccattggcaaacagtcatatttaatggttcagaaaaggagagacagtaaaggaatttttcttttcaactttgctccggaggaggctgtctggagcccattcctttggcctcgacttttcagtgttataactgtccttgaagtaagctggctaagcagaggaaaacttgttcttgttttctttttaacccttaccccctgccacataatcacatctttacacttcttttttttttttttttttttttttaagatgggaagtcggagtctcgctctgtcgcccaggctggagtgcagtggtgccatctcggctcattgtaacctctgcctcccaggttcaagtgattcaagccattcttgtgcctctgcctcctgagtagctgggattataggcgcacaccaccacacctggcgaatttttttttttttttttttttgaggctgagtctcactctatcgcccaggctggagtgcaatggagcaatctcggctcactgcaacctccgcctcctgggttcaagcgatcctcctgtctcagcttcctgattagctgggattacaggcgccctccaccacacccagttaatttttctatttttagtggagacggtgtttcaccatgttggccaggctggtctcaaactcctgacctcaagtgatccgcccacctcagcttcccaaagtgctgggattacaagcgtgagccaccacgcccagccaggaaacccattttcaacacctccttgctcttttttttttctgagacagagtctcgctctgtcgcccagactggagtgcagtggcgcaatctcggctcactgcaacctccgcctgccaggtcaaacaattctcctgcctcagcctcccaagtaggtgggactacaggcatgtgccaccacacccggctaattttcttttgtatttttagtagagacggggtttcaccatgctggccaggctggtctcgaactcctgacctcgtgatccgcccgcctcggcctcccaaagtgctgggattacaaacgtgagccaccgcgcctggccttccttgctcttcttgctccaaatcctgggaacgtctgaatcaacaggcggacatctgtcaaaccttcctagcaactacgcctgcggatggccaacctgaccctggaagacagtggggtttagttaagcacagattgtacatcgggggcctcataaggcgcctggaagcattcaagaacaccacgcttgtaaggacaaagcactcggtcacgggcgcctttacttcggagctccgcgctgctgctggacgagcgtccgttgagtcccagccccaatttttccaggaaatggcggtgagccctctagtgagatattttttggcctgggcctcagtttctccatctgtcaatgggggaagggtaaggcgggctagaggaccccgaccaggtcggctgcagccttcggaagctacggcccagggacgccacaccaaggcaggtctgcgggacgaaagaacccaagaacccgggcgcgcattggcgccggtcccgggctcaaggggcagcaacgaggagacgctggacctggccgttcctcgcacacatctctaaccttctgtgcctctcaagggagatggggtgagcatagccacctccactggagcccgaaaatccccggccgagataccgccactaaaaaggtacacatgcgtcaaagcctctcggagccatttccgctaacgtactcagggcgacgggcgtaagatggcggccgcgcaggcgcaaaatgtcgcagccgtagggaggctccgcctctgacgcttgccttgcatcacgtggtaatggccgctcaaaaaacgccttagcgaaaaccagagcgtgccctcgtcacgtgatggaggactcccagtacggcaaagggaaggcgccaaaagttgtcagatggcgaaggaaaccgcgaaattcgccattgtcacatgatggagcaacctatcgaaagcggagggaaaggtgccgaagtcacgtgactacgcacgcaaacactcccgcttgcaccacgtgcaactcacgcccaccccctcagccccccccttatctcttttcgcccctccctcccatttgggttgggcctgcgtcgaggcgcaacgcggcgtcaaagggggcggggcttcagccggtcacgtgttcccgcacctccccggcgcgcgcctgcccgcccgcccgctcgcccccggtccggactcctcctcctcctcttctcgccattgcagttggacccagcagcccggcgcgcaccgcgtggcttttgggggcagaccccggcgggctgtggcaggagggcggcggcggcggctgcggtcgaagaaggggacgccgacaagagttgaagtattgataacaccaaggaactctatcacaatttgaaaagataagcaaaagtttgatttccagacactacagaagaagtaaaaatgcgtccaatgcgaatttttgtgaatgatgaccgccatgtgatggcaaagcattcttccgtttatccaacacaagaggagctggaggcagtccagaacatggtgtcccacacggagcgggcgctcaaagctgtgtccgactggatagacgagcaggaaaagggtagcagcgagcaggcagagtccgataacatggatgtgcccccagaggacgacagtaaagaaggggctggggaacagaagacggagcacatgaccagaaccctgcggggagtgatgcgggtgggcctggtggcaaagggcctcctactcaagggggacttggatctggagctggtgctgctgtgtaaggagaagcccacaaccgccctcctggacaaggtggccgacaacctggccatccagcttgctgctgtaacagaagacaagtacgaaatactgcaatctgtcgacgatgctgcgattgtgataaaaaacacaaaagagcctccattgtccctgaccatccacctgacatcccctgttgtcagagaagaaatggagaaagtattagctggagaaacgctatcagtcaacgaccccccggacgttctggacaggcagaaatgccttgctgccttggcgtccctccgacacgccaagtggttccaggccagagccaacgggctgaagtcttgtgtcattgtgatccgggtcttgagggacctgtgcactcgcgtgcccacctggggtcccctccgaggctggcctctcgagctcctgtgtgagaaatccattggcacggccaacagaccgatgggtgctggcgaggccctgcggagagtgctggagtgcctggcgtcgggcatcgtgatgccagatggttctggcatttatgacccttgtgaaaaagaagccactgatgctattgggcatctagacagacagcaacgggaagatatcacacagagtgcgcagcacgcactgcggctcgctgccttcggccagctccataaagtcctaggcatggaccctctgccttccaagatgcccaagaaaccaaagaatgaaaacccagtggactacaccgttcagatcccaccaagcaccacctatgccattacgcccatgaaacgcccaatggaggaggacggggaggagaaggaggaggaccaccagaaaagagtctcatcgtggaaggcagagggaccaagaacaacagtagagaggttgaccatgccagtctcttccttacagagaagagccatttacaattgcacaaggaaggggccgacactttgtgaactgagaggatacctttttctaggtagaagaacc

SEQ ID NO: 377477 - DNA, 1593 bp, Homo sapiens
tgtaacggagaggggacggaaaaacgtagctgagccacataaccctggcttcggcatgggaggccccatgcacaacgaagtgcccccaccccccaaccttcgagggcggggaagaggcgggagcatccggggacgagggcgcgggcgaggatttggtggcgccaaccatggaggctacatgaatgccggtgctgggtatggaagctatgggtacggaggcaactctgcgacagcaggctacagtgactttttcacagactgctacggctatcatgattttgggtcttcctagagcgtctaaaagtattgcacacaaaatcaactttttactccaatttcctccaactccaaaacccaaagtgtccgtgctgtgtccctgtgcttcactgggtttctcaaccgtggcttttcaccgcagcttgtctgaaactcttagcctgcagaatttaagacaatggcagtttttatcgtgatttgcctttgaacttggtcctattgaagttcacaataagtggaaaacaattttttcagagaatgtatttttgtgcagaattgcacagaattctagagacagcgttgttcggcatcaaggcaaaagcccacctttgctttttatggaaagcattactttatttaaagagacagacaatgacgcattttaatctacctttgtcttaatttacagcaggttttgtatgaatttttaaccttttaacaaactcccaaatctggttgatgcctttgacagtgatgaaaacgatttcaccacatctgaatccagagaaaccggctttttttcttattgcgagcatgttaaaacgttgggaacatgtggggaattgtatattgcgctgaattaacttctcccgcctcttgtaatgctctggtgggttcttgtttgggaatgcgatattttgtggctggtttagctagagagtgaactctcaaaggtatcaaaactgtgcttccattattagtgcaagaaacagacaggctttaaggggtagatgacgtgaaattttgcaagtcttaattacagctgcagatgcatgggattctggatttttttgttgctttttagtttaatgggactttaaaagtaattgaggagaaagaaccgtgatgttccctgtttctccagtaaaggactggcttttgcttgggcagaggtggtgctgctgggtgtgcagctgccacagactccaaaggcgtagaagtttgtgccaacacacggagtcattctggctctctgctgaggcccctgttttctggcaggtgccctccttggaaactggttttggctctgatcagcggttctttttgcagcaaagcctgcatctgtgttgacttgcaagattttgcgtttattcaggcaaaaactggtcaaaatggttactacatgatttgttcccagaggtttgaaacattcagtgaaactttttaaaactttgattgcatgatgtattttttttttagaaagttattgtttgagaataatgtctttttataccaggaaaatagttatcctgaatgacgttgaaaactccccctcccctttatttttttttaatcaatacatgtgaaagtaacaag

SEQ ID NO: 377478 - DNA, 1664 bp, Homo sapiens
gcgtgaaccgcggctgggggggaagcttgaaaacgacggaagaagggcgttgagcggctcaagtacgagctcatctccgagaccgggggcagccacgacaagcgcttcgtcatggaggtcgaagtggatggacagaagttccaaggtgctggttccaacaaaaaggtggcgaaggcctacgctgctcttgctgccctagaaaagcttttccctgacacccctctcgcccttgatgccaacaaaaagaagagagccccagtacccgtcagagggggaccgaaatttgctgctaagccacataaccctggcttcggcatgggaggccccatgcacaacgaagtgcccccaccccccaaccttcgagggcggggaagaggcgggagcatccggggacgagggcgcgggcgaggatttggtggcgccaaccatggaggctacatgaatgccggtgctgggtatggaagctatgggtacggaggcaactctgcgacagcaggctacagtcagttctacagcaacggagggcattctgggaatgccagtggcggtggcggcgggggcggtggtggctcctccggctatggctcctactaccaaggtgacaactacaactcaccggtgcccccaaaacacgctgggaagaagcagccgcacgggggccagcagaagccctcctacggctcgggctaccagtcccaccagggccagcagcagtcctacaaccagagcccctacagcaactatggccctccacagggcaagcagaaaggctataaccatggacaaggcagctactcctactcgaactcctacaactctcccgggggcgggggcggatccgactacaactacgagagcaaattcaactacagtggtagtggaggccgaagcggcgggaacagctacggctcaggcggggcatcctacaacccagggtcacacgggggctacggcggaggttctgggggcggctcctcataccaaggcaaacaaggaggctactcacagtcgaactacaactccccggggtccggccagaactacagtggccctcccagctcctaccagtcctcacaaggcggctatggcagaaacgcagaccacagcatgaactaccagtacagataagcccccgcggggcggagatttctaccttctgcacttactccccatcagaagatcgagttttatgcatcacagttaacatgtcagctggccctccaggcccccgcccccatcccgtccacgttgctgtgtcgtgaggtgcagcgggtcaccctgtggcccgtcctgtgacccatatttagccgtgtttgggactccgtgtcttcaatggtttgttagttgccattacaactttgtctgggtagagtttttgagtttttgcagttcagtatccctctgtctattcacacttcgtgttagtggtaactcagtttgtctttaaatagttacagaagggatacgtcatttgttaatgcttttgtgaagtgagttaaacgagctttctgtattttaatgctttagtgtttcagttttataagtgaagattttattttaaaaaccagtgggaaagagtggggggtttctttttatgtctgggtcattcaggcagtacatctgaattaagctgaatgtagacaaataaagaaaaacaaaactgc

SEQ ID NO: 377479 - DNA, 323 bp, Homo sapiens
attcctatcagtgtcaggttcaagtcaagggtttttcttgtcaacactatgtaacattattatggaagtgttggtgacagttattaaacaagaaaatgaattaatggaattattgagggctatagagtgctaaagagcactctgtagtgtgctaaacagcacagctccttagcttggctataaaaacctttttagccttatctttcatcgtaccaccaccaccatcagctgggactaggtgtcatggtatcagtttctctcaaagcagtggttttcagacatggatggtgtatgtattaatattacttttaaagaaaaaaaat

SEQ ID NO: 377480 - DNA, 1933 bp, Homo sapiens
acctcgcgtacggtggctggcgaggctcagtacggtgtgtggagctggagcaccgtgaggaagaagcgaggttctttttaagagttcagctgcgaggctgtaacagaggaggaaatgattttgaatagcctctctctgtgttaccataataagctaatcctggccccaatggttcgggtagggactcttccaatgaggctgctggccctggattatggagcggacattgtttactgtgaggagctgatcgacctcaagatgattcagtgcaagagagttgttaatgaggtgctcagcacagtggactttgtcgcccctgatgatcgagttgtcttccgcacctgtgaaagagagcagaacagggtggtcttccagatggggacttcagacgcagagcgagcccttgctgtggccaggcttgtagaaaatgatgtggctggtattgatgtcaacatgggctgtccaaaacaatattccaccaagggaggaatgggagctgccctgctgtcagaccctgacaagattgagaagatcctcagcactcttgttaaagggacacgcagacctgtgacctgcaagattcgcatcctgccatcgctagaagataccctgagccttgtgaagcggatagagaggactggcattgctgccatcgcagttcatgggaggaagcgggaggagcgacctcagcatcctgtcagctgtgaagtcatcaaagccattgctgataccctctccattcctgtcatagccaacggaggatctcatgaccacatccaacagtattcggacatagaggactttcgacaagccacggcagcctcttccgtgatggtggcccgagcagccatgtggaacccatctatcttcctcaaggagggtctgcggcccctggaggaggtcatgcagaaatacatcagatacgcggtgcagtatgacaaccactacaccaacaccaagtactgcttgtgccagatgctacgagaacagctggagtcgccccagggaaggttgctccatgctgcccagtcttcccgggaaatttgtgaggcctttggccttggtgccttctatgaggagaccacacaggagctggatgcccagcaggccaggctctcagccaagacttcagagcagacaggggagccagctgaagatacctctggtgtcattaagatggctgtcaagtttgaccggagagcatacccagcccagatcacccctaagatgtgcctactagagtggtgccggagggagaagttggcacagcctgtgtatgaaacggttcaacgccctctagatcgcctgttctcctctattgtcaccgttgctgaacaaaagtatcagtctaccttgtgggacaagtccaagaaactggcggagcaggctgcagccatcgtctgtctgcggagccagggcctccctgagggtcggctgggtgaggagagcccttccttgcacaagcgaaagagggaggctcctgaccaagaccctgggggccccagagctcaggagctagcacaacctggggatctgtgcaagaagccctttgtggccttgggaagtggtgaagaaagccccctggaaggctggtgactactcttcctgccttagtcacccctccatgggcctggtgctaaggtggctgtggatgccacagcatgaaccagatgccgttgaacagtttgctggtcttgcctggcagaagttagatgtcctggcaggggccatcagcctagagcatggaccaggggccgcccaggggtggatcctggcccctttggtggatctgagtgacagggtcaagttctctttgaaaacaggagcttttcaggtggtaactccccaacctgacattggtactgtgcaataaagacaccccctaccctcacccacggctggctgcttcagccttgggcatcttcataaatgg

SEQ ID NO: 377481 - DNA, 837 bp, Homo sapiens
acctcgcgtacggtggctggcgaggctcagtacggtgtgtggagctggagcaccgtgaggaagaagcgaggttctttttaagagttcagctgcgagatatcaaacaaagaattactctgtacaaagccagaacacatatatcaaagtaatcctgaagtatcagaacaaaataatagatgagtctcgctctgtcaccaggctggaatgcagtggcgtgatctctcactgcaacctctgcctcccgggttcaagcgattctcctgcctcagcttcctgagtagctgcgactacaggcatgcgccgccacacccagctaatttttgtatttttagtagagacggggtttcaccatgttggccaggatggtcttgatctctttacctcgtgatccgcctgccttggcctcccaaagtgctaggattacaggcatgagccactgtgtctggccatgaactctgtttctaagcaacttatataaatctctccctttctgccaataaaagcttccttttccccttctgtcaccagatgtacttgtggcttgcccttctgtgcatcctggattataatccttttctctcattctcaaataaactcaacatgtttggaggtaaacacacccccaccaacccaaacccacacaccccacccccacaccccccctccccacatccaccccacccacacaacgaaacaaactcttgggggcggcgctcggtacccctgaaaagatctttgacaccacttctgtgggcgggaggacggcgcaccagatcgttcacacaccagcgtccctcacaaggttcacagagggcatcgcgccccacacatgtcgtc

SEQ ID NO: 377482 - DNA, 2013 bp, Homo sapiens
acctcgcgtacggtggctggcgaggctcagtacggtgtgtggagctggagcaccgtgaggaagaagcgaggttctttttaagagttcagctgcgagatatcaaacaaagaattactctgtacaaagccagaacacatatatcaaagtaatcctgaagtatcagaacaaaataataggctgtaacagaggaggaaatgattttgaatagcctctctctgtgttaccataataagctaatcctggccccaatggttcgggtagggactcttccaatgaggctgctggccctggattatggagcggacattgtttactgtgaggagctgatcgacctcaagatgattcagtgcaagagagttgttaatgaggtgctcagcacagtggactttgtcgcccctgatgatcgagttgtcttccgcacctgtgaaagagagcagaacagggtggtcttccagatggggacttcagacgcagagcgagcccttgctgtggccaggcttgtagaaaatgatgtggctggtattgatgtcaacatgggctgtccaaaacaatattccaccaagggaggaatgggagctgccctgctgtcagaccctgacaagattgagaagatcctcagcactcttgttaaagggacacgcagacctgtgacctgcaagattcgcatcctgccatcgctagaagataccctgagccttgtgaagcggatagagaggactggcattgctgccatcgcagttcatgggaggaagcgggaggagcgacctcagcatcctgtcagctgtgaagtcatcaaagccattgctgataccctctccattcctgtcatagccaacggaggatctcatgaccacatccaacagtattcggacatagaggactttcgacaagccacggcagcctcttccgtgatggtggcccgagcagccatgtggaacccatctatcttcctcaaggagggtctgcggcccctggaggaggtcatgcagaaatacatcagatacgcggtgcagtatgacaaccactacaccaacaccaagtactgcttgtgccagatgctacgagaacagctggagtcgccccagggaaggttgctccatgctgcccagtcttcccgggaaatttgtgaggcctttggccttggtgccttctatgaggagaccacacaggagctggatgcccagcaggccaggctctcagccaagacttcagagcagacaggggagccagctgaagatacctctggtgtcattaagatggctgtcaagtttgaccggagagcatacccagcccagatcacccctaagatgtgcctactagagtggtgccggagggagaagttggcacagcctgtgtatgaaacggttcaacgccctctagatcgcctgttctcctctattgtcaccgttgctgaacaaaagtatcagtctaccttgtgggacaagtccaagaaactggcggagcaggctgcagccatcgtctgtctgcggagccagggcctccctgagggtcggctgggtgaggagagcccttccttgcacaagcgaaagagggaggctcctgaccaagaccctgggggccccagagctcaggagctagcacaacctggggatctgtgcaagaagccctttgtggccttgggaagtggtgaagaaagccccctggaaggctggtgactactcttcctgccttagtcacccctccatgggcctggtgctaaggtggctgtggatgccacagcatgaaccagatgccgttgaacagtttgctggtcttgcctggcagaagttagatgtcctggcaggggccatcagcctagagcatggaccaggggccgcccaggggtggatcctggcccctttggtggatctgagtgacagggtcaagttctctttgaaaacaggagcttttcaggtggtaactccccaacctgacattggtactgtgcaataaagacaccccctaccctcacccacggctggctgcttcagccttgggcatcttcataaatgg

SEQ ID NO: 377483 - DNA, 2170 bp, Homo sapiens
acctcgcgtacggtggctggcgaggctcagtacggtgtgtggagctggagcaccgtgaggaagaagcgaggttctttttaagagttcagctgcgagccaaggttcactctctactccctcgtcacgcgtcccaacttctcatccagaacccacccctcttgcagcccgctcagctccactggcttccccgtcagaaacctgaattacctaaaatagtagtaagaagggtgctgcgaccctacaaagtgatcaaatatcaaacaaagaattactctgtacaaagccagaacacatatatcaaagtaatcctgaagtatcagaacaaaataataggctgtaacagaggaggaaatgattttgaatagcctctctctgtgttaccataataagctaatcctggccccaatggttcgggtagggactcttccaatgaggctgctggccctggattatggagcggacattgtttactgtgaggagctgatcgacctcaagatgattcagtgcaagagagttgttaatgaggtgctcagcacagtggactttgtcgcccctgatgatcgagttgtcttccgcacctgtgaaagagagcagaacagggtggtcttccagatggggacttcagacgcagagcgagcccttgctgtggccaggcttgtagaaaatgatgtggctggtattgatgtcaacatgggctgtccaaaacaatattccaccaagggaggaatgggagctgccctgctgtcagaccctgacaagattgagaagatcctcagcactcttgttaaagggacacgcagacctgtgacctgcaagattcgcatcctgccatcgctagaagataccctgagccttgtgaagcggatagagaggactggcattgctgccatcgcagttcatgggaggaagcgggaggagcgacctcagcatcctgtcagctgtgaagtcatcaaagccattgctgataccctctccattcctgtcatagccaacggaggatctcatgaccacatccaacagtattcggacatagaggactttcgacaagccacggcagcctcttccgtgatggtggcccgagcagccatgtggaacccatctatcttcctcaaggagggtctgcggcccctggaggaggtcatgcagaaatacatcagatacgcggtgcagtatgacaaccactacaccaacaccaagtactgcttgtgccagatgctacgagaacagctggagtcgccccagggaaggttgctccatgctgcccagtcttcccgggaaatttgtgaggcctttggccttggtgccttctatgaggagaccacacaggagctggatgcccagcaggccaggctctcagccaagacttcagagcagacaggggagccagctgaagatacctctggtgtcattaagatggctgtcaagtttgaccggagagcatacccagcccagatcacccctaagatgtgcctactagagtggtgccggagggagaagttggcacagcctgtgtatgaaacggttcaacgccctctagatcgcctgttctcctctattgtcaccgttgctgaacaaaagtatcagtctaccttgtgggacaagtccaagaaactggcggagcaggctgcagccatcgtctgtctgcggagccagggcctccctgagggtcggctgggtgaggagagcccttccttgcacaagcgaaagagggaggctcctgaccaagaccctgggggccccagagctcaggagctagcacaacctggggatctgtgcaagaagccctttgtggccttgggaagtggtgaagaaagccccctggaaggctggtgactactcttcctgccttagtcacccctccatgggcctggtgctaaggtggctgtggatgccacagcatgaaccagatgccgttgaacagtttgctggtcttgcctggcagaagttagatgtcctggcaggggccatcagcctagagcatggaccaggggccgcccaggggtggatcctggcccctttggtggatctgagtgacagggtcaagttctctttgaaaacaggagcttttcaggtggtaactccccaacctgacattggtactgtgcaataaagacaccccctaccctcacccacggctggctgcttcagccttgggcatcttcataaatgg

SEQ ID NO: 377484 - DNA, 1930 bp, Homo sapiens
gctggaaccttgaagaagggaagcctgctcttgataacaggagagattttcttcatttgaatttctgactcttgtttcctctttttttttcaggctgtaacagaggaggaaatgattttgaatagcctctctctgtgttaccataataagctaatcctggccccaatggttcgggtagggactcttccaatgaggctgctggccctggattatggagcggacattgtttactgtgaggagctgatcgacctcaagatgattcagtgcaagagagttgttaatgaggtgctcagcacagtggactttgtcgcccctgatgatcgagttgtcttccgcacctgtgaaagagagcagaacagggtggtcttccagatggggacttcagacgcagagcgagcccttgctgtggccaggcttgtagaaaatgatgtggctggtattgatgtcaacatgggctgtccaaaacaatattccaccaagggaggaatgggagctgccctgctgtcagaccctgacaagattgagaagatcctcagcactcttgttaaagggacacgcagacctgtgacctgcaagattcgcatcctgccatcgctagaagataccctgagccttgtgaagcggatagagaggactggcattgctgccatcgcagttcatgggaggaagcgggaggagcgacctcagcatcctgtcagctgtgaagtcatcaaagccattgctgataccctctccattcctgtcatagccaacggaggatctcatgaccacatccaacagtattcggacatagaggactttcgacaagccacggcagcctcttccgtgatggtggcccgagcagccatgtggaacccatctatcttcctcaaggagggtctgcggcccctggaggaggtcatgcagaaatacatcagatacgcggtgcagtatgacaaccactacaccaacaccaagtactgcttgtgccagatgctacgagaacagctggagtcgccccagggaaggttgctccatgctgcccagtcttcccgggaaatttgtgaggcctttggccttggtgccttctatgaggagaccacacaggagctggatgcccagcaggccaggctctcagccaagacttcagagcagacaggggagccagctgaagatacctctggtgtcattaagatggctgtcaagtttgaccggagagcatacccagcccagatcacccctaagatgtgcctactagagtggtgccggagggagaagttggcacagcctgtgtatgaaacggttcaacgccctctagatcgcctgttctcctctattgtcaccgttgctgaacaaaagtatcagtctaccttgtgggacaagtccaagaaactggcggagcaggctgcagccatcgtctgtctgcggagccagggcctccctgagggtcggctgggtgaggagagcccttccttgcacaagcgaaagagggaggctcctgaccaagaccctgggggccccagagctcaggagctagcacaacctggggatctgtgcaagaagccctttgtggccttgggaagtggtgaagaaagccccctggaaggctggtgactactcttcctgccttagtcacccctccatgggcctggtgctaaggtggctgtggatgccacagcatgaaccagatgccgttgaacagtttgctggtcttgcctggcagaagttagatgtcctggcaggggccatcagcctagagcatggaccaggggccgcccaggggtggatcctggcccctttggtggatctgagtgacagggtcaagttctctttgaaaacaggagcttttcaggtggtaactccccaacctgacattggtactgtgcaataaagacaccccctaccctcacccacggctggctgcttcagccttgggcatcttcataaatgg

SEQ ID NO: 377485 - DNA, 1144 bp, Homo sapiens
caagtcagcagctccccagtatctgaaggatcaagccagcacctcagcatagagcctgagacccttccatgtgcctcgctccttccagtttcatccctgcagccctttgctccagccaagtcacctggtccctctgccacgtgtgccttctctgctcctagcttgtcccttctcacccttttggcatctggtgactcctcattttggggacctgggcctatccagatgtcagcaggaggctccatagtcatgtgcagctaagggctctgctgcgctttgctttaggtctgtgacagctccagacacttgaggtcattgtgtatttgtgcctttctccactgggcacttttgcttgggaggagcatgtgatacaggcagccttcatttgacttaggttggaaacacttccttttatctgcctttgatttgaccccagcagtttggcctacagggctcatttctctggccatgtgattccttttctctttgtatcaggttcaacgccctctagatcgcctgttctcctctattgtcaccgttgctgaacaaaagtatcagtctaccttgtgggacaagtccaagaaactggcggagcaggctgcagccatcgtctgtctgcggagccagggcctccctgagggtcggctgggtgaggagagcccttccttgcacaagcgaaagagggaggctcctgaccaagaccctgggggccccagagctcaggagctagcacaacctggggatctgtgcaagaagccctttgtggccttgggaagtggtgaagaaagccccctggaaggctggtgactactcttcctgccttagtcacccctccatgggcctggtgctaaggtggctgtggatgccacagcatgaaccagatgccgttgaacagtttgctggtcttgcctggcagaagttagatgtcctggcaggggccatcagcctagagcatggaccaggggccgcccaggggtggatcctggcccctttggtggatctgagtgacagggtcaagttctctttgaaaacaggagcttttcaggtggtaactccccaacctgacattggtactgtgcaataaagacaccccctaccctcacccacggctggctgcttcagccttgggcatcttcataaatgg

SEQ ID NO: 377486 - DNA, 1271 bp, Homo sapiens
acctcgcgtacggtggctggcgaggctcagtacggtgtgtggagctggagcaccgtgaggaagaagcgaggttctttttaagagttcagctgcgagatatcaaacaaagaattactctgtacaaagccagaacacatatatcaaagtaatcctgaagtatcagaacaaaataatagggccttgctctgtcacccaggctggagtacagttgcacaatcatggctcactgctgcatcgaactcttggactcccaatgattcttctgcttaagcctcccagagtggctgggactgcaggcaccttccatcactcctggctagttaaaaaatatatatatatttttggtagagatgggatcttgctatgttgcccaggctggtcccaaactcctggccttgagtgatcctcctgccttggcctcccaaagtgatgggattacaggtgtgagccaccttgcctggcatagacattttttaggactattgtaattcagataaaatgctctggaaagaatacttgcccagtaatggcatctccaccagtgaactgaagacaactctggctttgatcctctaggaaactcatgaactcttttttttcttttttggagatgagtctcgctctgtcaccaggctggaatgcagtggcgtgatctctcactgcaacctctgcctcccgggttcaagcgattctcctgcctcagcttcctgagtagctgcgactacaggcatgcgccgccacacccagctaatttttgtatttttagtagagacggggtttcaccatgttggccaggatggtcttgatctctttacctcgtgatccgcctgccttggcctcccaaagtgctaggattacaggcatgagccactgtgtctggccatgaactctgtttctaagcaacttatataaatctctccctttctgccaataaaagcttccttttccccttctgtcaccagatgtacttgtggcttgcccttctgtgcatcctggattataatccttttctctcattctcaaataaactcaacatgtttggaggtaaacacacccccaccaacccaaacccacacaccccacccccacaccccccctccccacatccaccccacccacacaacgaaacaaactcttgggggcggcgctcggtacccctgaaaagatctttgacaccacttctgtgggcgggaggacggcgcaccagatcgttcacacaccagcgtccctcacaaggttcacagagggcatcgcgccccacacatgtcgtc

SEQ ID NO: 377487 - DNA, 402 bp, Homo sapiens
accatgagggcggagggcttctggcgattggttacctggttcctgggattctctttagttgttcctcattgccctgagatagcttgtcccgtgctggtatccgaggttgcagctgttttcccagatgtgttccctgcgcagggtctggtaatccgtgtttattgagagtttgaatgaatgatcaggcctaggggccgagacaggggtctgaagtcatagatctgggctcaacccctcaccctctctgtctgtgagcccagagtgcaagctgatggctttcagcttcttctctctctcaagtgggagataaggtcttcaggttttatttcaagttgggtcatcttttcttcacagttattttccttccttttaagccaaggttcactctctactccctcgtca

SEQ ID NO: 377488 - DNA, 382 bp, Homo sapiens
tgtagagttgagtcttacgttgcccaggctgctcttgaactcctagcctcaagcagtcctcctgcattggcctctcagagtgctgggattacagatgtgagccactgctcctggccagtggtggttcttcttatgggggtcacattgccttggctacacatacatctctggtgccttcttggagctcctttccctgccatcagagcatagcccaggccttagagcctgcctgggcatcaggcaagtcatttcttttctcaggcggtgcagtatgacaaccactacaccaacaccaagtactgcttgtgccagatgctacgagaacagctggagtcgccccagggaaggttgctccatgctgcccagtcttcccgggaaattt

SEQ ID NO: 377489 - DNA, 777 bp, Homo sapiens
  misc_feature (34)..(34): n is a, c, g, or t
ggccgggggtaaatcggccgagggcgaggtcttnttaagagttcagctgcgagatatcaaacaaagaattactctgtacaaagccagaacacatatatcaaagtaatcctgaagtatcagaacaaaataataggctgtaacagaggaggaaatgattttgaatagcctctctctgtgttaccataataagctaatcctggccccaatggttcgggtagggactcttccaatgaggctgctggccctggattatggagcggacattgtttactgtgaggagctgatcgacctcaagatgattcagtgcaagagagttgttaatgaggtgctcagcacagtggactttgtcgcccctgatgatcgagttgtcttccgcacctgtgaaagagagcagaacagggtggtcttccagatggggacttcagacgcagagcgagcccttgctgtggccaggcttgtagaaaatgatgtggctggtattgatgtcaacatgggctgtccaaaacaatattccaccaagggaggaatgggagctgccctgctgtcagaccctgacaagattgagaagatcctcagcactcttgttaaagggacacgcagacctgtgacctgcaagattcgcatcctgccatcgctagaagataccctgagccttgtgaagcggatagagaggactggcattgctgccatcgcagttcatgggagaagcggacgacgaactaagaatcctgatcgatgggaagtctcaaagcatggtgaacacaccatactgaatgc

SEQ ID NO: 377490 - DNA, 1971 bp, Homo sapiens
acctcgcgtacggtggctggcgaggctcagtacggtgtgtggagctggagcaccgtgaggaagaagcgaggttctttttaagagttcagctgcgagatatcaaacaaagaattactctgtacaaagccagaacacatatatcaaagtaatcctgaagtatcagaacaaaataataggctgtaacagaggaggaaatgattttgaatagcctctctctgtgttaccataataagctaatcctggccccaatggttcgggtagggactcttccaatgaggctgctggccctggattatggagcggacattgtttactgtgaggagctgatcgacctcaagatgattcagtgcaagagagttgttaatgaggtgctcagcacagtggactttgtcgcccctgatgatcgagttgtcttccgcacctgtgaaagagagcagaacagggtggtcttccagatggggacttcagacgcagagcgagcccttgctgtggccaggcttgtagaaaatgatgtggctggtattgatgtcaacatgggctgtccaaaacaatattccaccaagggaggaatgggagctgccctgctgtcagaccctgacaagattgagaagatcctcagcactcttgttaaagggacacgcagacctgtgacctgcaagattcgcatcctgccatcgctagaagataccctgagccttgtgaagcggatagagaggactggcattgctgccatcgcagttcatgggaggaagcgggaggagcgacctcagcatcctgtcagctgtgaagtcatcaaagccattgctgataccctctccattcctgtcatagccaacggaggatctcatgaccacatccaacagtattcggacatagaggactttcgacaagccacggcagcctcttccgtgatggtggcccgagcagccatgtggaacccatctatcttcctcaaggagggtctgcggcccctggaggaggtcatgcagaaatacatcagatacgcggtgcagtatgacaaccactacaccaacaccaagtactgcttgtgccagatgctacgagaacagctggagtcgccccagggaaggttgctccatgctgcccagtcttcccgggaaatttgtgaggcctttggccttggtgccttctatgaggagaccacacaggagctggatgcccagcaggccaggctctcagccaagacttcagagcagacaggggagccagctgaagatacctctggtgtcattaagatggctgtcaagtttgaccggagagcatacccagcccagatcacccctaagatgtgcctactagagtggtgccggagggagaagttggcacagcctgtgtatgaaacggttcaacgccctctagatcgcctgttctcctctattgtcaccgttgctgaacaaaagtatcagtctaccttgtgggacaagtccaagaaactggcggagcaggctgcagccatcgtctgtctgcggagccagggcctccctgagggtcggctgggtgaggagagcccttccttgcacaagcgaaagagggaggctcctgaccaagaccctgggggccccagagctcaggagctagcacaacctggggatctgtgcaagaagccctttgtggccttgggaagtggtgaagaaagccccctggaaggctggtgactactcttcctgccttagtcacccctccatgggcctggtgctaaggtggctgtggatgccacagcatgaaccagatgccgttgaacagtttgctggtcttgcctggcagaagttagatgtcctggcaggggccatcagcctagagcatggaccaggggccgcccaggggtggatcctggcccctttggtggatctgagtgacagggtcaagttctctttgaaaacaggagcttttcaggtggtaactccccaacctgacattggtactgtgcaataaagacaccccctaccctca

SEQ ID NO: 377491 - DNA, 1924 bp, Homo sapiens
  misc_feature (34)..(34): n is a, c, g, or t
ggccgggggtaaatcggccgagggcgaggtcttnttaagagttcagctgcgagatatcaaacaaagaattactctgtacaaagccagaacacatatatcaaagtaatcctgaagtatcagaacaaaataataggctgtaacagaggaggaaatgattttgaatagcctctctctgtgttaccataataagctaatcctggccccaatggttcgggtagggactcttccaatgaggctgctggccctggattatggagcggacattgtttactgtgagaggtgctcagcacagtggactttgtcgcccctgatgatcgagttgtcttccgcacctgtgaaagagagcagaacagggtggtcttccagatggggacttcagacgcagagcgagcccttgctgtggccaggcttgtagaaaatgatgtggctggtattgatgtcaacatgggctgtccaaaacaatattccaccaagggaggaatgggagctgccctgctgtcagaccctgacaagattgagaagatcctcagcactcttgttaaagggacacgcagacctgtgacctgcaagattcgcatcctgccatcgctagaagataccctgagccttgtgaagcggatagagaggactggcattgctgccatcgcagttcatgggaggaagcgggaggagcgacctcagcatcctgtcagctgtgaagtcatcaaagccattgctgataccctctccattcctgtcatagccaacggaggatctcatgaccacatccaacagtattcggacatagaggactttcgacaagccacggcagcctcttccgtgatggtggcccgagcagccatgtggaacccatctatcttcctcaaggagggtctgcggcccctggaggaggtcatgcagaaatacatcagatacgcggtgcagtatgacaaccactacaccaacaccaagtactgcttgtgccagatgctacgagaacagctggagtcgccccagggaaggttgctccatgctgcccagtcttcccgggaaatttgtgaggcctttggccttggtgccttctatgaggagaccacacaggagctggatgcccagcaggccaggctctcagccaagacttcagagcagacaggggagccagctgaagatacctctggtgtcattaagatggctgtcaagtttgaccggagagcatacccagcccagatcacccctaagatgtgcctactagagtggtgccggagggagaagttggcacagcctgtgtatgaaacggttcaacgccctctagatcgcctgttctcctctattgtcaccgttgctgaacaaaagtatcagtctaccttgtgggacaagtccaagaaactggcggagcaggctgcagccatcgtctgtctgcggagccagggcctccctgagggtcggctgggtgaggagagcccttccttgcacaagcgaaagagggaggctcctgaccaagaccctgggggccccagagctcaggagctagcacaacctggggatctgtgcaagaagccctttgtggccttgggaagtggtgaagaaagccccctggaaggctggtgactactcttcctgccttagtcacccctccatgggcctggtgctaaggtggctgtggatgccacagcatgaaccagatgccgttgaacagtttgctggtcttgcctggcagaagttagatgtcctggcaggggccatcagcctagagcatggaccaggggccgcccaggggtggatcctggcccctttggtggatctgagtgacagggtcaagttctctttgaaaacaggagcttttcaggtggtaactccccaacctgacattggtactgtgcaataaagacaccccctaccctcacccacggctggctgcttcagccttgggcatcttcataaatgg

SEQ ID NO: 377492 - DNA, 449 bp, Homo sapiens
tgaagatgcaccaatgtttaacaagaaaggaagggcagtgtagaacacctattgctttctgcatggtaagagggatgggtattgggagagcccacacctgctgaggagtgcctttagactttgagcggtggtgtttctctccctcccagaaatagatctctttggggagacaggccatacaagacgtgaatctggtgacattttacttgtttgaagcaaaatttttttagatgatggagggtttttaaaaattgcttttaaaattaaaatttgaatagataagaagtaatcactataaaaaataatgaagcataaggaatgctagtattagctgggtgtggggcactcacttgtagtcccaactactggagaggctgaggcaggaagaatgcttgagcccaggagtttgagtccagcctgggcaacataacgagaccccatcttttaaa

SEQ ID NO: 377493 - DNA, 1221 bp, Homo sapiens
aaatcgtttcttttcattgccagattttaaaagtgttcttttctctggtgatataagggttccatgcaggggtaaagttatatttgtgggtgattcacttaaaaaatctccatatcatccctaaactggagcaaagaagtggaatgaataaaggagaattatttcacacaacctatgtgctgcagatggctgtatattaaaatcaagttgtgagtgtaatattcccttttcctgatacatcattattcagttgactgcttagagtaaccctttcttatgtatgtttcttgttctggagttttattttcttgcatttgttccacaaccgtttattcaacacctttacgtctaacatgtgtttatgtctaacactcaaagaaggagtgccttcctggatatatggttacagaattatttcaggaagtcaattgcatttgcatatagagggattttcctgcaggcctttaactttagaatttactttgtgcctcgtgttaggctttgttattggaatagacgggaattttcatgtggaaatcacgggctgcagagaaggaggccgagtgagtgacaggctccttcacggtgatacggccctgctgcaggagtggaagggacttctccagtgaggtcctcttcatctgaaacttgacggataggcaagagtgtgctaggtgggataaagtttgaaggtccttagtaacacaggaggacagagtgcgtcacacagctggggacgagggagtgatgtgtggagagatgcctggaggggcacatgggggcagctgtgaccaaggccctgaagctgcagttaagggtcggacctcagccttctcttcatccaaaacagatccctgcgtttggaaactgtgaaaaccttttcccatcagagatctgagcaggtcatatttcatgagatttgttcaaatccaggccgggcacagtgctcacgcctgtaatcccagcactttgggaggctgaggcaggcagatcacaaggtcaggagttcgagaccagcctggtcaacgtgatgaaaccctgactctactaaaaatataaaaaatcagctgggcatggtggcaggcgcctgtagtctcagctactcgagaggctgaggcagaagaatcgcttgaatccaggaggcggaggttgcagtgagccaagattgagccactgcactccagcctgggtgacagagctagacttcatctcaaaaaaaaa

SEQ ID NO: 377494 - DNA, 373 bp, Homo sapiens
tcacttccttaaagtctatgtgtgaagtattgtcctgcaatgttaataatgctgttttctttgttatctacaaatcatcacaaaacggtaataactgttcaacagttttttaaaaaaattaatgaaatataagctatacacccaaagttgaataagatctgcaaacagctcttgaaaatagcataaaatattttgagctttttatacttatatatttgtatttttaatatttgaagaaaaactgagaatcatcttaataactttattatattttatgtttcaatccatcctagcctcttatctttgctcctgatctcacaggcctatattataggatagaaagtctttgttcagtgtttttctttggtttaat

SEQ ID NO: 377495 - DNA, 394 bp, Homo sapiens
gttatatatatgcatatatatgaaatatatattaaattaaatagttggcttttgcaatacatattacatatttttatatattatatgtatatttaaattatataggataatgaatgtaaaatagaatgaagactctagattatataaagtataaattaatctctaaatttcatcaacatgggagaaacaatcactacgccagtctgtaaattgcatgaggaacgcagggcagtctgtactgtatacagttatcatcaatgtctagcagagtgcctgacacaaaaatgcataataaacatttttagatgaacaaataattgatatgattaaaacccaagcaaaactcccagattatctagaaattcacaatgatagctagaggaaacctggtatc

SEQ ID NO: 377496 - DNA, 176 bp, Homo sapiens
tgaggttgggagttcaagaccagcctgaccaacgtggagaaaccctgtctgtagtaaaaaaattcctatccacaagccaggcatggtggtacatgtctgtaatcccagctatttgggaggctgaggtgagaggatcatttgagcctaggactttgaatccagcctggacaacatag

SEQ ID NO: 377497 - DNA, 2056 bp, Homo sapiens
  misc_feature (41)..(41): n is a, c, g, or t
tggccagtactatgcggtttatggtagcgaggcctgggttntgcggagcttccaggtctctgggtcgccagcgcgcgggcgcgcggctggagccggcgccgggcacggcatcgggggcctggactgcacggcccggcagcaggccggccatggagccaggcagcgtggagaacctgtccatcgtgtaccggagccgcgacttcctggtggtcaacaagcactgggacgttcgcattgacagcaaggcgtggcgggagactctgaccctgcagaagcagctgcggtaccgctttcccgagctggccgaccctgacacctgctacgggttcaggttctgccaccagctggatttctccaccagcggggcgctgtgcgtggccctaaacaaggcagccgccggcagcgcgtacaggtgcttcaaggagcggcgcgtgaccaaggcttacctggcattgctgcgggggcacatccaggagagccgggtaaccatcagccatgccattggcaggaacagcacggagggccgggcccacaccatgtgcatcgagggctcgcagggttgtgagaacccaaagccaagcctcacagatctcgtggttctggaacacgggctgtacgcaggcgatcctgtctccaaagtgctgctgaagccgctcacgggccggacacaccagctgcgcgtgcactgcagtgccctgggccaccccgtggtgggcgacctgacctacggagaagtctcgggccgggaggaccggccgttcagaatgatgctgcacgctttctacctgcgcatccccacggacaccgagtgtgtggaggtctgcacgcctgaccccttcctgccctccctggatgcctgctggagcccccacacactgctgcagtcgctggaccagctcgtgcaggccttacgggccacccccgaccctgaccccgaggataggggccccaggccaggcagcccctccgcactcctgcctgggcccggccggcctcctccacccccaaccaagccccctgagactgaggcacagcggggcccctgcctgcagtggctgtcggagtggacgctggaaccggacagctgagagccgtggggctggggcagggggtgtcagctgcacagcgggactctagggagatgggcgagcgagcgtctgctcactggctctggggcctcgaggtgccaggcagcatcaggcccactgggttgccccggccaggcctgcgaggaagggctgaggtggggccggcagggggcgccaggcagccgtgatcacaggtgacgaccgcaccgcggccgtgggactgatgcgggatcccgagggccttcctgcccacatgccccgggagaaaccgaggcccctccctcctcctggaacagcttccggctctcaagcgtcaccccaggggcgtcagttttacggactcaaggtcacctcaggaagaggcagggccaggttttgggataggctttgcctccaggatgggctgctcctgggcctggtgagctactgcccccaacctaccctctagaggggctgggaagggccgttctgggctcacctggcctgggagacccatctggtccctgcgtcctctgcccctcactgctctgtgcagatcctgtcgccctcagctgcctcctcccgagacctaatggtccctgctgggctcgagtctgcaggcccggctgcgtgtgccttggcctcactgtaccagtggttccctctctgcccggattctgagctcagtgtggtgtttggtgcacaggggttggtcaggggccatggccaaggccctgccacgcacgcccatccctcagatccactgtgagcaccaacctgctgcagtctcttgggcccctgctggcagctctgccacgtcaccgcctgcctggctcccacacagccatgcattgtcactctgcctccgggaccccagcttgggagctgtgggtctgccaggtcccacctcctctgtcccccatgccacaacctgggctcctggctacagcagggctccagggactccaaataaatgttcagtgactggc

SEQ ID NO: 377498 - DNA, 2057 bp, Homo sapiens
cgcgcagcggtgcagggcggaagcgctgccaggcgtccggagcgcggagcttccaggtctctgggtcgccagcgcgcgggcgcgcggctggagccggcgccgggcacggcatcgggggcctggactgcacggcccggcagcaggccggccatggagccaggcagcgtggagaacctgtccatcgtgtaccggagccgcgacttcctggtggtcaacaagcactgggacgttcgcattgacagcaaggcgtggcgggagactctgaccctgcagaagcagctgcggtaccgctttcccgagctggccgaccctgacacctgctacgggttcaggttctgccaccagctggatttctccaccagcggggcgctgtgcgtggccctaaacaaggcagccgccggcagcgcgtacaggtgcttcaaggagcggcgcgtgaccaaggcttacctggcattgctgcgggggcacatccaggagagccgggtaaccatcagccatgccattggcaggaacagcacggagggccgggcccacaccatgtgcatcgagggctcgcagggttgtgagaacccaaagccaagcctcacagatctcgtggttctggaacacgggctgtacgcaggcgatcctgtctccaaagtgctgctgaagccgctcacgggccggacacaccagctgcgcgtgcactgcagtgccctgggccaccccgtggtgggcgacctgacctacggagaagtctcgggccgggaggaccggccgttcagaatgatgctgcacgctttctacctgcgcatccccacggacaccgagtgtgtggaggtctgcacgcctgaccccttcctgccctccctggatgcctgctggagcccccacacactgctgcagtcgctggaccagctcgtgcaggccttacgggccacccccgaccctgaccccgaggataggggccccaggccaggcagcccctccgcactcctgcctgggcccggccggcctcctccacccccaaccaagccccctgagactgaggcacagcggggcccctgcctgcagtggctgtcggagtggacgctggaaccggacagctgagagccgtggggctggggcagggggtgtcagctgcacagcgggactctagggagatgggcgagcgagcgtctgctcactggctctggggcctcgaggtgccaggcagcatcaggcccactgggttgccccggccaggcctgcgaggaagggctgaggtggggccggcagggggcgccaggcagccgtgatcacaggtgacgaccgcaccgcggccgtgggactgatgcgggatcccgagggccttcctgcccacatgccccgggagaaaccgaggcccctccctcctcctggaacagcttccggctctcaagcgtcaccccaggggcgtcagttttacggactcaaggtcacctcaggaagaggcagggccaggttttgggataggctttgcctccaggatgggctgctcctgggcctggtgagctactgcccccaacctaccctctagaggggctgggaagggccgttctgggctcacctggcctgggagacccatctggtccctgcgtcctctgcccctcactgctctgtgcagatcctgtcgccctcagctgcctcctcccgagacctaatggtccctgctgggctcgagtctgcaggcccggctgcgtgtgccttggcctcactgtaccagtggttccctctctgcccggattctgagctcagtgtggtgtttggtgcacaggggttggtcaggggccatggccaaggccctgccacgcacgcccatccctcagatccactgtgagcaccaacctgctgcagtctcttgggcccctgctggcagctctgccacgtcaccgcctgcctggctcccacacagccatgcattgtcactctgcctccgggaccccagcttgggagctgtgggtctgccaggtcccacctcctctgtcccccatgccacaacctgggctcctggctacagcagggctccagggactccaaataaatgttcagtgactggc

SEQ ID NO: 377499 - DNA, 2482 bp, Homo sapiens
  misc_feature (41)..(41): n is a, c, g, or t
tggccagtactatgcggtttatggtagcgaggcctgggttntgcggagcttccaggtctctgggtcgccagcgcgcgggcgcgcggctggagccggcgccgggcacggcatcgggggcctggactgcacggcccggcagcaggccggccatggagccaggcagcgtggagaacctgtccatcgtgtaccggagccgcgacttcctggtggtcaacaagcactgggacgttcgcattgacagcaaggcgtggcgggagactctgaccctgcagaagcagctgcggtaccgctttcccgagctggccgaccctgacacctgctacgggttcaggttctgccaccagctggatttctccaccagcggggcgctgtgcgtggccctaaacaaggcagccgccggcagcgcgtacaggtgcttcaaggagcggcgcgtgaccaaggcttacctggcattgctgcgggggcacatccaggagagccgggtaaccatcagccatgccattggcaggaacagcacggagggccgggcccacaccatgtgcatcgagggctcgcagggttgtgagaacccaaagccaagcctcacagatctcgtggttctggaacacgggctgtacgcaggcgatcctgtctccaaagtgctgctgaagccgctcacgggccggacacaccagctgcgcgtgcactgcagtgccctgggccaccccgtggtgggcgacctgacctacggagaagtctcgggccgggaggaccggccgttcagaatgatgctgcacgctttctacctgcgcatccccacggacaccgagtgtgtggaggtctgcacgcctgaccccttcctgccctccctggatgcctgctggagcccccacacactgctgcagtcgctggaccagctcgtgcaggccttacgggccacccccgaccctgaccccgaggataggggccccaggccaggcagcccctccgcactcctgcctgggcccggccggcctcctccacccccaaccaagccccctgagactgaggcacagcggggcccctgcctgcagtggctgtcggagtggacgctggaaccggacagctgagagccgtggggctggggcagggggtgtcagctgcacagcgggactctagggagatgggcgagcgagcgtctgctcactggctctggggcctcgaggtgccaggcagcatcaggcccactgggttgccccggccaggcctgcgaggaagggctgaggtggggccggcagggggcgccaggcagccgtgatcacaggtgacgaccgcaccgcggccgtgggactgatgcgggatcccgagggccttcctgcccacatgccccgggagaaaccgaggcccctccctcctcctggaacagcttccggctctcaagcgtcaccccaggggcgtcagttttacggactcaaggtcacctcaggaagaggcagggccaggttttgggataggctttgcctccaggatgggctgctcctgggcctggtgagctactgcccccaacctaccctctagaggggctgggaagggccgttctgggctcacctggcctgggagacccatctggtccctgcgtcctctgcccctcactgctctgtgcagatcctgtcgccctcagctgcctcctcccgagacctaatggtccctgctgggctcgagtctgcaggcccggctgcgtgtgccttggcctcactgtaccagtggttccctctctgcccggattctgagctcagtgtggtgtttggtgcacaggggttggtcaggggccatggccaaggccctgccacgcacgcccatccctcagatccactgtgagcaccaacctgctgcagtctcttgggcccctgctggcagctctgccacgtcaccgcctgcctggctcccacacagccatgcattgtcactctgcctccgggaccccagcttgggagctgtgggtctgccaggtcccacctcctctgtcccccatgccacaacctgggctcctggctacagcagggctccagggactccaaataaatgttcagtgactggcaaaaaaaaaaaaaaaaaaaaaacaacaaacaacaacaacacaaaacaaaacaaacaaacaacaaaaaaaaagaaggggggggggcgcgcgcgtataaaaaagaataacccgcgggggggcgcccaatattagcgcggataaccccgggctctttttaggaccaaagggggggcgcccaataagaggagggcggttataaaaaggaggagagcagcggggcgcgatttaacacaaaggctgtgtggtggggaagaactcgctatgtggggaatctgtgggggaggaaccctcttctgggggggggactgttgttgggcgcacatctacgcagagaatttaagcgctagggaaatattaacatgggggttaagtgttaaacaggggatttgttgggtgagaaaatgggtaggatagtttggaatttcc

SEQ ID NO: 377500 - DNA, 1868 bp, Homo sapiens
cgcgcagcggtgcagggcggaagcgctgccaggcgtccggagcgcggagcttccaggtctctgggtcgccagcgcgcgggcgcgcggctggagccggcgccgggcacggcatcgggggcctggactgcacggcccggcagcaggttctgccaccagctggatttctccaccagcggggcgctgtgcgtggccctaaacaaggcagccgccggcagcgcgtacaggtgcttcaaggagcggcgcgtgaccaaggcttacctggcattgctgcgggggcacatccaggagagccgggtaaccatcagccatgccattggcaggaacagcacggagggccgggcccacaccatgtgcatcgagggctcgcagggttgtgagaacccaaagccaagcctcacagatctcgtggttctggaacacgggctgtacgcaggcgatcctgtctccaaagtgctgctgaagccgctcacgggccggacacaccagctgcgcgtgcactgcagtgccctgggccaccccgtggtgggcgacctgacctacggagaagtctcgggccgggaggaccggccgttcagaatgatgctgcacgctttctacctgcgcatccccacggacaccgagtgtgtggaggtctgcacgcctgaccccttcctgccctccctggatgcctgctggagcccccacacactgctgcagtcgctggaccagctcgtgcaggccttacgggccacccccgaccctgaccccgaggataggggccccaggccaggcagcccctccgcactcctgcctgggcccggccggcctcctccacccccaaccaagccccctgagactgaggcacagcggggcccctgcctgcagtggctgtcggagtggacgctggaaccggacagctgagagccgtggggctggggcagggggtgtcagctgcacagcgggactctagggagatgggcgagcgagcgtctgctcactggctctggggcctcgaggtgccaggcagcatcaggcccactgggttgccccggccaggcctgcgaggaagggctgaggtggggccggcagggggcgccaggcagccgtgatcacaggtgacgaccgcaccgcggccgtgggactgatgcgggatcccgagggccttcctgcccacatgccccgggagaaaccgaggcccctccctcctcctggaacagcttccggctctcaagcgtcaccccaggggcgtcagttttacggactcaaggtcacctcaggaagaggcagggccaggttttgggataggctttgcctccaggatgggctgctcctgggcctggtgagctactgcccccaacctaccctctagaggggctgggaagggccgttctgggctcacctggcctgggagacccatctggtccctgcgtcctctgcccctcactgctctgtgcagatcctgtcgccctcagctgcctcctcccgagacctaatggtccctgctgggctcgagtctgcaggcccggctgcgtgtgccttggcctcactgtaccagtggttccctctctgcccggattctgagctcagtgtggtgtttggtgcacaggggttggtcaggggccatggccaaggccctgccacgcacgcccatccctcagatccactgtgagcaccaacctgctgcagtctcttgggcccctgctggcagctctgccacgtcaccgcctgcctggctcccacacagccatgcattgtcactctgcctccgggaccccagcttgggagctgtgggtctgccaggtcccacctcctctgtcccccatgccacaacctgggctcctggctacagcagggctccagggactccaaataaatgttcagtgactggc

SEQ ID NO: 377501 - DNA, 1954 bp, Homo sapiens
cgcgcagcggtgcagggcggaagcgctgccaggcgtccggagcgcggagcttccaggtctctgggtcgccagcgcgcgggcgcgcggctggagccggcgccgggcacggcatcgggggcctggactgcacggcccggcagcaggccggccatggagccaggcagcgtggagaacctgtccatcgtgtaccggagccgcgacttcctggtggtcaacaagcactgggacgttcgcattgacagcaaggcgtggcgggagactctgaccctgcagaagcagctgcggtaccgctttcccgagctggccgaccctgacacctgctacgggttcaggttctgccaccagctggatttctccaccagcggggcgctgtgcgtggccctaaacaaggcagccgccggcagcgcgtacaggtgcttcaaggagcggcgcgtgaccaaggcttacctggcattggttgtgagaacccaaagccaagcctcacagatctcgtggttctggaacacgggctgtacgcaggcgatcctgtctccaaagtgctgctgaagccgctcacgggccggacacaccagctgcgcgtgcactgcagtgccctgggccaccccgtggtgggcgacctgacctacggagaagtctcgggccgggaggaccggccgttcagaatgatgctgcacgctttctacctgcgcatccccacggacaccgagtgtgtggaggtctgcacgcctgaccccttcctgccctccctggatgcctgctggagcccccacacactgctgcagtcgctggaccagctcgtgcaggccttacgggccacccccgaccctgaccccgaggataggggccccaggccaggcagcccctccgcactcctgcctgggcccggccggcctcctccacccccaaccaagccccctgagactgaggcacagcggggcccctgcctgcagtggctgtcggagtggacgctggaaccggacagctgagagccgtggggctggggcagggggtgtcagctgcacagcgggactctagggagatgggcgagcgagcgtctgctcactggctctggggcctcgaggtgccaggcagcatcaggcccactgggttgccccggccaggcctgcgaggaagggctgaggtggggccggcagggggcgccaggcagccgtgatcacaggtgacgaccgcaccgcggccgtgggactgatgcgggatcccgagggccttcctgcccacatgccccgggagaaaccgaggcccctccctcctcctggaacagcttccggctctcaagcgtcaccccaggggcgtcagttttacggactcaaggtcacctcaggaagaggcagggccaggttttgggataggctttgcctccaggatgggctgctcctgggcctggtgagctactgcccccaacctaccctctagaggggctgggaagggccgttctgggctcacctggcctgggagacccatctggtccctgcgtcctctgcccctcactgctctgtgcagatcctgtcgccctcagctgcctcctcccgagacctaatggtccctgctgggctcgagtctgcaggcccggctgcgtgtgccttggcctcactgtaccagtggttccctctctgcccggattctgagctcagtgtggtgtttggtgcacaggggttggtcaggggccatggccaaggccctgccacgcacgcccatccctcagatccactgtgagcaccaacctgctgcagtctcttgggcccctgctggcagctctgccacgtcaccgcctgcctggctcccacacagccatgcattgtcactctgcctccgggaccccagcttgggagctgtgggtctgccaggtcccacctcctctgtcccccatgccacaacctgggctcctggctacagcagggctccagggactccaaataaatgttcagtgactggc

SEQ ID NO: 377502 - DNA, 2505 bp, Homo sapiens
  misc_feature (41)..(41): n is a, c, g, or t
tggccagtactatgcggtttatggtagcgaggcctgggttntgcggagcttccaggtctctgggtcgccagcgcgcgggcgcgcggctggagccggcgccgggcacggcatcgggggcctggactgcacggcccggcagcaggccggccatggagccaggcagcgtggagaacctgtccatcgtgtaccggagccgcgacttcctggtggtcaacaagcactgggacgttcgcattgacagcaaggcgtggcgggagactctgaccctgcagaagcagctgcggtaccgctttcccgagctggccgaccctgacacctgctacgggttcaggttctgccaccagctggatttctccaccagcggggcgctgtgcgtggccctaaacaaggcagccgccggcagcgcgtacaggtgcttcaaggagcggcgcgtgaccaaggcttacctggcattgctgcgggggcacatccaggagagccgggtaaccatcagccatgccattggcaggaacagcacggagggccgggcccacaccatgtgcatcgagggctcgcagggttgtgagaacccaaagccaagcctcacagatctcgtggttctggaacacgggctgtacgcaggcgatcctgtctccaaagtgctgctgaagccgctcacgggtgtgtctggggtgggcggtgtcctggtggtgacagaagggaaactgaggcacagggccacgaagcttatgttgggccaccctgagcatcagggcagagctggcaacaagcactcctgcgttcttaactccacgccctgcagcctctcagcttctcacctgacacagggtccctgctggctcctgactgattccttgggggtctggctggcctagattctccaggaccgagcaccaccctggccctgtcctcaccagtggtgacctgaacacaatcttctgtcctaaatactgtcatcctcactcatggcaggggacagggagagttccaccccaagaggctgcttcaagactgcagcggggtcatgacgggaggtgggtcctggtcagggagataggtgtggatcggccccgctcccagcttgatccggcaccgccctcatcccgcaggccggacacaccagctgcgcgtgcactgcagtgccctgggccaccccgtggtgggcgacctgacctacggagaagtctcgggccgggaggaccggccgttcagaatgatgctgcacgctttctacctgcgcatccccacggacaccgagtgtgtggaggtctgcacgcctgaccccttcctgccctccctggatgcctgctggagcccccacacactgctgcagtcgctggaccagctcgtgcaggccttacgggccacccccgaccctgaccccgaggataggggccccaggccaggcagcccctccgcactcctgcctgggcccggccggcctcctccacccccaaccaagccccctgagactgaggcacagcggggcccctgcctgcagtggctgtcggagtggacgctggaaccggacagctgagagccgtggggctggggcagggggtgtcagctgcacagcgggactctagggagatgggcgagcgagcgtctgctcactggctctggggcctcgaggtgccaggcagcatcaggcccactgggttgccccggccaggcctgcgaggaagggctgaggtggggccggcagggggcgccaggcagccgtgatcacaggtgacgaccgcaccgcggccgtgggactgatgcgggatcccgagggccttcctgcccacatgccccgggagaaaccgaggcccctccctcctcctggaacagcttccggctctcaagcgtcaccccaggggcgtcagttttacggactcaaggtcacctcaggaagaggcagggccaggttttgggataggctttgcctccaggatgggctgctcctgggcctggtgagctactgcccccaacctaccctctagaggggctgggaagggccgttctgggctcacctggcctgggagacccatctggtccctgcgtcctctgcccctcactgctctgtgcagatcctgtcgccctcagctgcctcctcccgagacctaatggtccctgctgggctcgagtctgcaggcccggctgcgtgtgccttggcctcactgtaccagtggttccctctctgcccggattctgagctcagtgtggtgtttggtgcacaggggttggtcaggggccatggccaaggccctgccacgcacgcccatccctcagatccactgtgagcaccaacctgctgcagtctcttgggcccctgctggcagctctgccacgtcaccgcctgcctggctcccacacagccatgcattgtcactctgcctccgggaccccagcttgggagctgtgggtctgccaggtcccacctcctctgtcccccatgccacaacctgggctcctggctacagcagggctccagggactccaaataaatgttcagtgactggc

SEQ ID NO: 377503 - DNA, 1554 bp, Homo sapiens
gcgagcggccggacgcgtgggtcgcccacgcgtccggtgcatcgagggctcgcagggttgtgagaacccaaagccaagcctcacagatctcgtggttctggaacacgggctgtacgcaggcgatcctgtctccaaagtgctgctgaagccgctcacgggccggacacaccagctgcgcgtgcactgcagtgccctgggccaccccgtggtgggcgacctgacctacggagaagtctcgggccgggaggaccggccgttcagaatgatgctgcacgctttctacctgcgcatccccacggacaccgagtgtgtggaggtctgcacgcctgaccccttcctgccctccctggatgcctgctggagcccccacacactgctgcagtcgctggaccagctcgtgcaggccttacgggccacccccgaccctgaccccgaggataggggccccaggccaggcagcccctccgcactcctgcctgggcccggccggcctcctccacccccaaccaagccccctgagactgaggcacagcggggcccctgcctgcagtggctgtcggagtggacgctggaaccggacagctgagagccgtggggctggggcagggggtgtcagctgcacagcgggactctagggagatgggcgagcgagcgtctgctcactggctctggggcctcgaggtgccaggcagcatcaggcccactgggttgccccggccaggcctgcgaggaagggctgaggtggggccggcagggggcgccaggcagccgtgatcacaggtgacgaccgcaccgcggccgtgggactgatgcgggatcccgagggccttcctgcccacatgccccgggagaaaccgaggcccctccctcctcctggaacagcttccggctctcaagcgtcaccccaggggcgtcagttttacggactcaaggtcacctcaggaagaggcagggccaggttttgggataggctttgcctccaggatgggctgctcctgggcctggtgagctactgcccccaacctaccctctagaggggctgggaagggccgttctgggctcacctggcctgggagacccatctggtccctgcgtcctctgcccctcactgctctgtgcagatcctgtcgccctcagctgcctcctcccgagacctaatggtccctgctgggctcgagtctgcaggcccggctgcgtgtgccttggcctcactgtaccagtggttccctctctgcccggattctgagctcagtgtggtgtttggtgcacaggggttggtcaggggccatggccaaggccctgccacgcacgcccatccctcagatccactgtgagcaccaacctgctgcagtctcttgggcccctgctggcagctctgccacgtcaccgcctgcctggctcccacacagccatgcattgtcactctgcctccgggaccccagcttgggagctgtgggtctgccaggtcccacctcctctgtcccccatgccacaacctgggctcctggctacagcagggctccagggactccaaataaatgttcagtgactggc

SEQ ID NO: 377504 - DNA, 2297 bp, Homo sapiens
  misc_feature (41)..(41): n is a, c, g, or t
tggccagtactatgcggtttatggtagcgaggcctgggttntgcggagcttccaggtctctgggtcgccagcgcgcgggcgcgcggctggagccggcgccgggcacggcatcgggggcctggactgcacggcccggcagcaggccggccatggagccaggcagcgtggagaacctgtccatcgtgtaccggagccgcgacttcctggtggtcaacaagcactgggacgttcgcattgacagcaaggcgtggcgggagactctgaccctgcagaagcagctgcggtaccgctttcccgagctggccgaccctgacacctgctacgggttcaggttctgccaccagctggatttctccaccagcggggcgctgtgcgtggccctaaacaaggcagccgccggcagcgcgtacaggtgcttcaaggagcggcgcgtgaccaaggcttacctggcattgctgcgggggcacatccaggagagccgggtaaccatcagccatgccattggcaggaacagcacggagggccgggcccacaccatgtgcatcgagggctcgcagggttgtgagaacccaaagccaagcctcacagatctcgtggttctggaacacgggctgtacgcaggcgatcctgtctccaaagtgctgctgaagccgctcacgggccggacacaccagctgcgcgtgcactgcagtgccctgggccaccccgtggtgggcgacctgacctacggagaagtctcgggccgggaggaccggccgttcagaatgatgctgcacgctttctacctgcgcatccccacggacaccgagtgtgtggaggtctgcacgcctgaccccttcctgccctccctggatgcctgctggagcccccacacactgctgcagtcgctggaccagctcgtgcaggccttacgggccacccccgaccctgaccccgaggataggggccccaggccaggcagcccctccgcactcctgcctgggcccggccggcctcctccacccccaaccaagccccctgagactgaggcacagcggggcccctgcctgcagtggctgtcggagtggacgctggaaccggacagctgagagccgtggggctggggcagggggtgtcagctgcacagcgggactctagggagatgggcgagcgagcgtctgctcactggctctggggcctcgaggtgccaggcagcatcaggcccactgggttgccccggccaggcctgcgaggaagggctgaggtggggccggcagggggcgccaggcagccgtgatcacaggtgacgaccgcaccgcggccgtgggactgatgcgggatcccgagggccttcctgcccacatgccccgggagaaaccgaggcccctccctcctcctggaacagcttccggctctcaagcgtcaccccaggggcgtcagttttacggactcaaggtcacctcaggaagaggcagggccaggttttgggataggctttgcctccaggatgggctgctcctgggcctggtgagctactgcccccaacctaccctctagaggggctgggaagggccgttctgggctcacctggcctgggagacccatctggtccctgcgtcctctgcccctcactgctctgtgcagatcctgtcgccctcagctgcctcctcccgagacctaatggtccctgctgggctcgagtctgcaggcccggctgcgtgtgccttggcctcactgtaccagtggttccctctctgcccggattctgagctcagtgtggtgtttggtgcacaggggttggtcaggggccatggccaaggccctgccacgcacgcccatccctcagatccactgtgagcaccaacctgctgcagtctcttgggcccctgctggcagctctgccacgtcaccgcctgcctggctcccacacagccatgcattgtcactctgcctccgggaccccagcttgggagctgtgggtctgccaggtcccacctcctctgtcccccatgccacaacctgggctcctggctacagcagggctccagggactccaaataaatgttcagtgactggcaaaaaacacaaaacagagagaaagaagaacagagagaccgaggaccgagacacaagaaagaggggggggaacaaagaagaagtaccaagaggaggcccaaggtgaggacagcaggaaagtgtggagaaaagggggacccaaatagaaggggactacaacgggacagggagacgggctacaacacgtgtgtgagcggaaaaaagctaaagtggacttctggagaggcaccacactagggaga

SEQ ID NO: 377505 - DNA, 1957 bp, Homo sapiens
  misc_feature (41)..(41): n is a, c, g, or t
tggccagtactatgcggtttatggtagcgaggcctgggttntgcggagcttccaggtctctgggtcgccagcgcgcgggcgcgcggctggagccggcgccgggcacggcatcgggggcctggactgcacggcccggcagcagcaaggcgtggcgggagactctgaccctgcagaagcagctgcggtaccgctttcccgagctggccgaccctgacacctgctacgggttcaggttctgccaccagctggatttctccaccagcggggcgctgtgcgtggccctaaacaaggcagccgccggcagcgcgtacaggtgcttcaaggagcggcgcgtgaccaaggcttacctggcattgctgcgggggcacatccaggagagccgggtaaccatcagccatgccattggcaggaacagcacggagggccgggcccacaccatgtgcatcgagggctcgcagggttgtgagaacccaaagccaagcctcacagatctcgtggttctggaacacgggctgtacgcaggcgatcctgtctccaaagtgctgctgaagccgctcacgggccggacacaccagctgcgcgtgcactgcagtgccctgggccaccccgtggtgggcgacctgacctacggagaagtctcgggccgggaggaccggccgttcagaatgatgctgcacgctttctacctgcgcatccccacggacaccgagtgtgtggaggtctgcacgcctgaccccttcctgccctccctggatgcctgctggagcccccacacactgctgcagtcgctggaccagctcgtgcaggccttacgggccacccccgaccctgaccccgaggataggggccccaggccaggcagcccctccgcactcctgcctgggcccggccggcctcctccacccccaaccaagccccctgagactgaggcacagcggggcccctgcctgcagtggctgtcggagtggacgctggaaccggacagctgagagccgtggggctggggcagggggtgtcagctgcacagcgggactctagggagatgggcgagcgagcgtctgctcactggctctggggcctcgaggtgccaggcagcatcaggcccactgggttgccccggccaggcctgcgaggaagggctgaggtggggccggcagggggcgccaggcagccgtgatcacaggtgacgaccgcaccgcggccgtgggactgatgcgggatcccgagggccttcctgcccacatgccccgggagaaaccgaggcccctccctcctcctggaacagcttccggctctcaagcgtcaccccaggggcgtcagttttacggactcaaggtcacctcaggaagaggcagggccaggttttgggataggctttgcctccaggatgggctgctcctgggcctggtgagctactgcccccaacctaccctctagaggggctgggaagggccgttctgggctcacctggcctgggagacccatctggtccctgcgtcctctgcccctcactgctctgtgcagatcctgtcgccctcagctgcctcctcccgagacctaatggtccctgctgggctcgagtctgcaggcccggctgcgtgtgccttggcctcactgtaccagtggttccctctctgcccggattctgagctcagtgtggtgtttggtgcacaggggttggtcaggggccatggccaaggccctgccacgcacgcccatccctcagatccactgtgagcaccaacctgctgcagtctcttgggcccctgctggcagctctgccacgtcaccgcctgcctggctcccacacagccatgcattgtcactctgcctccgggaccccagcttgggagctgtgggtctgccaggtcccacctcctctgtcccccatgccacaacctgggctcctggctacagcagggctccagggactccaaataaatgttcagtgactggc

SEQ ID NO: 377506 - DNA, 2134 bp, Homo sapiens
  misc_feature (41)..(41): n is a, c, g, or t
tggccagtactatgcggtttatggtagcgaggcctgggttntgcggagcttccaggtctctgggtcgccagcgcgcgggcgcgcggctggagccggcgccgggcacggcatcgggggcctggactgcacggcccggcagcaggccggccatggagccaggcagcgtggagaacctgtccatcgtgtaccggagccgcgacttcctggtggtcaacaagcactgggacgttcgcattgacagcaaggcgtggcgggagactctgaccctgcagaagcagctgcggtaccgctttcccgagctggccgaccctgacacctgctacgggttcaggtagggggggcggccggagccccacggtggcgtctgtggaggaaagtggctcagactctggactctgtcccactccaggttctgccaccagctggatttctccaccagcggggcgctgtgcgtggccctaaacaaggcagccgccggcagcgcgtacaggtgcttcaaggagcggcgcgtgaccaaggcttacctggcattgctgcgggggcacatccaggagagccgggtaaccatcagccatgccattggcaggaacagcacggagggccgggcccacaccatgtgcatcgagggctcgcagggttgtgagaacccaaagccaagcctcacagatctcgtggttctggaacacgggctgtacgcaggcgatcctgtctccaaagtgctgctgaagccgctcacgggccggacacaccagctgcgcgtgcactgcagtgccctgggccaccccgtggtgggcgacctgacctacggagaagtctcgggccgggaggaccggccgttcagaatgatgctgcacgctttctacctgcgcatccccacggacaccgagtgtgtggaggtctgcacgcctgaccccttcctgccctccctggatgcctgctggagcccccacacactgctgcagtcgctggaccagctcgtgcaggccttacgggccacccccgaccctgaccccgaggataggggccccaggccaggcagcccctccgcactcctgcctgggcccggccggcctcctccacccccaaccaagccccctgagactgaggcacagcggggcccctgcctgcagtggctgtcggagtggacgctggaaccggacagctgagagccgtggggctggggcagggggtgtcagctgcacagcgggactctagggagatgggcgagcgagcgtctgctcactggctctggggcctcgaggtgccaggcagcatcaggcccactgggttgccccggccaggcctgcgaggaagggctgaggtggggccggcagggggcgccaggcagccgtgatcacaggtgacgaccgcaccgcggccgtgggactgatgcgggatcccgagggccttcctgcccacatgccccgggagaaaccgaggcccctccctcctcctggaacagcttccggctctcaagcgtcaccccaggggcgtcagttttacggactcaaggtcacctcaggaagaggcagggccaggttttgggataggctttgcctccaggatgggctgctcctgggcctggtgagctactgcccccaacctaccctctagaggggctgggaagggccgttctgggctcacctggcctgggagacccatctggtccctgcgtcctctgcccctcactgctctgtgcagatcctgtcgccctcagctgcctcctcccgagacctaatggtccctgctgggctcgagtctgcaggcccggctgcgtgtgccttggcctcactgtaccagtggttccctctctgcccggattctgagctcagtgtggtgtttggtgcacaggggttggtcaggggccatggccaaggccctgccacgcacgcccatccctcagatccactgtgagcaccaacctgctgcagtctcttgggcccctgctggcagctctgccacgtcaccgcctgcctggctcccacacagccatgcattgtcactctgcctccgggaccccagcttgggagctgtgggtctgccaggtcccacctcctctgtcccccatgccacaacctgggctcctggctacagcagggctccagggactccaaataaatgttcagtgactggc

SEQ ID NO: 377507 - DNA, 1896 bp, Homo sapiens
  misc_feature (41)..(41): n is a, c, g, or t
tggccagtactatgcggtttatggtagcgaggcctgggttntgcggagcttccaggtctctgggtcgccagcgcgcgggcgcgcggctggagccggcgccgggcacggcatcgggggcctggactgcacggcccggcagcaggccggccatggagccaggcagcgtggagaacctgtccatcgtgtaccggagccgcgacttcctggtggtcaacaagcactgggacgttcgcattgacagcaaggcgtggcgggagactctgaccctgcagaagcagctgcggtaccgctttcccgagctggccgaccctgacacctgctacgggttcaggttctgccaccagctggatttctccaccagcggggcgctgtgcgtggccctaaacaaggcagccgccggcagcgcgtacaggtgcttcaaggagcggcgcgtgaccaaggcttacctggcattgctgcgggggcacatccaggagagccgggtaaccatcagccatgccattggcaggaacagcacggagggccgggcccacaccatgtgcatcgagggctcgcagggttgtgagaacccaaagccaagcctcacagatctcgtggttctggaacacgggctgtacgcaggcgatcctgtctccaaagtgctgctgaagccgctcacgggccggacacaccagctgcgcgtgcactgcagtgccctgggccaccccgtggtgggcgacctgacctacggagaagtctcgggccgggaggaccggccgttcagaatgatgctgcacgctttctacctgcgcatccaggcagcccctccgcactcctgcctgggcccggccggcctcctccacccccaaccaagccccctgagactgaggcacagcggggcccctgcctgcagtggctgtcggagtggacgctggaaccggacagctgagagccgtggggctggggcagggggtgtcagctgcacagcgggactctagggagatgggcgagcgagcgtctgctcactggctctggggcctcgaggtgccaggcagcatcaggcccactgggttgccccggccaggcctgcgaggaagggctgaggtggggccggcagggggcgccaggcagccgtgatcacaggtgacgaccgcaccgcggccgtgggactgatgcgggatcccgagggccttcctgcccacatgccccgggagaaaccgaggcccctccctcctcctggaacagcttccggctctcaagcgtcaccccaggggcgtcagttttacggactcaaggtcacctcaggaagaggcagggccaggttttgggataggctttgcctccaggatgggctgctcctgggcctggtgagctactgcccccaacctaccctctagaggggctgggaagggccgttctgggctcacctggcctgggagacccatctggtccctgcgtcctctgcccctcactgctctgtgcagatcctgtcgccctcagctgcctcctcccgagacctaatggtccctgctgggctcgagtctgcaggcccggctgcgtgtgccttggcctcactgtaccagtggttccctctctgcccggattctgagctcagtgtggtgtttggtgcacaggggttggtcaggggccatggccaaggccctgccacgcacgcccatccctcagatccactgtgagcaccaacctgctgcagtctcttgggcccctgctggcagctctgccacgtcaccgcctgcctggctcccacacagccatgcattgtcactctgcctccgggaccccagcttgggagctgtgggtctgccaggtcccacctcctctgtcccccatgccacaacctgggctcctggctacagcagggctccagggactccaaataaatgttcagtgactggc

SEQ ID NO: 377508 - DNA, 229 bp, Homo sapiens
cttgctgagtgtactcactgacacatcccataagtacttcttgcttgatatatccagaatggagctcactgtttctcctgcatctcttcttcctcattcattctctttcagaatgggagcagctgtcttcacaggccccacgctgtgatgaggggacttctcatcttttatctccagatgatcaccaagttcagctaattttacctcagttcatattcctcatacttgt

SEQ ID NO: 377509 - DNA, 465 bp, Homo sapiens
aaaaaaaaaaaaaaaaaaaaaggtttcaatagtgaaaaggactatatagatctgaagtgattataaaacaaggaactgataacaatgactttaatctgattataataagctctcggtgttagtccctgatattcttaggtaattttaaaaattacgtctcacaattcccattaggcacggtttctctttctgttgaagtgctgatattttattgtggggtaaagtggagattcagctgcataaagacctggaataggtataaatattcaaatttggcttcacagagaagacttgtgactagatttttctaaaatgaaaagacatgtttggcttatgacttaaaacagtcaaacatgtttggtcaaaataatacatatactaacatctgagtgctcagctgtagtcccagctactcgggagctaacgcaggagaattgcatgaaccctggaggggttccgcctcga

SEQ ID NO: 377510 - DNA, 480 bp, Homo sapiens
actaatgtttcttcatggttaaatttaggttaagtggaaagactactacatactactacctaaatgatcttgtgtcgtcctcagtgtgtcatatcaccttgaggcatgtgtcaggagacacatgatatccatttgtcccattattgttgaactttgatgactcaattaacgtggcccctgctaggttttgtctgtcaagttaccatttttccctttgtaataaataagttatctgtggagagatactttgagactgggtaatagtcctattcgctagccagctttcactcagtagttgtagtatctattgatttttgtcggattaatttatgataatgatggtgggaaaatgtggtatactaaccagtgttctagaacttaacacttgtatttggtagtctgtaatgttcctttttctccccatttgtgcttttatttatgtggtacaataaatatcaaaatgaaattataaatgtgtac

SEQ ID NO: 377511 - DNA, 340 bp, Homo sapiens
ctaaggatatagtaatttaaagacccttacaaagcaagctgtgtataccaggcattttttacccaatcttttttagttgtttcccctaaacctaattttctagtgttttagagacatgcctttgactctttacaaagcattcaacttttactgacccaatgacactctctgcatccacattttacttgtcgatagtaatatcgtattacctaattttgaaaataagtacaataacataaatcggttttgaattaaacagcttactggtaggagcagaagtgcaagtgtgcaccatggttaggcgtgccttataatatctgtcagtgctgagatggaaaac

SEQ ID NO: 377512 - DNA, 312 bp, Homo sapiens
cctagatttggggaactgtaacctctcttctttgatcgaatagttccctatgctttccttgtcataatagcactaatcattcctttactggaatgtttactttttgtttttgttttgtctttcctgataaaggcaggactggtatctgtgttgttctttactgtgtttgtaccaaccacagtggcttactatagataggattaaataaatacttgtgcaatgcagattaaattggtgcagattacttattgatgtttgctcacaagaggatttcaatgttcccctttggaatgtcccaccacaacctcccct

SEQ ID NO: 377513 - DNA, 808 bp, Homo sapiens
tctgttcattaaagagaggaggggaaaaaacttaatcaatatggctaaggggagagggaacttcttaacctatatggctaagggagggggaaagaaaccattctggaagcataaaaaaacaaaatgtagctttaaattaaaaccaaacatttattaccatgcagtgactaccctatgttgttaaaagacaaggattcgaattggcttttaaaaaaaattcagccactatatgatccaaaggtacatctttaaaaatatcataatggagaggttgaaaacacataccagacaacaaactaaaaaatttggggtgctactgttgaattagaggcaaaagtattatactgtgcaactttattattttttgctgttaaaaattcagtaaacactgtcaaagcaatcctcataaaactttcgtcctatcagaagacatttagaagtacaaggattggaagaaacacaactgctgctgcaatttggacttttttttcagagtaaatgaacattcgcacacaaaaaaagatatagaggagcgactgctcaaagcttaaactaataactacacactgtactttgtatgctacagaaagtaatttacaagatcaattaaatatttataagatttatactggccacaaagtgaattttaagggattttaaacattgaaattggccaagctctgtggctcacacctgtaatcccaacacttcaggaggccaaggcagcagatcacctgaggtcaggagttcaagaccagcccgaccaacatggtaaaaccctatctctactaaaaatacaaaaaattag

SEQ ID NO: 377514 - DNA, 263 bp, Homo sapiens
accctccactatggaaatgttcttgatttgaggttaaacagatgtgacaactaaatataatcctatctgtactgaagtggaaaatgctataaaggacattgagtcaactgataaaactgataaatacaaacagaggactacatgaaagtgttccatcagtgttaaatttactaatttcaataatggtatcatgattagttaagaaatacggcatatggctagttttaggaaatacacactggaagaatttaggagtaaaggac

SEQ ID NO: 377515 - DNA, 315 bp, Homo sapiens
tctactgagattttgtggcctcttgttacacagcagtaatgagggatacaagcgtacttacagtaaagtaattacactaaagcattgttgttattaaaaactcaaaataatactaatgtaaggcatttgtactgtggttgcatataaatggcagcaattgatatagtttttcctgggaggaaagtagaatacatatctttgtctacatttcagagactagaaaaaattatttggccagtatttgggagaccaccgctctttttggcttgaagtccattattttttccactataccaattactctggtaacagggc

SEQ ID NO: 377516 - DNA, 873 bp, Homo sapiens
gtcctgaagctatacagggaattgctgtctggtcatcatctattgttggaaaaaatcttctgtggattaactcagtggctcaacaggctgaagggaggtaggttggagggaaggaaatgggtgatagaattactttatgtttaaattctttgtattactcactgacattgtagccaaatcttaaaacagctttgtttgctttcagcattgaagcttgctataaatcacttcaccaggaggcatcttcagtttgttctttagttagcagcaatacttgagtgcctttcttatttaagaattagtggcaaatcacactgaaaaacaagacctgtcagttgttttataaatgcttttgaacttgatccctagttgagctccttccccctcagagtctgatacaaattaccctttattgtcagagtatttgctcattagtcctgtgaactctacattcagactcattgcttcctccagatagaggagcttgtaccataatattctgtgtccatttatgttagtttaatgaaatcttgcgaatttaggaaaataaaagaactgctcattcttccatatctttgtagtaacttctgttgtgtgtccttttgtagtcccatatttccatatccatatgctttgtaattcttttttctttcatgtcgttttctccattcttcaccaaaacagcagcatacataggcacatggttttatgatctgtttttcccactcaatatttaaaaaaaaaatttgccatgttaggtaggctgggttcggtgtcttacatctgtattcccagcactttgggaggccgaggcaggtggatcacctgaggtcaggagttgagactagcctaacatggtgaaaccccgtctct

SEQ ID NO: 377517 - DNA, 348 bp, Homo sapiens
catggcaagcactgctaatgctctcccccacacaacaagccctgggtatagtctgcctttggccagtgagaagcagctgaagcataacatgcaattcagtttaatttgaggccgaggtgggcggattacctgaggtcaggagttcgagaccagcctggccaacatggcaaaaccccgtctctactaaaaatacaaaaattagccgggcatggtggtgggtgcctgtaatcccagctacttgggaggctgaggcagggagaatgcttgaacccgggaggcagaggttgcagtgagcctagatggcaccactgcactccagcctgggcaacagagtgagactccatctca

SEQ ID NO: 377518 - DNA, 1174 bp, Homo sapiens
  misc_feature (239)..(239): n is a, c, g, or t
  misc_feature (779)..(779): n is a, c, g, or t
ggtaggttctgacagtttcatccatcacaatacaggcctcaccatgtcactgcctcagactgataaatgcaaaatgacagtcattcatccggtggaatagaagaagccagggaaaatacaacatgaagtcacttatgccatttgatatagctttgcaatgtgtatcttttctctcccctatcttttgttttgtttgtgtacatgccagcatgattatagtctttgcaaaaatatatacnagacaacacatttccctaaaataaaaaagtatgaatttagaaagattatagctacattaaaatgaattcagaatctactatgacataaatagaattagttaaagattaaggttagaaagtaaatgtcacttcttaactttttctctttcttgctattgaggagcacaatctaaaatttgtaggcagatagagtataaaagtaatgtacaattatggcacttatactatttttttcttttatacaacaattctacaaaaataatgactatatgtacacattaaaggaaactgtagatttactgaaaaataggtattaataatatggatatcaacagctgtgtacctttaatttaaaaattaaaaaaataaaaataacagtaaactgaaagtctccattctctcatcttccttttcctatgtttatttttaaacaaattatactgcatatatcgatatctattagggtcatgtgttgacttagcaataaatttaattattggtttagatatcttacagatgtatggaatctctaatatacanatttttgtttaatatgttactgagaaagaagctcaagtgatagaaataacacaggacaggaagtaagacagttctcgtctgaagttcttctctgacagcccacaaactagttaatatatgtgcctgtcacagtctccaccagaagctttatcttactacagagtccagatgcattaaggctgtgttcgagccatgatcttcctctgaagaagaaatgaagaagaaatttatcttatttttggatatagtgttcttagttggcagtttaattattatttttacttcatcactttgtatacgtcatcgcactttctcctggcctataagatctctcctgagaaattttacgttctactttactggaacttcattaaatattatttgcatcatttttc

SEQ ID NO: 377519 - DNA, 921 bp, Homo sapiens
ctttgaagaacaagctgccatgaatcctgcagctacaaggaaatgaactctattaacttgagtgagcttaaaactagatccttccccagtcaagcctccaggtgagaattcaatcctggctggcacctggattgcagcttacagaagacccagctaaggccatgtctggactttaaatccacaggaactgcaagatggtatcagaagtgggacctgcagtggggcatctagcaacccccaggagcattgagtgaccaggcttgggacccaccgggcgcagggtgtccattgttctctcgaagcaactgagaattgtggatattcttcattattccatcatcatctcaaacctcttgggtatagtgtttgactactactgtgaccataaattccaataaaacctaggaaaaatgaaaccactacattaactgaaagggaaggatttgacagcttcttttgggcatatcagaatcgccagcatcactactcttgcactgtgcggccattattaagtgaaataaggattacttgaacacaagcactgcaatgccgctacagtcaatgtgataacccagctggtgactaagtgaccaaggacggggagtatctacagcggggagactctggaaaaagggaggattcacatccagtgccactggggcagggcagaatgagagttcatcatgctacaaagaatggcacagaatatacgacttgtgagtggattatctctggaattttctgttgactacatttgtactacagttgtatgtgggtaacaaactgtggaaagtgaaacttcgggtaagggggaggctaccgtagatagcccagtatttcttattttgtggatttgtttatctttctgctcacatccttttccttctgcattaccattttagtaaaaatagatagcatcca

SEQ ID NO: 377520 - DNA, 572 bp, Homo sapiens
ctttgaagaacaagctgccatgaatcctgcagctacaaggaaatgaactctattaacttgagtgagcttaaaactagatccttccccagtcaagcctccaggtgagaattcaatcctggctggcacctggattgcagcttacagaagacccagctaaggccatgtctggactttaaatccacaggaactgcaagatggtatcagaagtgggacctgcagtggggcatctagcaacccccaggagcattgagtgaccaggcttgggacccaccgggcgcagggtgtccattgttctctcgaagcaactgagaattgtggatattcttcattattccatcatcatctcaaacctcttgggtatagtgtttgactactactgtgaccataaattccaataaaacctaggaaaaatgaaaccactacattaactgaaagggtatcctcctctcaccttcagtgcccggatgcaggaggtaactccctggtgaggaagacctaagtatatggccatagattcataaggagaatggaagagaaaagtgcttttaaaagtgataaatttgagaaaaact

SEQ ID NO: 377521 - DNA, 560 bp, Homo sapiens
ctttgaagaacaagctgccatgaatcctgcagctacaaggaaatgaactctattaacttgagtgagcttaaaactagatccttccccagtcaagcctccaggtgagaattcaatcctggctggcacctggattgcagcttacagaagacccagctaaggccatgtctggactttaaatccacaggaactgcaagatggtatcagaagtgggacctgcagtggggcatctagcaacccccaggagcattgagtgaccaggcttgggacccaccgggcgcagggtgtccattgttctctcgaagcaactgagaattgtggatattcttcattattccatcatcatctcaaacctcttgggtatagtgtttgactactactgtgaccataaattccaataaaacctaggaaaaatgaaaccactacattaactgaaaggatatcagagagacttctctactgcttgggatgcttgttcagagtataatttccatagcagcaagaaaaggaatttttgtttgtggatactttaaagtaaataaagctattatagaaggcaaaag

SEQ ID NO: 377522 - DNA, 457 bp, Homo sapiens
aaatcattccccaacagatggtatcagaagtgggacctgcagtggggcatctagcaacccccaggagcattgagtgaccaggcttgggacccaccgggcgcagggtgtccattgttctctcgaagcaactgagaattgtggatattcttcattattccatcatcatctcaaacctcttgggtatagtgtttgactactactgtgaccataaattccaataaaacctaggaaaaatgaaaccactacattaactgaaaggaaggaagatgattccaagtcatgttatttccaaggaagcaacaataacttcactggacccctgctgatcttaaagtgcagcatgaaaaacagtcttggagacttctagagatgtccaaagtatgcctacggggagcaatagggataccaggagaatctgatggtagacgtatattaaaaaagctatttacatgttaaa

SEQ ID NO: 377523 - DNA, 634 bp, Homo sapiens
ctttgaagaacaagctgccatgaatcctgcagctacaaggaaatgaactctattaacttgagtgagcttaaaactagatccttccccagtcaagcctccaggtgagaattcaatcctggctggcacctggattgcagcttacagaagacccagctaaggccatgtctggactttaaatccacaggaactgcaagatggtatcagaagtgggacctgcagtggggcatctagcaacccccaggagcattgagtgaccaggcttgggacccaccgggcgcagggtgtccattgttctctcgaagcaactgagaattgtggatattcttcattattccatcatcatctcaaacctcttgggtatagtgtttgactactactgtgaccataaattccaataaaacctaggaaaaatgaaaccactacattaactgaaaggaaggaagatgattccaagtcatgttatttccaaggaagcaacaataacttcactggacccctgctgatcttaaagtgcagcatgaaaaacagtcttggagacttctagagatgtccaaagtatgcctacggggagcaatagggataccaggagaatctgatggtagacgtatattaaaaaagctatttacatgttaaa

SEQ ID NO: 377524 - DNA, 953 bp, Homo sapiens
ctttgaagaacaagctgccatgaatcctgcagctacaaggaaatgaactctattaacttgagtgagcttaaaactagatccttccccagtcaagcctccaggtgagaattcaatcctggctggcacctggattgcagcttacagaagacccagctaaggccatgtctggactttaaatccacaggaactgcaagatggtatcagaagtgggacctgcagtggggcatctagcaacccccaggagcattgagtgaccaggcttgggacccaccgggcgcagggtgtccattgttctctcgaagcaactgagaattgtgggacccatgaaggagcatcaagctcagcctcagatattcttcattattccatcatcatctcaaacctcttgggtatagtgtttgactactactgtgaccataaattccaataaaacctaggaaaaatgaaaccactacattaactgaaagggaaggatttgacagcttcttttgggcatatcagaatcgccagcatcactactcttgcactgtgcggccattattaagtgaaataaggattacttgaacacaagcactgcaatgccgctacagtcaatgtgataacccagctggtgactaagtgaccaaggacggggagtatctacagcggggagactctggaaaaagggaggattcacatccagtgccactggggcagggcagaatgagagttcatcatgctacaaagaatggcacagaatatacgacttgtgagtggattatctctggaattttctgttgactacatttgtactacagttgtatgtgggtaacaaactgtggaaagtgaaacttcgggtaagggggaggctaccgtagatagcccagtatttcttattttgtggatttgtttatctttctgctcacatccttttccttctgcattaccattttagtaaaaatagatagcatcca

SEQ ID NO: 377525 - DNA, 746 bp, Homo sapiens
ctttgaagaacaagctgccatgaatcctgcagctacaaggaaatgaactctattaacttgagtgagcttaaaactagatccttccccagtcaagcctccaggtgagaattcaatcctggctggcacctggattgcagcttacagaagacccagctaaggccatgtctggactttaaatccacaggaactgcaagatggtatcagaagtgggacctgcagtggggcatctagcaacccccaggagcattgagtgaccaggcttgggacccaccgggcgcagggtgtccattgttctctcgaagcaactgagaattgtgggacccatgaaggagcatcaagctcagcctcagatattcttcattattccatcatcatctcaaacctcttgggtatagtgtttgactactactgtgaccataaattccaataaaacctaggaaaaatgaaaccactacattaactgaaaggatgtgcctgtcacagtctccaccagaagctttatcttactacagagtccagatgcattaaggctgtgttcgagccatgatcttcctctgaagaagaaatgaagaagaaatttatcttatttttggatatagtgttcttagttggcagtttaattattatttttacttcatcactttgtatacgtcatcgcactttctcctggcctataagatctctcctgagaaattttacgttctactttactggaacttcattaaatattatttgcatcatttttc

SEQ ID NO: 377526 - DNA, 488 bp, Homo sapiens
gaataaatatgatgtgttatgggatcacataagagacgcctttgggaggctgaggcgggtggatcacgaggtcaagagatcgagaccattctggccaacatggtgaaaacttatctctactaaaaatacaaaaattagctgggcgtggtggcaggtgcctgtagtcccagctactcaggaagctgaggcagaagaatcgctttaacccgggaggcagaggttgcagtgagccaagaccacaccactgcactgcatcctgggcaacggagcaagactccatctcaaacaaaaaagaaaaaaaagagagagagagatgcctaacccaaacaggatgggtcagggaatgcttcctggagaaaggggcacctgaacaagaagaacagaaggaactgagtatgcaaagagagatgatgtggtaccttcaggaaacttcagagactcagcatggccagagcataaaggcaacttgggaacaagaagaatgactc

SEQ ID NO: 377527 - DNA, 451 bp, Homo sapiens
cgatgtcaactataagcactccctgcagtctccaaccggggtcctagttctagtcttccggacagctctaggactcagttcatttaaagatcattggtgttggacacaactctcacccaataaacaactcagcaccagctcctcctggcttaggggagcagctcctctgcttccccacatgctctccagaagggtcaagagcgcccctcccagaagagttctaaatgtcccagctgatggcctcccatagacattccatgctggccacagttgcaggcctcagatgggcagccaagcccagtgctgacccatgagcttctccacctctctgcgtcaggagtcaggtgggggtgctgaacagaccctgtagcatggctcctctagcagtctggggccccagggacatcccttttagccccagtggattccctgggacagaggcaagggcggg

SEQ ID NO: 377528 - DNA, 845 bp, Homo sapiens
  misc_feature (666)..(666): n is a, c, g, or t
tgcttcctctctgaaagtctaacctagcatggcagtttctgccaggcatagtggggaaaagaataacaaattgggtgggtgttctctattgggaattagtcaggaagaatttgggggtttagatttttctttattttaaacttgaagtgagatatccctttcagataaatttgaatttaaaagataaatttcgaggcttctttttactccctttcaattttataattgaatattaaggaggaaattgtctgtagttgtcagccatttttctgtggtcataaactcttcagatactatcctctatacaatttttgccatctgctctgctagtgaccattacccaccccattactaaaaatcacacacataacattccattacataccctaaaacaagtgcaagactagcagaccccagactactcttgcttcttgttttaggtttgattttctttattttgttatggggtatgacactggtcaaggttgccgtgtagcatattgggtggctcggcaggatgacctaggggtctgaaattggcctgcgatctgcattgccagtttgacgtcccgaagttgccagtacgtctaagaactcagtccatcctcctatgcgtgtcccaatctcgtggagagagacggtaaggtcgtggactttgagggtggnggcctttctcctggggcgtttggaaaagacagtctaaggctgaagtcccagtctattcgtgaggtaataggccatttggaagtatgcccaggtgagggccatacactgaggctcgcggggaaagtgggctttggataccacggtggttcacgttggcttggacttccataaggtaacag

SEQ ID NO: 377529 - DNA, 210 bp, Homo sapiens
agacatccactttccagaaggtcagggaagaggaatcagctcgttaatagaatagtgatttaccatgttcaaagcttacacacaggccgggcgctgtggttcatgtctgtaataccggcactttgggaggccgaggtgggcggatcacctgaggtcaggagtttgagaccagcctggccaacatggtgaaaccctgtctctactaaaagt

SEQ ID NO: 377530 - DNA, 761 bp, Homo sapiens
cacagacccgcgccgtcgacgacccagcagccgccatggctctgctccgaggtgtgtttgtagttgctgctaagcgaacgccctttggagcttacggaggccttctgaaagacttcactgctactgacttgtctgaatttgctgccaaggctgccttgtctgctggcaaagtctcacctgaaacagttgacagtgtgattatgggcaatgtcctgcagagttcttcagatgctatatatttggcaaggcatgttggtttgcgtgtgggaatcccaaaggagaccccagctctcacgattaataggctctgtggttctggttttcagtccattgtgaatggatgtcaggaaatttgtgttaaagaagctgaagttgttttatgtggaggaaccgaaagcatgagccaagctccctactgtgtcagaaatgtgcgttttggaaccaagcttggatcagatatcaagctggaagattctttatgggtatcattaacagatcagcatgtccagctccccatggcaatgactgcagagaatcttgctgtaaaacacaaaataagcagagaagaatgtgacaaatatgccctgcagtcacagcagagatggaaagctgctaatgatgctggctactttaatgatgaaatggcaccaattgaagtgaagacaaagaaaggaaaacagacaatgcaggtagacgagcatgctcggccccaaaccaccctggaacagttacagaaacttcctccagtattcaagaaagat

SEQ ID NO: 377531 - DNA, 767 bp, Homo sapiens
tttggaaacggagaaaatctaaaaatgaggatgtgaggaaagagtccgctctcaagggtgtgtttgtagttgctgctaagcgaacgccctttggagcttacggaggccttctgaaagacttcactgctactgacttgtctgaatttgctgccaaggctgccttgtctgctggcaaagtctcacctgaaacagttgacagtgtgattatgggcaatgtcctgcagagttcttcagatgctatatatttggcaaggcatgttggtttgcgtgtgggaatcccaaaggagaccccagctctcacgattaataggctctgtggttctggttttcagtccattgtgaatggatgtcaggaaatttgtgttaaagaagctgaagttgttttatgtggaggaaccgaaagcatgagccaagctccctactgtgtcagaaatgtgcgttttggaaccaagcttggatcagatatcaagctggaagattctttatgggtatcattaacagatcagcatgtccagctccccatggcaatgactgcagagaatcttgctgtaaaacacaaaataagcagagaagaatgtgacaaatatgccctgcagtcacagcagagatggaaagctgctaatgatgctggctactttaatgatgaaatggcaccaattgaagtgaagacaaagaaaggaaaacagacaatgcaggtagacgagcatgctcggccccaaaccaccctggaacagttacagaaacttcctccagtattcaagaaagat

SEQ ID NO: 377532 - DNA, 196 bp, Homo sapiens
caaaagaatatctaactttcctttcttgctttgataaaaagcaaagcccaagaggtaaagtcaaggattaccaaccattccccccagccagcatcctggacttggggtttatccccagctttatggggttcctggccaggcaaaaggcaggcagggcttcctagctctctctatctttcctgttcctctcctaaag

SEQ ID NO: 377533 - DNA, 422 bp, Homo sapiens
ttcttttttgagacagggtcttgctctgctctgtcacccaggctggagtgcagtggtgcgattatacgattgtagttcactgtaacctcaaactcctgggttcaaaccatccttctgccaagcctctcaagtagctgggactactatactcaactatttaggttttttttttggagagacagagtctcatgatgtcgcccaggctggtcttaaactcctgggctcaagtgattctcttgccttggcctcccaaagtgctggaattacaggtgtaagccaccatgcccagcccctcgctgaatattttttatgtagtatcctttataatttctttgagggtattgataaattaacttcctctttgtttaatctgtttcgtgtttgttttgatctctgccttttgggttagaggctttccccta

SEQ ID NO: 377534 - DNA, 253 bp, Homo sapiens
cacttctgaccagctaatgttagaaaagggacatgctctgtgtacccaaggcaggcttttggtccccgtggtagctattgagctattcagagggacaggaaataaaactgctaattcaggccaggtgcagtggctcatacctgtaatcccagcaccttggggaggccgaggtgggaggattgcttgagctcaggagtttgagacagggcgataccctgtctctgtgagaaaaaacaaacaaaaaacaaaagaa

SEQ ID NO: 377535 - DNA, 1964 bp, Homo sapiens
  misc_feature (1791)..(1791): n is a, c, g, or t
agcgggtagcagcccgcggagcatcgcagccggcccgggcccccgccagcctccctcctcgcgtccctcggtgtcctccgcgggccggcgcgatgcggctgggcccgaggaccgcggcgttggggctgctgctgctgtgcgccgccgcggccggcgccggcaaggccgaggagctgcactacccgctgggcgagcgccgcagcgactacgaccgcgaggcgctgctgggcgtccaggaagatgtggatgaatatgttaaactcggccacgaagagcagcaaaaaagactgcaggcgatcataaagaaaatcgacttggactcagatggctttctcactgaaagtgaactcagttcatggattcagatgtcttttaagcattatgctatgcaagaagcaaaacaacagtttgttgaatatgataaaaacagtgatgatactgtgacttgggatgaatataacattcagatgtatgatcgtgtgattgactttgatgagaacactgctctggatgatgcagaagaggagtcctttaggaaggaatttgccatttgtaaaaaacagtctttctgttttggcttcttcgatttaatcttcacttaaaggacaagaagcgatttgaaaaagctaaccaggattcaggtcccggtttgagtcttgaagaatttattgcttttgagcatcctgaagaagttgattatatgacggaatttgtcattcaagaagctttagaagaacatgacaaaaatggtgatggatttgttagtttggaagaatttcttggtgattacaggtgggatccaactgcaaatgaagatccagaatggatacttgttgagaaagacagattcgtgaatgattatgacaaagataacgatggcaggcttgatccccaagagctgttaccttgggtagtacctaataatcagggcattgcacaagaggaggcgcttcatctaattgatgaaatggatttgaatggtgacaaaaagctctctgaagaagagattctggaaaacccggacttgtttctcaccagtgaagccacagattatggcagacagctccatgatgactatttctatcatgatgagctttaatctccgagcctgtctcagtagagtactggctccttttataatttgttaccagctttacttttgtgataaaatattgatgttgtattttacactcttaagtcttaaccacagtcagaattatcttaatgtagattataattttggtcttttaggaaaaaaaaacaaaaatctgatatttatttcaaaacgtattgaagcaacaaaatattaatattgtgccatatgacaacaaagtctttcctaaatactccatctgtttagtactgtattgtggaatatttgagttctatttccatacttgaaaacatggaggattttagagatgcctgaacaatattatttaagtagtatgtgaccgagctataaatttttgtttttgttctaagtagatttaatttgggaactgacaggacaatgtttttaggtttagcattttgtttaaaaacctttaaagaaacctttagaaggacttagacctcacatattaatgttgagaagttctgcttaattttaaaatggtttctataaagggttttattgtatgaaatagaactttatatttttgcatatgtatagatagtaattatatttaatgtataactatagcattatggtgagtggaatttgacattgtccaaacctttttcatttttgagtgattaaaaatgaaatgtcctttgttaaaaaaaaanaaacaccaccttatcccacaaccgaccatccaccaccacacaaacaacaaagagggggggggcaaacttccggggcaccaatccccacttttttgagccccccgtgatcaaataaaagccgcggcacaacaggcgaaacaccctcttcagaacctctgcgttatcaccccatt

SEQ ID NO: 377536 - DNA, 1222 bp, Homo sapiens
  misc_feature (1049)..(1049): n is a, c, g, or t
cgcctacacaattctccgatccgtcccctaacaaactaggaggcgtccttgccctattactatccatcctcatcctagcaataatcgccggtcacgagatatctcgtgaccggcgattatgacaaagataacgatggcaggcttgatccccaagagctgttaccttgggtagtacctaataatcagggcattgcacaagaggaggcgcttcatctaattgatgaaatggatttgaatggtgacaaaaagctctctgaagaagagattctggaaaacccggacttgtttctcaccagtgaagccacagattatggcagacagctccatgatgactatttctatcatgatgagctttaatctccgagcctgtctcagtagagtactggctccttttataatttgttaccagctttacttttgtgataaaatattgatgttgtattttacactcttaagtcttaaccacagtcagaattatcttaatgtagattataattttggtcttttaggaaaaaaaaacaaaaatctgatatttatttcaaaacgtattgaagcaacaaaatattaatattgtgccatatgacaacaaagtctttcctaaatactccatctgtttagtactgtattgtggaatatttgagttctatttccatacttgaaaacatggaggattttagagatgcctgaacaatattatttaagtagtatgtgaccgagctataaatttttgtttttgttctaagtagatttaatttgggaactgacaggacaatgtttttaggtttagcattttgtttaaaaacctttaaagaaacctttagaaggacttagacctcacatattaatgttgagaagttctgcttaattttaaaatggtttctataaagggttttattgtatgaaatagaactttatatttttgcatatgtatagatagtaattatatttaatgtataactatagcattatggtgagtggaatttgacattgtccaaacctttttcatttttgagtgattaaaaatgaaatgtcctttgttaaaaaaaaanaaacaccaccttatcccacaaccgaccatccaccaccacacaaacaacaaagagggggggggcaaacttccggggcaccaatccccacttttttgagccccccgtgatcaaataaaagccgcggcacaacaggcgaaacaccctcttcagaacctctgcgttatcaccccatt

SEQ ID NO: 377537 - DNA, 1049 bp, Homo sapiens
  misc_feature (876)..(876): n is a, c, g, or t
ggacgcgtgggtcgacccacgcgtccgggaggcgcttcatctaattgatgaaatggatttgaatggtgacaaaaagctctctgaagaagagattctggaaaacccggacttgtttctcaccagtgaagccacagattatggcagacagctccatgatgactatttctatcatgatgagctttaatctccgagcctgtctcagtagagtactggctccttttataatttgttaccagctttacttttgtgataaaatattgatgttgtattttacactcttaagtcttaaccacagtcagaattatcttaatgtagattataattttggtcttttaggaaaaaaaaacaaaaatctgatatttatttcaaaacgtattgaagcaacaaaatattaatattgtgccatatgacaacaaagtctttcctaaatactccatctgtttagtactgtattgtggaatatttgagttctatttccatacttgaaaacatggaggattttagagatgcctgaacaatattatttaagtagtatgtgaccgagctataaatttttgtttttgttctaagtagatttaatttgggaactgacaggacaatgtttttaggtttagcattttgtttaaaaacctttaaagaaacctttagaaggacttagacctcacatattaatgttgagaagttctgcttaattttaaaatggtttctataaagggttttattgtatgaaatagaactttatatttttgcatatgtatagatagtaattatatttaatgtataactatagcattatggtgagtggaatttgacattgtccaaacctttttcatttttgagtgattaaaaatgaaatgtcctttgttaaaaaaaaanaaacaccaccttatcccacaaccgaccatccaccaccacacaaacaacaaagagggggggggcaaacttccggggcaccaatccccacttttttgagccccccgtgatcaaataaaagccgcggcacaacaggcgaaacaccctcttcagaacctctgcgttatcaccccatt

SEQ ID NO: 377538 - DNA, 1043 bp, Homo sapiens
  misc_feature (12)..(12): n is a, c, g, or t
  misc_feature (870)..(870): n is a, c, g, or t
cccccgggctgntcgaattcggcacgcgcttcatctaattgatgaaatggatttgaatggtgacaaaaagctctctgaagaagagattctggaaaacccggacttgtttctcaccagtgaagccacagattatggcagacagctccatgatgactatttctatcatgatgagctttaatctccgagcctgtctcagtagagtactggctccttttataatttgttaccagctttacttttgtgataaaatattgatgttgtattttacactcttaagtcttaaccacagtcagaattatcttaatgtagattataattttggtcttttaggaaaaaaaaacaaaaatctgatatttatttcaaaacgtattgaagcaacaaaatattaatattgtgccatatgacaacaaagtctttcctaaatactccatctgtttagtactgtattgtggaatatttgagttctatttccatacttgaaaacatggaggattttagagatgcctgaacaatattatttaagtagtatgtgaccgagctataaatttttgtttttgttctaagtagatttaatttgggaactgacaggacaatgtttttaggtttagcattttgtttaaaaacctttaaagaaacctttagaaggacttagacctcacatattaatgttgagaagttctgcttaattttaaaatggtttctataaagggttttattgtatgaaatagaactttatatttttgcatatgtatagatagtaattatatttaatgtataactatagcattatggtgagtggaatttgacattgtccaaacctttttcatttttgagtgattaaaaatgaaatgtcctttgttaaaaaaaaanaaacaccaccttatcccacaaccgaccatccaccaccacacaaacaacaaagagggggggggcaaacttccggggcaccaatccccacttttttgagccccccgtgatcaaataaaagccgcggcacaacaggcgaaacaccctcttcagaacctctgcgttatcaccccatt

SEQ ID NO: 377539 - DNA, 752 bp, Homo sapiens
  misc_feature (579)..(579): n is a, c, g, or t
tatcagctcggtccctgttccccctaaaaatctatttaggaaaaaaaaacaaaaatctgatatttatttcaaaacgtattgaagcaacaaaatattaatattgtgccatatgacaacaaagtctttcctaaatactccatctgtttagtactgtattgtggaatatttgagttctatttccatacttgaaaacatggaggattttagagatgcctgaacaatattatttaagtagtatgtgaccgagctataaatttttgtttttgttctaagtagatttaatttgggaactgacaggacaatgtttttaggtttagcattttgtttaaaaacctttaaagaaacctttagaaggacttagacctcacatattaatgttgagaagttctgcttaattttaaaatggtttctataaagggttttattgtatgaaatagaactttatatttttgcatatgtatagatagtaattatatttaatgtataactatagcattatggtgagtggaatttgacattgtccaaacctttttcatttttgagtgattaaaaatgaaatgtcctttgttaaaaaaaaanaaacaccaccttatcccacaaccgaccatccaccaccacacaaacaacaaagagggggggggcaaacttccggggcaccaatccccacttttttgagccccccgtgatcaaataaaagccgcggcacaacaggcgaaacaccctcttcagaacctctgcgttatcaccccatt

SEQ ID NO: 377540 - DNA, 1911 bp, Homo sapiens
  misc_feature (1738)..(1738): n is a, c, g, or t
agcgggtagcagcccgcggagcatcgcagccggcccgggcccccgccagcctccctcctcgcgtccctcggtgtcctccgcgggccggcgcgatgcggctgggcccgaggaccgcggcgttggggctgctgctgctgtgcgccgccgcggccggcgccggcaaggccgaggagctgcactacccgctgggcgagcgccgcagcgactacgaccgcgaggcgctgctgggcgtccaggaagatgtggatgaatatgttaaactcggccacgaagagcagcaaaaaagactgcaggcgatcataaagaaaatcgacttggactcagatggctttctcactgaaagtgaactcagttcatggattcagatgtcttttaagcattatgctatgcaagaagcaaaacaacagtttgttgaatatgataaaaacagtgatgatactgtgacttgggatgaatataacattcagatgtatgatcgtgtgattgactttgatgagaacactgctctggatgatgcagaagaggagtcctttaggaagcttcacttaaaggacaagaagcgatttgaaaaagctaaccaggattcaggtcccggtttgagtcttgaagaatttattgcttttgagcatcctgaagaagttgattatatgacggaatttgtcattcaagaagctttagaagaacatgacaaaaatggtgatggatttgttagtttggaagaatttcttggtgattacaggtgggatccaactgcaaatgaagatccagaatggatacttgttgagaaagacagattcgtgaatgattatgacaaagataacgatggcaggcttgatccccaagagctgttaccttgggtagtacctaataatcagggcattgcacaagaggaggcgcttcatctaattgatgaaatggatttgaatggtgacaaaaagctctctgaagaagagattctggaaaacccggacttgtttctcaccagtgaagccacagattatggcagacagctccatgatgactatttctatcatgatgagctttaatctccgagcctgtctcagtagagtactggctccttttataatttgttaccagctttacttttgtgataaaatattgatgttgtattttacactcttaagtcttaaccacagtcagaattatcttaatgtagattataattttggtcttttaggaaaaaaaaacaaaaatctgatatttatttcaaaacgtattgaagcaacaaaatattaatattgtgccatatgacaacaaagtctttcctaaatactccatctgtttagtactgtattgtggaatatttgagttctatttccatacttgaaaacatggaggattttagagatgcctgaacaatattatttaagtagtatgtgaccgagctataaatttttgtttttgttctaagtagatttaatttgggaactgacaggacaatgtttttaggtttagcattttgtttaaaaacctttaaagaaacctttagaaggacttagacctcacatattaatgttgagaagttctgcttaattttaaaatggtttctataaagggttttattgtatgaaatagaactttatatttttgcatatgtatagatagtaattatatttaatgtataactatagcattatggtgagtggaatttgacattgtccaaacctttttcatttttgagtgattaaaaatgaaatgtcctttgttaaaaaaaaanaaacaccaccttatcccacaaccgaccatccaccaccacacaaacaacaaagagggggggggcaaacttccggggcaccaatccccacttttttgagccccccgtgatcaaataaaagccgcggcacaacaggcgaaacaccctcttcagaacctctgcgttatcaccccatt

SEQ ID NO: 377541 - DNA, 1926 bp, Homo sapiens
  misc_feature (363)..(363): n is a, c, g, or t
  misc_feature (385)..(385): n is a, c, g, or t
  misc_feature (429)..(429): n is a, c, g, or t
  misc_feature (447)..(447): n is a, c, g, or t
  misc_feature (455)..(455): n is a, c, g, or t
  misc_feature (463)..(463): n is a, c, g, or t
  misc_feature (505)..(505): n is a, c, g, or t
  misc_feature (508)..(508): n is a, c, g, or t
  misc_feature (528)..(528): n is a, c, g, or t
  misc_feature (548)..(548): n is a, c, g, or t
  misc_feature (1753)..(1753): n is a, c, g, or t
agcgggtagcagcccgcggagcatcgcagccggcccgggcccccgccagcctccctcctcgcgtccctcggtgtcctccgcgggccggcgcgatgcggctgggcccgaggaccgcggcgttggggctgctgctgctgtgcgccgccgcggccggcgccggcaaggccgaggagctgcactacccgctgggcgagcgccgcagcgactacgaccgcgaggcgctgctgggcgtccaggaagatgtggatgaatatgttaaactcggccacgaagagcagcaaaaaagactgcaggcgatcataaagaaaatcgacttggactcagatggctttctcactgaaagtgaactcagttcatggaaanaaaagactttaaaacaaaaaanaaagcaaaaaacaaaaaaaaaatttataaaaaaaagaaaaaaanaaagaagaaaatgtgaantgaggaanaaaaaaanaaacaaaagaaagaacaaaaaaaaaaaaaaaaaaaaaaaaanagnacaggaaaaaacaaaaaaanaaaccattaagaaacaacanaaaaaacttcacttaaaggacaagaagcgatttgaaaaagctaaccaggattcaggtcccggtttgagtcttgaagaatttattgcttttgagcatcctgaagaagttgattatatgacggaatttgtcattcaagaagctttagaagaacatgacaaaaatggtgatggatttgttagtttggaagaatttcttggtgattacaggtgggatccaactgcaaatgaagatccagaatggatacttgttgagaaagacagattcgtgaatgattatgacaaagataacgatggcaggcttgatccccaagagctgttaccttgggtagtacctaataatcagggcattgcacaagaggaggcgcttcatctaattgatgaaatggatttgaatggtgacaaaaagctctctgaagaagagattctggaaaacccggacttgtttctcaccagtgaagccacagattatggcagacagctccatgatgactatttctatcatgatgagctttaatctccgagcctgtctcagtagagtactggctccttttataatttgttaccagctttacttttgtgataaaatattgatgttgtattttacactcttaagtcttaaccacagtcagaattatcttaatgtagattataattttggtcttttaggaaaaaaaaacaaaaatctgatatttatttcaaaacgtattgaagcaacaaaatattaatattgtgccatatgacaacaaagtctttcctaaatactccatctgtttagtactgtattgtggaatatttgagttctatttccatacttgaaaacatggaggattttagagatgcctgaacaatattatttaagtagtatgtgaccgagctataaatttttgtttttgttctaagtagatttaatttgggaactgacaggacaatgtttttaggtttagcattttgtttaaaaacctttaaagaaacctttagaaggacttagacctcacatattaatgttgagaagttctgcttaattttaaaatggtttctataaagggttttattgtatgaaatagaactttatatttttgcatatgtatagatagtaattatatttaatgtataactatagcattatggtgagtggaatttgacattgtccaaacctttttcatttttgagtgattaaaaatgaaatgtcctttgttaaaaaaaaanaaacaccaccttatcccacaaccgaccatccaccaccacacaaacaacaaagagggggggggcaaacttccggggcaccaatccccacttttttgagccccccgtgatcaaataaaagccgcggcacaacaggcgaaacaccctcttcagaacctctgcgttatcaccccatt

SEQ ID NO: 377542 - DNA, 1558 bp, Homo sapiens
agcgggtagcagcccgcggagcatcgcagccggcccgggcccccgccagcctccctcctcgcgtccctcggtgtcctccgcgggccggcgcgatgcggctgggcccgaggaccgcggcgttggggctgctgctgctgtgcgccgccgcggccggcgccggcaaggccgaggagctgcactacccgctgggcgagcgccgcagcgactacgaccgcgaggcgctgctgggcgtccaggaagatgtggatgaatatgttaaactcggccacgaagagcagcaaaaaagactgcaggcgatcataaagaaaatcgacttggactcagatggctttctcactgaaagtgaactcagttcatggattcagatgtcttttaagcattatgctatgcaagaagcaaaacaacagtttgttgaatatgataaaaacagtgatgatactgtgacttgggatgaatataacattcagatgtatgatcgtgtgattgactttgatgagaacactgctctggatgatgcagaagaggagtcctttaggaagcttcacttaaaggacaagaagcgatttgaaaaagctaaccaggattcaggtcccggtttgagtcttgaagaatttattgcttttgagcatcctgaagaagttgattatatgacggaatttgtcattcaagaagctttagaagaacatgacaaaaatggtgatggatttgttagtttggaagaatttcttggtgattacaggtgggatccaactgcaaatgaagatccagaatggatacttgttgagaaagacagattcgtgaatgattatgacaaagataacgatggcaggcttgatccccaagagctgttaccttgggtagtacctaataatcagggcattgcacaagaggaggcgcttcatctaattgatgaaatggatttgaatggtgacaaaaagctctctgaagaagagattctggaaaacccggacttgtttctcaccagtgaagccacagattatggcagacagctccatgatgactatttctatcatgatgagctttaatctccgagcctgtctcagtagagtactggctccttttataatttgttaccagctttacttttgtgataaaatattgatgttgtattttacactcttaagtcttaaccacagtcagaattatcttaatgtagattataattttggtcttttaggaaaaaaaaacaaaaatctgatatttatttcaaaacgtattgaagcaacaaaatattaatattgtgccatatgacaacaaagtctttcctaaatactccatctgtttagtactgtattgtggaatatttgagttctatttccatacttggcccgagctataaatttgttgtttttgtactaagaagaataaattttgtctctctgtcgttcattttttcttagcgctttccattttggcgaacaacctttataaagcaacctttttctccgcccttatccccttacctttcttcgccctacaattctcctcctatccttaatttgggcgccttttaatgtatttaatatttcaaataatt

SEQ ID NO: 377543 - DNA, 1055 bp, Homo sapiens
  misc_feature (882)..(882): n is a, c, g, or t
gtctagaggatcccggaatcgggcgggcacaagaggagcgcttcatctaattgatgaaatggatttgaatggtgacaaaaagctctctgaagaagagattctggaaaacccggacttgtttctcaccagtgaagccacagattatggcagacagctccatgatgactatttctatcatgatgagctttaatctccgagcctgtctcagtagagtactggctccttttataatttgttaccagctttacttttgtgataaaatattgatgttgtattttacactcttaagtcttaaccacagtcagaattatcttaatgtagattataattttggtcttttaggaaaaaaaaacaaaaatctgatatttatttcaaaacgtattgaagcaacaaaatattaatattgtgccatatgacaacaaagtctttcctaaatactccatctgtttagtactgtattgtggaatatttgagttctatttccatacttgaaaacatggaggattttagagatgcctgaacaatattatttaagtagtatgtgaccgagctataaatttttgtttttgttctaagtagatttaatttgggaactgacaggacaatgtttttaggtttagcattttgtttaaaaacctttaaagaaacctttagaaggacttagacctcacatattaatgttgagaagttctgcttaattttaaaatggtttctataaagggttttattgtatgaaatagaactttatatttttgcatatgtatagatagtaattatatttaatgtataactatagcattatggtgagtggaatttgacattgtccaaacctttttcatttttgagtgattaaaaatgaaatgtcctttgttaaaaaaaaanaaacaccaccttatcccacaaccgaccatccaccaccacacaaacaacaaagagggggggggcaaacttccggggcaccaatccccacttttttgagccccccgtgatcaaataaaagccgcggcacaacaggcgaaacaccctcttcagaacctctgcgttatcaccccatt

SEQ ID NO: 377544 - DNA, 409 bp, Homo sapiens
cctctccttcccatctagcacgtatctgtgtgtgcaccctgtcatgccactgctgctggtatgaatacaccctgctccccacccccacaccaccacaccaccacaccacgacacagccattaccgttggagcaatggctgacatagagcccactgaccccacccccatcagcatcttgcctctgtgctatcactgctgccaccgtggaactaagcatggagaacagaggacccatccctgccttgaggagccaccactgcccccatgaacatgcacaggggacacacacagtcctgtgcccacaactgcctaacacctagcctaacaccaccaccaggatgaatgcatgcccccagtcttccccatgccatgctgcgaccaccactgatgcaaacgcccagatggaggc

SEQ ID NO: 377545 - DNA, 415 bp, Homo sapiens
tgccatcactcgttcagacggccgattggctgacggtcccgtcaatctccggggacatgactagcctcagacacctcagaaaattattttctgtgtgaggctgaaactgttggaggcttcctgagatcattcttgagaatggagcgaccacataggggtgagcagaaccaagagaatctcagggaaatggagccaatcaactgagttaggtcacccctaacttcaacccacacttgagtgttagagaagattctacaaagagagcagacttttctagtacctttcaattctcaccatgtaggtaaccatattctctagcaactgggatatatgtctttctcaaaagttccagttatctaacaccttcacaggtgtcacagctctccagaaaataaaatcaactctgtgtgtgtgt

SEQ ID NO: 377546 - DNA, 340 bp, Homo sapiens
ggaggaaaaagcacagtggtgcttcccaaactaatctgtaatagaaccctcttaagaacaccaggtacctgttccggaacagatgctgtgaaccccctaatgccctattttcaagtatactcctgtgaagtcttttttttggttgaactttatttagccaattgttgaaattggtcctttgctccatcctctcagtgggtttgtatcatgattccccaatccagtgtttcagctttcccctgagattcttactgtcagcaaatcagatcagcctatgacctatgttctcatacaatgcatagataagcgcttggaaaaggacaggagcaaggacagagcc

SEQ ID NO: 377547 - DNA, 438 bp, Homo sapiens
  misc_feature (234)..(234): n is a, c, g, or t
  misc_feature (290)..(290): n is a, c, g, or t
  misc_feature (350)..(350): n is a, c, g, or t
  misc_feature (392)..(392): n is a, c, g, or t
  misc_feature (400)..(400): n is a, c, g, or t
ttgagtttctaatatttgactggagaaataaaggcttttaaaaccatatgctgtaactttaacgtatttaaaaacacaacgttggctgggcagggtggctcacgcctgcagtctcagcactttgggaggcagaggagggcagatcacgaggtcaggagttcgagaccagcctggccaatacagtgaaaccccgtctctactaaaaatacaaaaattagctgggcgtggtggttnaggccctgggagggctgctggtggtctacccttggaacccagaggttcctttgaantcctttggggatctgtcaactcctgatgctgttatggggcaaccctaaaggtgaaggctnatggcaagaaagtgctcggtgcctttagtgatggcctggttnacctgganaacctcaagggaacctttgccaaatggattaagctgaa

SEQ ID NO: 377548 - DNA, 782 bp, Homo sapiens
ggagtcggtaccccacttttgcggggtgggggggaattgctttctgttttgttaatatctcagtttgggctaggggttcctggacaaatgggcttggttgtagagtactagtccattgtccctacagctcaagagatgcttctgtctgccagctcaggatagtcagagaaggcatcctgtagtcccctctacactagtgggcttttcttcttctttttttgatctacctatcttctggtaagtgtagcccttttggggatcatgactttatggaataggagggtatctcttctcacctcctaccttgagcagacccaaacttctcccccgtccctttgagggctgaaaactcaaatgtcacagacagacgttcacacttcatttggtctgaatattgctagccatggaatttctaaaatttgcttctacgaactatttattagtttcagtgtgctaagcctgctgggaggaaatgctggttgtgagcatcagcacagaagcattctggacggttattagcacaaagttagcatatgattttgtaatctcttctgctaacagtgttttttaaactaactctttacggtgtcctgtgtactaggtactgtgcctgtgctgacttcctagctttattggaagttccttgacagcggaccgaatccctacccgttactctttctccatctccctctgcagtgctgagccctcaaaaacaaaacagcaacaaaaaacacacttgcactagttgctgattggttaatccccacggaaaggttaccaac

SEQ ID NO: 377549 - DNA, 254 bp, Homo sapiens
aatattttttcccctaatgcttggagaatgataacaaaaaagaattttttattggttcatttcatgcttggtaagattccaactgtcaaaacattataaaattttgaacctagaggcacattacatcaccagagtactaattgctgcagagaactggagcgaggcattatgtagtagtatttattagagctgcccaattttaatgttttttggaccagagacacttaaataaaaggttaagctgtttgggcaca

SEQ ID NO: 377550 - DNA, 484 bp, Homo sapiens
gacctcatctctacaaaaaatttaaaaattagctgcgtgtggtggtgcgcacctgtggtcccagctactcagaaggctgaggtgagaagatcacttgagcctaggaggttcagctgcagtgagccttgttagcaccactgtactccagcctaggcaacagatcaagcacctgtctcaaaaaaagaaacaggtattaccaacaattttttaaaatacttttataactacattttaatgtaactagttttctttgtacagtagtcctatgtattttcctctggacttgatagcatgaggttgtagggcttgagctgcaacaaacatgtgaacacaaagggaccaaaaccacggaagctgagctcattaaataaaggaagagaaagattaagtctgatcacacaagtataactgaatcaagcctcaactttggactttttaatattgtgagccagtgaatttgagttggttttctgttacatctgca

SEQ ID NO: 377551 - DNA, 387 bp, Homo sapiens
tctttcatttcaacgttgaggtctagtgcacacagaacttgaaacaccgcactctgtcaacagcaataatccactcagtactgtgggatggatgggttaatggatgagaaaacggcaccaagactgactttgggtatttggtatatttaccgtggttacactctggactggttgattcttctgcatgtgatatagaaaaaagtgctgcatgcggtgaacctgtcagtctgggactgggggtgagttgttgttatgagtttggggtggtgtgaggaaagtgaatgctgcttagctcatctgtagctcattgcaatgaattcagtaagaatggagtacagggattatctgtgtagcataggcatgcaatgtttgaccaagctcttaccc

SEQ ID NO: 377552 - DNA, 195 bp, Homo sapiens
atattaaatatacaacttctatttggttttatctgagccattcctttatactgacagttacatgatgtgatttcagttatatatgtagttattggtaatttttcaaaaatagaatataatgaaaaaacttcatttcaatcattactgaactgcacctacattaatcacaatatacctatgaaaagatgtataaca

SEQ ID NO: 377553 - DNA, 776 bp, Homo sapiens
caacagttcagtttgtgttctggaagtggggaatggaaggagggaaagaggaggagcagggagagaaaagatgaggaacctggtaactgcaaaaaacaattcaagcagttatatttcaccatgtacagtctggaaagaagagttttctagaatcaaggaagaaaataaaagctctgttagtttgctcctgcatttgctatgcctttctaattaaatgattggaaggacttcattattgactcctgctggccgacatgacactaaaatgatatgcatctcaatctgcatactccaagccaaaacccaacatgccatatgcattgcacatgtccttccaaaggctttgggtctggatcctccttcccaccgtggccaacattgctttgtcctcatcaagaactggcagatccaaggagcatacccaagatgacgccacagcctacatgctctctcggcacctacatgctctctcggcacctacatgctctctcggcagcctacatgctctctcggcagcctacacgctctcttggcatgtacagcaggttcttcagccgtgcccaggaggcctggggctccgtggtctatctctgagctgggttctagacctcccaccccacttccaccactgcaacttctgttttacatgttggaaaggggcttcttataatatgccacttaaagaaaaagactgaatttttttaaaataaaaaatatactggcctatgtcattaaaatgaaatatatcccaataaagttgtaaagcaaaaaaaaaa

SEQ ID NO: 377554 - DNA, 113 bp, Homo sapiens
gagattatggtaagtgatataaagtcaagtttttgatcacacatgtatgatgttacattatttaaggtgatgctggttgctgtaacaaataatcctcaaaatcacagtggctt

SEQ ID NO: 377555 - DNA, 134 bp, Homo sapiens
gctactgagtcaaacactgtgcttatgggcaccgatgacagagccaggctgcttggacccaaatcccaattctcccaggcttggggcctttaggcaagttgttcaacttccttagacattcagttcctcatcta

SEQ ID NO: 377556 - DNA, 344 bp, Homo sapiens
gggaacaatcctagaaaacactgactgctttacatttattggaaaaccaggctttggtttttaccataatgtgaatgtctttggtcttactgtctttgtttctggagtgggtagccatgattttgtgagttgtggagatagaatcttatgaatggagaaaacaagatagcaggaacgtctggctaactaatggtaaaatgtgaccttccccctctgcagaagtccctttacgtggacgagtaatgcttgtgttagaaatatatacatatgtaactaacctgcacattgtgcacatgtacgctaaaacttaaagtataataataataaatttaaaaaaaaagaaa

SEQ ID NO: 377557 - DNA, 257 bp, Homo sapiens
gaggtgctcaagtgccagcagggcgtatccagtctggcctttgccctggccttcttgcagcgcatggacatgaagccgctggtggtcctggggctgccggcccctacggctccctcgggctgtctttccttctgggaggccaaggcgcagctggccaagagctgcaaggtgctggtagacgcgcttcgacacaacgccgccgctgctgtgccattttttggcggcgggtctgtgctacgcgctgccgagccggctcc

SEQ ID NO: 377558 - DNA, 393 bp, Homo sapiens
aagtgatgtgcattctgggccagtgaaacctagagcagattggcaggaaaccatctcagtgtcttaccaagctttaccttgttacctttatgtgtacaaaggaaattgtgcccttaaatgatcaagaaaaacaggtgtgtttcccctggataatgagattgtggtttattttcttatttttgcttatctatattttctgcaatgagcatgttttatttgtgaaactaaatatatataaaaatatatggccgggcgcggtggctcacgcctgtaatcccagcactttgggaggctgaggcgggcggatcacgaggtcaggagatcgagaccatcctggctaacacggtgaaaccccgtctctactaaaaatacaaaaaattagccgggcgtggt

SEQ ID NO: 377559 - DNA, 344 bp, Homo sapiens
agatttatacattagtactaacaaggaggtatcttcaagactaaagtataacatttctatctttaatgctctttactcaaatagggtaaaaatttcagtacaaaaaaagtaattgaaattgacatgacaaatactaaatagtagagcaatcctggactatttgaaattaattacacacagcaaaattagccgggcctggtggcgtgcgcctgtagtcccagctgctggggaggctgaggcaggagaatggcgtgaacccgggaggcggagcttgcagtgagccaagatcacgccactgcactccagcctgggcgacagagcaagattccatctcaaaaaaaaaa

SEQ ID NO: 377560 - DNA, 215 bp, Homo sapiens
ggaggcataaacaatatggcaaaatatttataattattgaaattaagtacttatttgaaattttcagtagagttcaaaaagaaaaaattggtaatgaaattgctgcagatgctgtctctgtgtaggaagaaaaaaatggtaaactttgctttgtggtcatcagtttgccgttgtttgggaccttttcatatcatagtttttacccttaaattaaa

SEQ ID NO: 377561 - DNA, 557 bp, Homo sapiens
ggagcctgcaaacaccagtggccacagcctcctggcggccctgccagcagacatggcctagaaacaccgaggaccagcagcgcggtgattacttcgggatcctcaaggaggcgagagtgaccgtgttccccttcaacatcctggacaaccccatgtactggggaagcacagccaactacctgggctgggccatcatgcacgccagccccacgggcctgctcctgacggtgctggtggccctcacctacataatggctctcctatacgaagagcccttcaccgctgagatctaccggcagaaagcctccgggtcccacaagaggagctgattgagctgcaacagctttgctgaaggcctggccagcctcctggcctgccccaagtggcaggccctgcgcagggcgagaatggtgcctgctgctcagggctcgcccccggcgtgggctgccccagtgccttggaacctgctgccttggggaccctggacgtgccgacatatggccattgagctccaacccacacattcccattcaccaataaaggcaccctgaccccaa

SEQ ID NO: 377562 - DNA, 902 bp, Homo sapiens
  misc_feature (1)..(1): n is a, c, g, or t
  misc_feature (5)..(6): n is a, c, g, or t
ngatnngggcgaggagaggcacaccactattgttttaatttgcttttacctgattcctggcagacttctgcgttatgacccggctgctgggctacgtggaccccctggatcccagctttgtggctgccgtcatcaccatcaccttcaatccgctctactggaatgtggttgcacgatgggaacacaagacccgcaagctgagcagggccttcggatccccctacctggcctgctactctctaagcatcaccatcctgctcctgaacttcctgcgctcgcactgcttcacgcaggccatgctgagccagcccaggatggagagcctggacacccccgcggcctacagcctgggcctcgcgctcctgggactgggcgtcgtgctcgtgctctccagcttctttgcactggggttcgctggaactttcctaggtgattacttcgggatcctcaaggaggcgagagtgaccgtgttccccttcaacatcctggacaaccccatgtactggggaagcacagccaactacctgggctgggccatcatgcacgccagccccacgggcctgctcctgacggtgctggtggccctcacctacataatggctctcctatacgaagagcccttcaccgctgagatctaccggcagaaagcctccgggtcccacaagaggagctgattgagctgcaacagctttgctgaaggcctggccagcctcctggcctgccccaagtggcaggccctgcgcagggcgagaatggtgcctgctgctcagggctcgcccccggcgtgggctgccccagtgccttggaacctgctgccttggggaccctggacgtgccgacatatggccattgagctccaacccacacattcccattcaccaataaaggcaccctgaccccaa

SEQ ID NO: 377563 - DNA, 788 bp, Homo sapiens
ctgtgctccagcgcacatcggaattgcctggagtctcccagggctccctctgggtcttctgaggggagaggctcctgtgtgctctggtgtggcgggcacagccaggctaagaagctgcatcctggcctcggagtgtggctgtcgatcaggaatcttcctcaacctggagcttcacgcaggccatgctgagccagcccaggatggagagcctggacacccccgcggcctacagcctgggcctcgcgctcctgggactgggcgtcgtgctcgtgctctccagcttctttgcactggggttcgctggaactttcctaggtgattacttcgggatcctcaaggaggcgagagtgaccgtgttccccttcaacatcctggacaaccccatgtactggggaagcacagccaactacctgggctgggccatcatgcacgccagccccacgggcctgctcctgacggtgctggtggccctcacctacataatggctctcctatacgaagagcccttcaccgctgagatctaccggcagaaagcctccgggtcccacaagaggagctgattgagctgcaacagctttgctgaaggcctggccagcctcctggcctgccccaagtggcaggccctgcgcagggcgagaatggtgcctgctgctcagggctcgcccccggcgtgggctgccccagtgccttggaacctgctgccttggggaccctggacgtgccgacatatggccattgagctccaacccacacattcccattcaccaataaaggcaccctgaccccaa

SEQ ID NO: 377564 - DNA, 646 bp, Homo sapiens
gacccacgcgtccgcggacgcgtgggccttcacgcaggccatgctgagccagcccaggatggagagcctggacacccccgcggcctacagcctgggcctcgcgctcctgggactgggcgtcgtgctcgtgctctccagcttctttgcactggggttcgctggaactttcctaggtgattacttcgggatcctcaaggaggcgagagtgaccgtgttccccttcaacatcctggacaaccccatgtactggggaagcacagccaactacctgggctgggccatcatgcacgccagccccacgggcctgctcctgacggtgctggtggccctcacctacataatggctctcctatacgaagagcccttcaccgctgagatctaccggcagaaagcctccgggtcccacaagaggagctgattgagctgcaacagctttgctgaaggcctggccagcctcctggcctgccccaagtggcaggccctgcgcagggcgagaatggtgcctgctgctcagggctcgcccccggcgtgggctgccccagtgccttggaacctgctgccttggggaccctggacgtgccgacatatggccattgagctccaacccacacattcccattcaccaataaaggcaccctgaccccaa

SEQ ID NO: 377565 - DNA, 902 bp, Homo sapiens
aaatagctagtacgagcctggtgtggaatcggcagaggcgcgctcctgggactgggcgtcgtgctcgtgctctccagcttctttgcactggggttcgctggaactttcctaggtgattacttcgggatcctcaaggaggcgagagtgaccgtgttccccttcaacatcctggacaaccccatgtactggggaagcacagccaactacctgggctgggccatcatgcacgccagccccacgggcctgctcctgacggtgctggtggccctcacctacataatggctctcctatacgaagagcccttcaccgctgagatctaccggcagaaagcctccgggtcccacaagaggagctgattgagctgcaacagctttgctgaaggcctggccagcctcctggcctgccccaagtggcaggccctgcgcagggcgagaatggtgcctgctgctcagggctcgcccccggcgtgggctgccccagtgccttggaacctgctgccttggggaccctggacgtgccgacatatggccattgagctccaacccacacattcccattcaccaataaaggcaccctgaccccaaaaaaaaaaaaaaaaactcgggtttttttttttttttgatagttgtgtctgtttgttgtgtgttgtatatgaagacacccccatcaacaagcagaggggggcggacaccgcgacgaagaggcgccggcagccccctctttgacagaggcgccgaactacagagggggggggcgtctaaacccacagcatggttggtcggggcgcggcagcgcgggacacaccaagcgcgggggcgaagacccacgagtgggggagacggtcgggcccccaataggctgaggatgacgccgcgaagaccggcgggccaccacaggggtg

SEQ ID NO: 377566 - DNA, 1141 bp, Homo sapiens
  misc_feature (14)..(14): n is a, c, g, or t
  misc_feature (65)..(68): n is a, c, g, or t
  misc_feature (70)..(73): n is a, c, g, or t
  misc_feature (75)..(75): n is a, c, g, or t
  misc_feature (82)..(82): n is a, c, g, or t
  misc_feature (88)..(88): n is a, c, g, or t
  misc_feature (93)..(95): n is a, c, g, or t
  misc_feature (98)..(98): n is a, c, g, or t
  misc_feature (112)..(113): n is a, c, g, or t
  misc_feature (137)..(137): n is a, c, g, or t
cacccgtttttccnaaaaaaaaaaaaaaacccccccccccccccccccccccccccccccccccnnnngnnnntntttggcnttttgntaacnnnganacgttaaaaaaaannaggctgacccgtcggattcccggntgtccggttccgggggcgcgtggctgcagcggggcccgcgtggtgcctcctgaggcggcccccggatgaagagatctgggaacccgggagccgaggtaacgaacagctcggtggcagggcctgactgctgcggaggcctcggcaatattgattttagacaggcagacttctgcgttatgacccggctgctgggctacgtggaccccctggatcccagctttgtggctgccgtcatcaccatcaccttcaatccgctctactggaatgtggttgcacgatgggaacacaagacccgcaagctgagcagggccttcggatccccctacctggcctgctactctctaagcatcaccatcctgctcctgaacttcctgcgctcgcactgcttcacgcaggccatgctgagccagcccaggatggagagcctggacacccccgcggcctacagcctgggcctcgcgctcctgggactgggcgtcgtgctcgtgctctccagcttctttgcactggggttcgctggaactttcctaggtgattacttcgggatcctcaaggaggcgagagtgaccgtgttccccttcaacatcctggacaaccccatgtactggggaagcacagccaactacctgggctgggccatcatgcacgccagccccacgggcctgctcctgacggtgctggtggccctcacctacataatggctctcctatacgaagagcccttcaccgctgagatctaccggcagaaagcctccgggtcccacaagaggagctgattgagctgcaacagctttgctgaaggcctggccagcctcctggcctgccccaagtggcaggccctgcgcagggcgagaatggtgcctgctgctcagggctcgcccccggcgtgggctgccccagtgccttggaacctgctgccttggggaccctggacgtgccgacatatggccattgagctccaacccacacattcccattcaccaataaaggcaccctgaccccaa

SEQ ID NO: 377567 - DNA, 1191 bp, Homo sapiens
  misc_feature (14)..(14): n is a, c, g, or t
  misc_feature (65)..(68): n is a, c, g, or t
  misc_feature (70)..(73): n is a, c, g, or t
  misc_feature (75)..(75): n is a, c, g, or t
  misc_feature (82)..(82): n is a, c, g, or t
  misc_feature (88)..(88): n is a, c, g, or t
  misc_feature (93)..(95): n is a, c, g, or t
  misc_feature (98)..(98): n is a, c, g, or t
  misc_feature (112)..(113): n is a, c, g, or t
  misc_feature (137)..(137): n is a, c, g, or t
  misc_feature (1151)..(1151): n is a, c, g, or t
  misc_feature (1154)..(1154): n is a, c, g, or t
  misc_feature (1156)..(1156): n is a, c, g, or t
  misc_feature (1165)..(1165): n is a, c, g, or t
  misc_feature (1174)..(1174): n is a, c, g, or t
cacccgtttttccnaaaaaaaaaaaaaaacccccccccccccccccccccccccccccccccccnnnngnnnntntttggcnttttgntaacnnnganacgttaaaaaaaannaggctgacccgtcggattcccggntgtccggttccgggggcgcgtggctgcagcggggcccgcgtggtgcctcctgaggcggcccccggatgaagagatctgggaacccgggagccgaggtaacgaacagctcggtggcagggcctgactgctgcggaggcctcggcaatattgattttagacaggcagacttctgcgttatgacccggctgctgggctacgtggaccccctggatcccagctttgtggctgccgtcatcaccatcaccttcaatccgctctactggaatgtggttgcacgatgggaacacaagacccgcaagctgagcagggccttcggatccccctacctggcctgctactctctaagcatcaccatcctgctcctgaacttcctgcgctcgcactgcttcacgcaggccatgctgagccagcccaggatggagagcctggacacccccgcggcctacagcctgggcctcgcgctcctgggactgggcgtcgtgctcgtgctctccagcttctttgcactggggttcgctggaactttcctaggtgattacttcgggatcctcaaggaggcgagagtgaccgtgttccccttcaacatcctggacaaccccatgtactggggaagcacagccaactacctgggctgggccatcatgcacgccagccccacgggcctgctcctgacggtgctggtggccctcacctacataatggctctcctatacgaagagcccttcaccgctgagatctaccggcagaaagcctccgggtcccacaagaggagctgattgagctgcaacagctttgctgaaggcctggccagcctcctggcctgccccaagtggcaggccctgcgcagggcgagaatggtgcctgctgctcagggctcgcccccggcgtgggctgccccagtgccttggaacctgctgccttggggaccctggacgtgccgacatatggccattgagctccaacccacacattcccattcaccaataaaggcaccctgaccccaaaaaaaaaaantcngncttgtttgncctagcggnggagctttggggcgctt

SEQ ID NO: 377568 - DNA, 878 bp, Homo sapiens
  misc_feature (25)..(25): n is a, c, g, or t
agcccaggtagttggctgtgcttcnccagtacatggggttgtccaggatgttgaaggggaacacggtcactctcgcccccctggatcccagctttgtggctgccgtcatcaccatcaccttcaatccgctctactggaatgtggttgcacgatgggaacacaagacccgcaagctgagcagggccttcggatccccctacctggcctgctactctctaagcatcaccatcctgctcctgaacttcctgcgctcgcactgcttcacgcaggccatgctgagccagcccaggatggagagcctggacacccccgcggcctacagcctgggcctcgcgctcctgggactgggcgtcgtgctcgtgctctccagcttctttgcactggggttcgctggaactttcctaggtgattacttcgggatcctcaaggaggcgagagtgaccgtgttccccttcaacatcctggacaaccccatgtactggggaagcacagccaactacctgggctgggccatcatgcacgccagccccacgggcctgctcctgacggtgctggtggccctcacctacataatggctctcctatacgaagagcccttcaccgctgagatctaccggcagaaagcctccgggtcccacaagaggagctgattgagctgcaacagctttgctgaaggcctggccagcctcctggcctgccccaagtggcaggccctgcgcagggcgagaatggtgcctgctgctcagggctcgcccccggcgtgggctgccccagtgccttggaacctgctgccttggggaccctggacgtgccgacatatggccattgagctccaacccacacattcccattcaccaataaaggcaccctgaccccaa

SEQ ID NO: 377569 - DNA, 795 bp, Homo sapiens
taacggatgatagagtgcgagaaatccgctacgggcggcagagacccccgaaccgttgagtgtgcacagatgggacgcttttaccgcaagctgagcagggccttcggatccccctacctggcctgctactctctaagcatcaccatcctgctcctgaacttcctgcgctcgcactgcttcacgcaggccatgctgagccagcccaggatggagagcctggacacccccgcggcctacagcctgggcctcgcgctcctgggactgggcgtcgtgctcgtgctctccagcttctttgcactggggttcgctggaactttcctaggtgattacttcgggatcctcaaggaggcgagagtgaccgtgttccccttcaacatcctggacaaccccatgtactggggaagcacagccaactacctgggctgggccatcatgcacgccagccccacgggcctgctcctgacggtgctggtggccctcacctacataatggctctcctatacgaagagcccttcaccgctgagatctaccggcagaaagcctccgggtcccacaagaggagctgattgagctgcaacagctttgctgaaggcctggccagcctcctggcctgccccaagtggcaggccctgcgcagggcgagaatggtgcctgctgctcagggctcgcccccggcgtgggctgccccagtgccttggaacctgctgccttggggaccctggacgtgccgacatatggccattgagctccaacccacacattcccattcaccaataaaggcaccctgaccccaa

SEQ ID NO: 377570 - DNA, 959 bp, Homo sapiens
  misc_feature (14)..(14): n is a, c, g, or t
  misc_feature (65)..(68): n is a, c, g, or t
  misc_feature (70)..(73): n is a, c, g, or t
  misc_feature (75)..(75): n is a, c, g, or t
  misc_feature (82)..(82): n is a, c, g, or t
  misc_feature (88)..(88): n is a, c, g, or t
  misc_feature (93)..(95): n is a, c, g, or t
  misc_feature (98)..(98): n is a, c, g, or t
  misc_feature (112)..(113): n is a, c, g, or t
  misc_feature (137)..(137): n is a, c, g, or t
cacccgtttttccnaaaaaaaaaaaaaaacccccccccccccccccccccccccccccccccccnnnngnnnntntttggcnttttgntaacnnnganacgttaaaaaaaannaggctgacccgtcggattcccggntgtccggttccgggggcgcgtggctgcagcggggcccgcgtggtgcctcctgaggcggcccccggatgaagagatctgggaacccgggagccgaggcagacttctgcgttatgacccggctgctgggctacgtggaccccctggatcccagctttgtggctgccgtcatcaccatcaccttcaatccgctctactggaatgtgcttcacgcaggccatgctgagccagcccaggatggagagcctggacacccccgcggcctacagcctgggcctcgcgctcctgggactgggcgtcgtgctcgtgctctccagcttctttgcactggggttcgctggaactttcctaggtgattacttcgggatcctcaaggaggcgagagtgaccgtgttccccttcaacatcctggacaaccccatgtactggggaagcacagccaactacctgggctgggccatcatgcacgccagccccacgggcctgctcctgacggtgctggtggccctcacctacataatggctctcctatacgaagagcccttcaccgctgagatctaccggcagaaagcctccgggtcccacaagaggagctgattgagctgcaacagctttgctgaaggcctggccagcctcctggcctgccccaagtggcaggccctgcgcagggcgagaatggtgcctgctgctcagggctcgcccccggcgtgggctgccccagtgccttggaacctgctgccttggggaccctggacgtgccgacatatggccattgagctccaacccacacattcccattcaccaataaaggcaccctgaccccaa

SEQ ID NO: 377571 - DNA, 879 bp, Homo sapiens
  misc_feature (14)..(14): n is a, c, g, or t
  misc_feature (65)..(68): n is a, c, g, or t
  misc_feature (70)..(73): n is a, c, g, or t
  misc_feature (75)..(75): n is a, c, g, or t
  misc_feature (82)..(82): n is a, c, g, or t
  misc_feature (88)..(88): n is a, c, g, or t
  misc_feature (93)..(95): n is a, c, g, or t
  misc_feature (98)..(98): n is a, c, g, or t
  misc_feature (112)..(113): n is a, c, g, or t
  misc_feature (137)..(137): n is a, c, g, or t
cacccgtttttccnaaaaaaaaaaaaaaacccccccccccccccccccccccccccccccccccnnnngnnnntntttggcnttttgntaacnnnganacgttaaaaaaaannaggctgacccgtcggattcccggntgtccggttccgggggcgcgtggctgcagcggggcccgcgtggtgcctcctgaggcggcccccggatgaagagatctgggaacccgggagccgaggtaacgaacagctcggtggcagggcctgactgctgcggaggcctcggcaatattgattttagacaggcagacttctgcgttatgacccggctgctgggctacgtggaccccctggatcccagctttgtggctgccgtcatcaccatcaccttcaatccgctctactggaatgtggtgattacttcgggatcctcaaggaggcgagagtgaccgtgttccccttcaacatcctggacaaccccatgtactggggaagcacagccaactacctgggctgggccatcatgcacgccagccccacgggcctgctcctgacggtgctggtggccctcacctacataatggctctcctatacgaagagcccttcaccgctgagatctaccggcagaaagcctccgggtcccacaagaggagctgattgagctgcaacagctttgctgaaggcctggccagcctcctggcctgccccaagtggcaggccctgcgcagggcgagaatggtgcctgctgctcagggctcgcccccggcgtgggctgccccagtgccttggaacctgctgccttggggaccctggacgtgccgacatatggccattgagctccaacccacacattcccattcaccaataaaggcaccctgaccccaa

SEQ ID NO: 377572 - DNA, 1109 bp, Homo sapiens
  misc_feature (14)..(14): n is a, c, g, or t
  misc_feature (65)..(68): n is a, c, g, or t
  misc_feature (70)..(73): n is a, c, g, or t
  misc_feature (75)..(75): n is a, c, g, or t
  misc_feature (82)..(82): n is a, c, g, or t
  misc_feature (88)..(88): n is a, c, g, or t
  misc_feature (93)..(95): n is a, c, g, or t
  misc_feature (98)..(98): n is a, c, g, or t
  misc_feature (112)..(113): n is a, c, g, or t
  misc_feature (137)..(137): n is a, c, g, or t
cacccgtttttccnaaaaaaaaaaaaaaacccccccccccccccccccccccccccccccccccnnnngnnnntntttggcnttttgntaacnnnganacgttaaaaaaaannaggctgacccgtcggattcccggntgtccggttccgggggcgcgtggctgcagcggggcccgcgtggtgcctcctgaggcggcccccggatgaagagatctgggaacccgggagccgaggcagacttctgcgttatgacccggctgctgggctacgtggaccccctggatcccagctttgtggctgccgtcatcaccatcaccttcaatccgctctactggaatgtggttgcacgatgggaacacaagacccgcaagctgagcagggccttcggatccccctacctggcctgctactctctaagcatcaccatcctgctcctgaacttcctgcgctcgcactgcttcacgcaggccatgctgagccagcccaggatggagagcctggacacccccgcggcctacagcctgggcctcgcgctcctgggactgggcgtcgtgctcgtgctctccagcttctttgcactggggttcgctggaactttcctaggtgattacttcgggatcctcaaggaggcgagagtgaccgtgttccccttcaacatcctggacaaccccatgtactggggaagcacagccaactacctgggctgggccatcatcagcccagcacctgcgggagctgtgggatcagaggcacgccagccccacgggcctgctcctgacggtgctggtggccctcacctacataatggctctcctatacgaagagcccttcaccgctgagatctaccggcagaaagcctccgggtcccacaagaggagctgattgagctgcaacagctttgctgaaggcctggccagcctcctggcctgccccaagtggcaggccctgcgcagggcgagaatggtgcctgctgctcagggctcgcccccggcgtgggctgccccagtgccttggaacctgctgccttggggaccctggacgtgccgacatatggccattgagctccaacccacacattcccattcaccaataaaggcaccctgaccccaa

SEQ ID NO: 377573 - DNA, 414 bp, Homo sapiens
atgataaatggatcaggaccgagaacatggggaccctggtcctggcacaaaagccagactcaggaaggggcagtgctgcctgggctcggtcggcccaagtggcccagcgtcggccggagggccagggtcacggcaggaagggccagcctgggcaggtgggccgtggccctgagagaccctggctccagccaggcctgacctgcctctgtcctttcaggcacgccagccccacgggcctgctcctgacggtgctggtggccctcacctacataatggctctcctatacgaagagtgagtaggggctgcggcgggtgggggcgtggctgcccgactggccctgtctctccctctagaacctttccttgtggccagggcaggctcaggacaggctgccgtcagccaggcccactcca

SEQ ID NO: 377574 - DNA, 1008 bp, Homo sapiens
ctgaccacagagcgctgctcccgagaaccctgcacccctcaatggagtaaattaccataaagcctcttccttacccatgctttggggtgttaacagctgaggctattcgtcggtgacctgtgggactcgagctattcctgcagctcagcagacctcctggccgtggcagacttctgcgttatgacccggctgctgggctacgtggaccccctggatcccagctttgtggctgccgtcatcaccatcaccttcaatccgctctactggaatgtggttgcacgatgggaacacaagacccgcaagctgagcagggccttcggatccccctacctggcctgctactctctaagcatcaccatcctgctcctgaacttcctgcgctcgcactgcttcacgcaggccatgctgagccagcccaggatggagagcctggacacccccgcggcctacagcctgggcctcgcgctcctgggactgggcgtcgtgctcgtgctctccagcttctttgcactggggttcgctggaactttcctaggtgattacttcgggatcctcaaggaggcgagagtgaccgtgttccccttcaacatcctggacaaccccatgtactggggaagcacagccaactacctgggctgggccatcatgcacgccagccccacgggcctgctcctgacggtgctggtggccctcacctacataatggctctcctatacgaagagcccttcaccgctgagatctaccggcagaaagcctccgggtcccacaagaggagctgattgagctgcaacagctttgctgaaggcctggccagcctcctggcctgccccaagtggcaggccctgcgcagggcgagaatggtgcctgctgctcagggctcgcccccggcgtgggctgccccagtgccttggaacctgctgccttggggaccctggacgtgccgacatatggccattgagctccaacccacacattcccattcaccaataaaggcaccctgaccccaa

SEQ ID NO: 377575 - DNA, 674 bp, Homo sapiens
ccccacacccccacaccctttcccatgcatgcctcgcttcagtggctgtctagagcttcacgcaggccatgctgagccagcccaggatggagagcctggacacccccgcggcctacagcctgggcctcgcgctcctgggactgggcgtcgtgctcgtgctctccagcttctttgcactggggttcgctggaactttcctaggtgattacttcgggatcctcaaggaggcgagagtgaccgtgttccccttcaacatcctggacaaccccatgtactggggaagcacagccaactacctgggctgggccatcatgcacgccagccccacgggcctgctcctgacggtgctggtggccctcacctacataatggctctcctatacgaagagcccttcaccgctgagatctaccggcagaaagcctccgggtcccacaagaggagctgattgagctgcaacagctttgctgaaggcctggccagcctcctggcctgccccaagtggcaggccctgcgcagggcgagaatggtgcctgctgctcagggctcgcccccggcgtgggctgccccagtgccttggaacctgctgccttggggaccctggacgtgccgacatatggccattgagctccaacccacacattcccattcaccaataaaggcaccctgaccccaa

SEQ ID NO: 377576 - DNA, 433 bp, Homo sapiens
ggtgtggcggggtcaggagctggtcaccagcaaagagcccctggcgatgctccatccggccttgggcctgctgcacgccagccccacgggcctgctcctgacggtgctggtggccctcacctacataatggctctcctatacgaagagcccttcaccgctgagatctaccggcagaaagcctccgggtcccacaagaggagctgattgagctgcaacagctttgctgaaggcctggccagcctcctggcctgccccaagtggcaggccctgcgcagggcgagaatggtgcctgctgctcagggctcgcccccggcgtgggctgccccagtgccttggaacctgctgccttggggaccctggacgtgccgacatatggccattgagctccaacccacacattcccattcaccaataaaggcaccctgaccccaa

SEQ ID NO: 377577 - DNA, 505 bp, Homo sapiens
tcccgtgatcactccccggcgagtccgcgtcccaccacgccccctcttggttgcacgatgggaacacaagacccgcaagctgagcagggccttcggatccccctacctggcctgctactctctaagcatcaccatcctgctcctgaacttcctgcgctcgcactgcttcacgcaggccatgctgagccagcccaggatggagagcctggacacccccgcggcctacagcctgggcctcgcgctcctgggactgggcgtcgtgctcgtgctctccagcttctttgcactggggttcgctggaactttcctaggtgattacttcgggatcctcaaggaggcgagagtgaccgtgttccccttcaacatcctggacaaccccatgtactggggaagcacagccaactacctgggctgggccatcatcacgccagccccacggggcttgctcctgacggtagatctcagcggtgaaggggtcttcggataggagagccattatgtaggt

SEQ ID NO: 377578 - DNA, 1075 bp, Homo sapiens
  misc_feature (14)..(14): n is a, c, g, or t
  misc_feature (65)..(68): n is a, c, g, or t
  misc_feature (70)..(73): n is a, c, g, or t
  misc_feature (75)..(75): n is a, c, g, or t
  misc_feature (82)..(82): n is a, c, g, or t
  misc_feature (88)..(88): n is a, c, g, or t
  misc_feature (93)..(95): n is a, c, g, or t
  misc_feature (98)..(98): n is a, c, g, or t
  misc_feature (112)..(113): n is a, c, g, or t
  misc_feature (137)..(137): n is a, c, g, or t
cacccgtttttccnaaaaaaaaaaaaaaacccccccccccccccccccccccccccccccccccnnnngnnnntntttggcnttttgntaacnnnganacgttaaaaaaaannaggctgacccgtcggattcccggntgtccggttccgggggcgcgtggctgcagcggggcccgcgtggtgcctcctgaggcggcccccggatgaagagatctgggaacccgggagccgaggcagacttctgcgttatgacccggctgctgggctacgtggaccccctggatcccagctttgtggctgccgtcatcaccatcaccttcaatccgctctactggaatgtggttgcacgatgggaacacaagacccgcaagctgagcagggccttcggatccccctacctggcctgctactctctaagcatcaccatcctgctcctgaacttcctgcgctcgcactgcttcacgcaggccatgctgagccagcccaggatggagagcctggacacccccgcggcctacagcctgggcctcgcgctcctgggactgggcgtcgtgctcgtgctctccagcttctttgcactggggttcgctggaactttcctaggtgattacttcgggatcctcaaggaggcgagagtgaccgtgttccccttcaacatcctggacaaccccatgtactggggaagcacagccaactacctgggctgggccatcatgcacgccagccccacgggcctgctcctgacggtgctggtggccctcacctacataatggctctcctatacgaagagcccttcaccgctgagatctaccggcagaaagcctccgggtcccacaagaggagctgattgagctgcaacagctttgctgaaggcctggccagcctcctggcctgccccaagtggcaggccctgcgcagggcgagaatggtgcctgctgctcagggctcgcccccggcgtgggctgccccagtgccttggaacctgctgccttggggaccctggacgtgccgacatatggccattgagctccaacccacacattcccattcaccaataaaggcaccctgaccccaa

SEQ ID NO: 377579 - DNA, 1175 bp, Homo sapiens
  misc_feature (14)..(14): n is a, c, g, or t
  misc_feature (65)..(68): n is a, c, g, or t
  misc_feature (70)..(73): n is a, c, g, or t
  misc_feature (75)..(75): n is a, c, g, or t
  misc_feature (82)..(82): n is a, c, g, or t
  misc_feature (88)..(88): n is a, c, g, or t
  misc_feature (93)..(95): n is a, c, g, or t
  misc_feature (98)..(98): n is a, c, g, or t
  misc_feature (112)..(113): n is a, c, g, or t
  misc_feature (137)..(137): n is a, c, g, or t
cacccgtttttccnaaaaaaaaaaaaaaacccccccccccccccccccccccccccccccccccnnnngnnnntntttggcnttttgntaacnnnganacgttaaaaaaaannaggctgacccgtcggattcccggntgtccggttccgggggcgcgtggctgcagcggggcccgcgtggtgcctcctgaggcggcccccggatgaagagatctgggaacccgggagccgaggtaacgaacagctcggtggcagggcctgactgctgcggaggcctcggcaatattgattttagacaggcagacttctgcgttatgacccggctgctgggctacgtggaccccctggatcccagctttgtggctgccgtcatcaccatcaccttcaatccgctctactggaatgtggttgcacgatgggaacacaagacccgcaagctgagcagggccttcggatccccctacctggcctgctactctctaagcatcaccatcctgctcctgaacttcctgcgctcgcactgcttcacgcaggccatgctgagccagcccaggatggagagcctggacacccccgcggcctacagcctgggcctcgcgctcctgggactgggcgtcgtgctcgtgctctccagcttctttgcactggggttcgctggaactttcctaggtgattacttcgggatcctcaaggaggcgagagtgaccgtgttccccttcaacatcctggacaaccccatgtactggggaagcacagccaactacctgggctgggccatcatcagcccagcacctgcgggagctgtgggatcagaggcacgccagccccacgggcctgctcctgacggtgctggtggccctcacctacataatggctctcctatacgaagagcccttcaccgctgagatctaccggcagaaagcctccgggtcccacaagaggagctgattgagctgcaacagctttgctgaaggcctggccagcctcctggcctgccccaagtggcaggccctgcgcagggcgagaatggtgcctgctgctcagggctcgcccccggcgtgggctgccccagtgccttggaacctgctgccttggggaccctggacgtgccgacatatggccattgagctccaacccacacattcccattcaccaataaaggcaccctgaccccaa

SEQ ID NO: 377580 - DNA, 439 bp, Homo sapiens
gtctgatttatctcagagcccagtgtttggtttgtaattttttcctaactgtgggatgtgatgcctgcacttagccatcaccatagcggttcaaagcgtcaggttttggggggttttttttgtttatttttgttttgaaacagagtctctgttgtccaggctcggagtgcagtggcaagatcttggctcactgcaacctctgcctcctggattcaagagattctcatgcctcagtctcccaagtagctgggactacaggcacacgccaccacgcttgggtaatttttgtatttttaatagagacagggtttcaccatgttggccagactggtctcaaactcctgacctcaaatgacctgcccacctctgccttccaaagtgctaggattacaggcgtgagccacggtggccagtctgtttcttgttggtggtggtggtt

SEQ ID NO: 377581 - DNA, 632 bp, Homo sapiens
atgccagttgattttagaggtgaacattctccctcaagaacagggttctacttaggcttgtcagactagtttataagaaactgaatttttgtccttcatatgtgtcccttttttatttcagggaagcattaagtggataggattccatgaagtgggatgagtaatactcaggctcatataattgttccaaagccagtatcatttgagattcactgtgtgtaatgagatattactgatgggggatgagttgtcactgtgagcagtatggagattgagaatctagctcattctaaatttaatttccttttaatcacaacagacattttttcttcttatgagttagtgtgttctttatgcttatacagtaaactgtcacatcctaggatacaacaagtgctacgaagtttgtttcaatgcacacaaactgtgaatcacttggtaagggataattaggttaaaaaaaggggaagggaactaggccttgggcgtagtaaagagctgcaaagcacattggtttagggggttgaaatgaaattctagagaaaggcacctgaccgttagtaaacctagaccttagaattgctgtcttgaatcagagaaatggtaggagctattatgagttgtgggagaca

SEQ ID NO: 377582 - DNA, 449 bp, Homo sapiens
gccctcttgattatgtgtgccctctccgggcgcccgcgttagcggccgggtggaggtggggagggaagacgctgaggaggaggaggaggcggaggaggcggtggaggggaggtggggggaatcagcaaggacatggctcctgactcctgtgcggaacatggtctctagcgaccggcccgtgtcactggaggacgaggtctcccatagtatgaaggagatgattggaggctgttgcgtttgctcagacgagagaggctgggccgagaacccgctggtttattgcgacgggcacggctgcagcgtcgcggtgcatcaagcttgctatggcattgttcaagtacccactggaccgtggttttgcaggaaatgtgaatctcaggagagagcagccagagtggtaaggactatttatcaaaaacattaaactttagtgagtaggttaggaaatt

SEQ ID NO: 377583 - DNA, 4971 bp, Homo sapiens
gccctcttgattatgtgtgccctctccgggcgcccgcgttagcggccgggtggaggtggggagggaagacgctgaggaggaggaggaggcggaggaggcggtggaggggaggtggggggaatcagcaaggacatggctcctgactcctgtgcggaacgtgagtgactgagcggcaaagcccgaatggtctctagcgaccggcccgtgtcactggaggacgaggtctcccatagtatgaaggagatgattggaggctgttgcgtttgctcagacgagagaggctgggccgagaacccgctggtttattgcgacgggcacggctgcagcgtcgcggtgcatcaagcttgctatggcattgttcaagtacccactggaccgtggttttgcaggaaatgtgaatctcaggagagagcagccagagtgagatgtgaactttgtccccataaggatggagctttaaaaagaacagataatgggggttgggcccatgtggtttgtgccctgtatattccagaggtacaatttgccaatgtttccacaatggaaccaattgttttacagtctgttccgcatgatcgttataataagacttgctacatttgtgatgaacaaggaagagaaagcaaagcagccactggtgcttgcatgacatgtaataaacatggatgtcgacaggctttccatgtaacatgcgctcagtttgccggactgctttgtgaagaagaaggtaatggtgccgataatgtccaatactgtggctactgtaaataccattttagtaagctgaaaaagagcaaacggggatctaataggtcatatgatcaaagtttaagtgattcttcctctcactctcaggataaacatcatgagaaagagaaaaaaaaatataaagagaaggacaaacacaaacagaaacacaagaagcagccagaaccatcacctgcattggttccatccttgactgttactacagaaaaaacttatacaagcactagcaacaactctatatctggatcattgaagcgcttggaagatactactgcacgatttacaaatgcaaatttccaggaagtctctgcacacacctctagtggaaaagatgtttcagagactagagggtcagagggcaaagggaagaaatcttcagctcacagctcaggtcaaaggggaagaaagcctggtggtggaagaaatccaggaacaactgtgtcagcagctagcccttttcctcaaggcagtttttcaggaactccaggcagtgtaaagtcatcttctggaagttcagtgcagtctccccaggatttcctgagctttacagactcagatctgcgtaatgacagttactctcactcccaacagtcatcagcaaccaaagatgtacataaaggagagtctggaagccaggaagggggggtaaatagttttagtaccttaattggcctcccttcaacctcagctgttacttcacagcctaaaagctttgaaaattcacctggagatttgggtaattccagccttcctacagcaggatataagcgggctcaaacttctggcatagaagaagaaactgtaaaggaaaagaaaaggaaaggaaataaacaaagtaagcatgggcctggcagacccaaaggaaacaaaaatcaagagaatgtttctcatctctcagtttcttctgcttcaccaacatcatctgtagcatcagctgcaggaagcataacaagctctagtctgcagaaatctcctacattgctcaggaatggaagtttacagagcctcagtgttggctcatctccagttggttcagaaatttccatgcagtatcggcatgatggagcttgcccaacaactacgttctcagagttgctgaatgcaatacacaacgacagaggtgacagttctacactaacaaagcaagaacttaaattcataggtatttataacagcaatgatgtagcagtatcgtttccaaatgtagtatctggctcgggatctagtactcctgtctccagctctcacttacctcagcagtcttctgggcatttgcaacaagtaggagcgctctctccctcagctgtgtcatctgcagcccctgctgttgctacaactcaggcaaatactctatctggatcttctctcagtcaggcaccatctcatatgtatggcaatagatcaaattcatcaatggcagctcttatagctcagtctgaaaacaatcaaacagatcaagatcttggagacaatagccgcaacctagttggcagaggaagctcaccccgaggaagtctctcgccacgatcccctgtaagcagcttacagattcgctatgatcaaccaggcaacagcagtttggaaaatctgcctccagtagcagccagcatagaacagcttttggagaggcagtggagtgaaggacagcaatttttactagaacagggtactcctagtgacattttaggaatgctgaagtcattacaccaacttcaagttgaaaaccgaagattagaggaacaaattaaaaacttgactgccaaaaaggaacggcttcagttattgaatgcacagctttcagtgccttttccaacaataacagcaaatcctagtccgtctcatcaaatacacacattttcagcacagactgctcctactactgattccttgaacagcagtaagagccctcatataggaaacagctttttacctgataattctcttcctgtattaaatcaggacttaacctccagtggacaaagtaccagcagctcatcagctctttctaccccacctcctgctgggcagagtccggctcaacaaggctcaggagtgagtggagttcagcaggtcaatggcgtgacagtgggggcactagctagtggaatgcagcctgtaacttccaccattcctgccgtgtctgcagtgggtggaataattggagctttgccaggtaaccaactggcaattaatggcattgtaggagctttaaatggggttatgcagactcctgtcacaatgtcccagaaccctacccctctcacccacacaaccgtaccacctaatgcaacacatccaatgccagctacactgactaacagtgcctcaggactaggattactttctgaccagcaacgacaaatacttattcatcaacagcagtttcagcagttgttaaattctcaacagctcacaccagtacacaggcacccccacttcacacagctaccaccaacccatttctcaccatccatggagataatgcaagtcagaaagtagcaagacttagtgataaaactgggcctgtagctcaagagaaaagttgacacctgagaaacatctagaaattgcctatcctgctgttctagcacttcatctggctgcctttgcagtccttttactacagctatgaagaaacgcaacaagaaactcaatgcacaacaaaggattaattgctgcaaggacattcttgtaaggctttgattagttttcttgttgctttgttgcactgaaatggaattcccatgcccctaccccttaccccagttttttgaacatggaaagaaaatttaataactttttaaagtgacataatttacatgcaatatgtttatcaactcaagaatttaatatagttggtacacaactagttttgtttataaattggagatgcaaatagcaaaactaaatacttgctccatttacaaactacttgattttattgtacaagttgaaatatgctcttttgtttgggttacagtatgcttgctctaagtcaaattccaaggaactaatttcttctcctggagttgcattgattcagtattacaaatatatagcacatcacctgggacttggcaatctttgttaaaaaaaaatttcctttctaatgggatttggccaattttggtaatgaagttaggatggtaatgtctgcatctgctaaaggtaattttcttttgagaattgctttctttagtgttaagacctactcatattttgaagaaatcttgagttaagtgagttctgaggctgctgggggaaccagatcaattcaaagctaaatacttctttcagaaaggggccactgtggaaagtgctggtggggtttgcccttgatcaagtgcctccattgtgctgcaagggctgtagacagcagggtgggacagtcagtcctccgagcagcaggaatcatcccgtcacctgcagccttcccatgcttccgcctttattcagaactttctgtgccactgtagatagctcaggcaaaactattacctgggtatttatccactaatgagtcacaagaaaaggagtggatttggtaagaatagagatttgttttatttaaaccacttcccattactgaccattaaaagctcaccactagagttcctgaaacaggtgaaacctgtatgacagcccttccactttggggagccacgcttttgatgtgacagtaccgcagagtgattcccccactgaggatgtcatcatcaaactcttctttggtgtgtgaattattagtggaaaagacccagctgtaattagacctccactgtgtacttagctggaagaacatgttaattctgcaatatgtttcttggttaaacattgcacagttcttacctcatttctgtaaataaagttttgtgaatctgttttgtattgtgacaaattcataagataacattgatattttgatttgtaatatttctaattggtagatttaattgaaaagtaaaattaatttatttttatatgttcaggggaattttaaagtcaaatcttttgtagataatttaaaaaatcagtgtggtttattttacttatttaacccactggttgttattctgtaacagtttgtataaatggtaaattttgaatgtgttgttattttacctagatgtaaaattccacatgtattaaaatgtacaaaatgttttgttaataaaatttaataatgtttataaaaaaaaaaca

SEQ ID NO: 377584 - DNA, 5146 bp, Homo sapiens
gccctcttgattatgtgtgccctctccgggcgcccgcgttagcggccgggtggaggtggggagggaagacgctgaggaggaggaggaggcggaggaggcggtggaggggaggtggggggaatcagcaaggacatggctcctgactcctgtgcggaacgtgagtgactgagcggcaaagcccgaatggtctctagcgaccggcccgtgtcactggaggacgaggtctcccatagtatgaaggagatgattggaggctgttgcgtttgctcagacgagagaggctgggccgagaacccgctggtttattgcgacgggcacggctgcagcgtcgcggtgcatcaagcttgctatggcattgttcaagtacccactggaccgtggttttgcaggaaatgtgaatctcaggagagagcagccagagtggctggagtggagtggcgcaatcattgctcactgcagccttgaagtcctgagctcaagagatcctcctgccgcagcttcctgagtagctgggacttacagagatgtgaactttgtccccataaggatggagctttaaaaagaacagataatgggggttgggcccatgtggtttgtgccctgtatattccagaggtacaatttgccaatgtttccacaatggaaccaattgttttacagtctgttccgcatgatcgttataataagacttgctacatttgtgatgaacaaggaagagaaagcaaagcagccactggtgcttgcatgacatgtaataaacatggatgtcgacaggctttccatgtaacatgcgctcagtttgccggactgctttgtgaagaagaaggtaatggtgccgataatgtccaatactgtggctactgtaaataccattttagtaagctgaaaaagagcaaacggggatctaataggtcatatgatcaaagtttaagtgattcttcctctcactctcaggataaacatcatgagaaagagaaaaaaaaatataaagagaaggacaaacacaaacagaaacacaagaagcagccagaaccatcacctgcattggttccatccttgactgttactacagaaaaaacttatacaagcactagcaacaactctatatctggatcattgaagcgcttggaagatactactgcacgatttacaaatgcaaatttccaggaagtctctgcacacacctctagtggaaaagatgtttcagagactagagggtcagagggcaaagggaagaaatcttcagctcacagctcaggtcaaaggggaagaaagcctggtggtggaagaaatccaggaacaactgtgtcagcagctagcccttttcctcaaggcagtttttcaggaactccaggcagtgtaaagtcatcttctggaagttcagtgcagtctccccaggatttcctgagctttacagactcagatctgcgtaatgacagttactctcactcccaacagtcatcagcaaccaaagatgtacataaaggagagtctggaagccaggaagggggggtaaatagttttagtaccttaattggcctcccttcaacctcagctgttacttcacagcctaaaagctttgaaaattcacctggagatttgggtaattccagccttcctacagcaggatataagcgggctcaaacttctggcatagaagaagaaactgtaaaggaaaagaaaaggaaaggaaataaacaaagtaagcatgggcctggcagacccaaaggaaacaaaaatcaagagaatgtttctcatctctcagtttcttctgcttcaccaacatcatctgtagcatcagctgcaggaagcataacaagctctagtctgcagaaatctcctacattgctcaggaatggaagtttacagagcctcagtgttggctcatctccagttggttcagaaatttccatgcagtatcggcatgatggagcttgcccaacaactacgttctcagagttgctgaatgcaatacacaacggtatttataacagcaatgatgtagcagtatcgtttccaaatgtagtatctggctcgggatctagtactcctgtctccagctctcacttacctcagcagtcttctgggcatttgcaacaagtaggagcgctctctccctcagctgtgtcatctgcagcccctgctgttgctacaactcaggcaaatactctatctggatcttctctcagtcaggcaccatctcatatgtatggcaatagatcaaattcatcaatggcagctcttatagctcagtctgaaaacaatcaaacagatcaagatcttggagacaatagccgcaacctagttggcagaggaagctcaccccgaggaagtctctcgccacgatcccctgtaagcagcttacagattcgctatgatcaaccaggcaacagcagtttggaaaatctgcctccagtagcagccagcatagaacagcttttggagaggcagtggagtgaaggacagcaatttttactagaacagggtactcctagtgacattttaggaatgctgaagtcattacaccaacttcaagttgaaaaccgaagattagaggaacaaattaaaaacttgactgccaaaaaggaacggcttcagttattgaatgcacagctttcagtgccttttccaacaataacagcaaatcctagtccgtctcatcaaatacacacattttcagcacagactgctcctactactgattccttgaacagcagtaagagccctcatataggaaacagctttttacctgataattctcttcctgtattaaatcaggacttaacctccagtggacaaagtaccagcagctcatcagctctttctaccccacctcctgctgggcagagtccggctcaacaaggctcaggagtgagtggagttcagcaggtcaatggcgtgacagtgggggcactagctagtggaatgcagcctgtaacttccaccattcctgccgtgtctgcagtgggtggaataattggagctttgccaggtaaccaactggcaattaatggcattgtaggagctttaaatggggttatgcagactcctgtcacaatgtcccagaaccctacccctctcacccacacaaccgtaccacctaatgcaacacatccaatgccagctacactgactaacagtgcctcaggactaggattactttctgaccagcaacgacaaatacttattcatcaacagcagtttcagcagttgttaaattctcaacagctcacaccagaacaacatcaagcctttttgtatcagttaatgcaacatcaccaccagcagcaccaccaacctgaacttcagcagctgcagatccctggaccaacacaaatacccataaacaaccttcttgcaggtacacaggcacccccacttcacacagctaccaccaacccatttctcaccatccatggagataatgcaagtcagaaagtagcaagacttagtgataaaactgggcctgtagctcaagagaaaagttgacacctgagaaacatctagaaattgcctatcctgctgttctagcacttcatctggctgcctttgcagtccttttactacagctatgaagaaacgcaacaagaaactcaatgcacaacaaaggattaattgctgcaaggacattcttgtaaggctttgattagttttcttgttgctttgttgcactgaaatggaattcccatgcccctaccccttaccccagttttttgaacatggaaagaaaatttaataactttttaaagtgacataatttacatgcaatatgtttatcaactcaagaatttaatatagttggtacacaactagttttgtttataaattggagatgcaaatagcaaaactaaatacttgctccatttacaaactacttgattttattgtacaagttgaaatatgctcttttgtttgggttacagtatgcttgctctaagtcaaattccaaggaactaatttcttctcctggagttgcattgattcagtattacaaatatatagcacatcacctgggacttggcaatctttgttaaaaaaaaatttcctttctaatgggatttggccaattttggtaatgaagttaggatggtaatgtctgcatctgctaaaggtaattttcttttgagaattgctttctttagtgttaagacctactcatattttgaagaaatcttgagttaagtgagttctgaggctgctgggggaaccagatcaattcaaagctaaatacttctttcagaaaggggccactgtggaaagtgctggtggggtttgcccttgatcaagtgcctccattgtgctgcaagggctgtagacagcagggtgggacagtcagtcctccgagcagcaggaatcatcccgtcacctgcagccttcccatgcttccgcctttattcagaactttctgtgccactgtagatagctcaggcaaaactattacctgggtatttatccactaatgagtcacaagaaaaggagtggatttggtaagaatagagatttgttttatttaaaccacttcccattactgaccattaaaagctcaccactagagttcctgaaacaggtgaaacctgtatgacagcccttccactttggggagccacgcttttgatgtgacagtaccgcagagtgattcccccactgaggatgtcatcatcaaactcttctttggtgtgtgaattattagtggaaaagacccagctgtaattagacctccactgtgtacttagctggaagaacatgttaattctgcaatatgtttcttggttaaacattgcacagttcttacctcatttctgtaaataaagttttgtgaatctgttttgtattgtgacaaattcataagataacattgatattttgatttgtaatatttctaattggtagatttaattgaaaagtaaaattaatttatttttatatgttcaggggaattttaaagtcaaatcttttgtagataatttaaaaaatcagtgtggtttattttacttatttaacccactggttgttattctgtaacagtttgtataaatggtaaattttgaatgtgttgttattttacctagatgtaaaattccacatgtattaaaatgtacaaaatgttttgttaataaaatttaataatgtttataaaaaaaaaaca

SEQ ID NO: 377585 - DNA, 5099 bp, Homo sapiens
gccctcttgattatgtgtgccctctccgggcgcccgcgttagcggccgggtggaggtggggagggaagacgctgaggaggaggaggaggcggaggaggcggtggaggggaggtggggggaatcagcaaggacatggctcctgactcctgtgcggaacgtgagtgactgagcggcaaagcccgaatggtctctagcgaccggcccgtgtcactggaggacgaggtctcccatagtatgaaggagatgattggaggctgttgcgtttgctcagacgagagaggctgggccgagaacccgctggtttattgcgacgggcacggctgcagcgtcgcggtgcatcaagcttgctatggcattgttcaagtacccactggaccgtggttttgcaggaaatgtgaatctcaggagagagcagccagagtgttattgcttactgtgagctaagacagttttgcctaacctcgaagtcatgaagagatgtgaactttgtccccataaggatggagctttaaaaagaacagataatgggggttgggcccatgtggtttgtgccctgtatattccagaggtacaatttgccaatgtttccacaatggaaccaattgttttacagtctgttccgcatgatcgttataataagacttgctacatttgtgatgaacaaggaagagaaagcaaagcagccactggtgcttgcatgacatgtaataaacatggatgtcgacaggctttccatgtaacatgcgctcagtttgccggactgctttgtgaagaagaaggtaatggtgccgataatgtccaatactgtggctactgtaaataccattttagtaagctgaaaaagagcaaacggggatctaataggtcatatgatcaaagtttaagtgattcttcctctcactctcaggataaacatcatgagaaagagaaaaaaaaatataaagagaaggacaaacacaaacagaaacacaagaagcagccagaaccatcacctgcattggttccatccttgactgttactacagaaaaaacttatacaagcactagcaacaactctatatctggatcattgaagcgcttggaagatactactgcacgatttacaaatgcaaatttccaggaagtctctgcacacacctctagtggaaaagatgtttcagagactagagggtcagagggcaaagggaagaaatcttcagctcacagctcaggtcaaaggggaagaaagcctggtggtggaagaaatccaggaacaactgtgtcagcagctagcccttttcctcaaggcagtttttcaggaactccaggcagtgtaaagtcatcttctggaagttcagtgcagtctccccaggatttcctgagctttacagactcagatctgcgtaatgacagttactctcactcccaacagtcatcagcaaccaaagatgtacataaaggagagtctggaagccaggaagggggggtaaatagttttagtaccttaattggcctcccttcaacctcagctgttacttcacagcctaaaagctttgaaaattcacctggagatttgggtaattccagccttcctacagcaggatataagcgggctcaaacttctggcatagaagaagaaactgtaaaggaaaagaaaaggaaaggaaataaacaaagtaagcatgggcctggcagacccaaaggaaacaaaaatcaagagaatgtttctcatctctcagtttcttctgcttcaccaacatcatctgtagcatcagctgcaggaagcataacaagctctagtctgcagaaatctcctacattgctcaggaatggaagtttacagagcctcagtgttggctcatctccagttggttcagaaatttccatgcagtatcggcatgatggagcttgcccaacaactacgttctcagagttgctgaatgcaatacacaacggtatttataacagcaatgatgtagcagtatcgtttccaaatgtagtatctggctcgggatctagtactcctgtctccagctctcacttacctcagcagtcttctgggcatttgcaacaagtaggagcgctctctccctcagctgtgtcatctgcagcccctgctgttgctacaactcaggcaaatactctatctggatcttctctcagtcaggcaccatctcatatgtatggcaatagatcaaattcatcaatggcagctcttatagctcagtctgaaaacaatcaaacagatcaagatcttggagacaatagccgcaacctagttggcagaggaagctcaccccgaggaagtctctcgccacgatcccctgtaagcagcttacagattcgctatgatcaaccaggcaacagcagtttggaaaatctgcctccagtagcagccagcatagaacagcttttggagaggcagtggagtgaaggacagcaatttttactagaacagggtactcctagtgacattttaggaatgctgaagtcattacaccaacttcaagttgaaaaccgaagattagaggaacaaattaaaaacttgactgccaaaaaggaacggcttcagttattgaatgcacagctttcagtgccttttccaacaataacagcaaatcctagtccgtctcatcaaatacacacattttcagcacagactgctcctactactgattccttgaacagcagtaagagccctcatataggaaacagctttttacctgataattctcttcctgtattaaatcaggacttaacctccagtggacaaagtaccagcagctcatcagctctttctaccccacctcctgctgggcagagtccggctcaacaaggctcaggagtgagtggagttcagcaggtcaatggcgtgacagtgggggcactagctagtggaatgcagcctgtaacttccaccattcctgccgtgtctgcagtgggtggaataattggagctttgccaggtaaccaactggcaattaatggcattgtaggagctttaaatggggttatgcagactcctgtcacaatgtcccagaaccctacccctctcacccacacaaccgtaccacctaatgcaacacatccaatgccagctacactgactaacagtgcctcaggactaggattactttctgaccagcaacgacaaatacttattcatcaacagcagtttcagcagttgttaaattctcaacagctcacaccagaacaacatcaagcctttttgtatcagttaatgcaacatcaccaccagcagcaccaccaacctgaacttcagcagctgcagatccctggaccaacacaaatacccataaacaaccttcttgcaggtacacaggcacccccacttcacacagctaccaccaacccatttctcaccatccatggagataatgcaagtcagaaagtagcaagacttagtgataaaactgggcctgtagctcaagagaaaagttgacacctgagaaacatctagaaattgcctatcctgctgttctagcacttcatctggctgcctttgcagtccttttactacagctatgaagaaacgcaacaagaaactcaatgcacaacaaaggattaattgctgcaaggacattcttgtaaggctttgattagttttcttgttgctttgttgcactgaaatggaattcccatgcccctaccccttaccccagttttttgaacatggaaagaaaatttaataactttttaaagtgacataatttacatgcaatatgtttatcaactcaagaatttaatatagttggtacacaactagttttgtttataaattggagatgcaaatagcaaaactaaatacttgctccatttacaaactacttgattttattgtacaagttgaaatatgctcttttgtttgggttacagtatgcttgctctaagtcaaattccaaggaactaatttcttctcctggagttgcattgattcagtattacaaatatatagcacatcacctgggacttggcaatctttgttaaaaaaaaatttcctttctaatgggatttggccaattttggtaatgaagttaggatggtaatgtctgcatctgctaaaggtaattttcttttgagaattgctttctttagtgttaagacctactcatattttgaagaaatcttgagttaagtgagttctgaggctgctgggggaaccagatcaattcaaagctaaatacttctttcagaaaggggccactgtggaaagtgctggtggggtttgcccttgatcaagtgcctccattgtgctgcaagggctgtagacagcagggtgggacagtcagtcctccgagcagcaggaatcatcccgtcacctgcagccttcccatgcttccgcctttattcagaactttctgtgccactgtagatagctcaggcaaaactattacctgggtatttatccactaatgagtcacaagaaaaggagtggatttggtaagaatagagatttgttttatttaaaccacttcccattactgaccattaaaagctcaccactagagttcctgaaacaggtgaaacctgtatgacagcccttccactttggggagccacgcttttgatgtgacagtaccgcagagtgattcccccactgaggatgtcatcatcaaactcttctttggtgtgtgaattattagtggaaaagacccagctgtaattagacctccactgtgtacttagctggaagaacatgttaattctgcaatatgtttcttggttaaacattgcacagttcttacctcatttctgtaaataaagttttgtgaatctgttttgtattgtgacaaattcataagataacattgatattttgatttgtaatatttctaattggtagatttaattgaaaagtaaaattaatttatttttatatgttcaggggaattttaaagtcaaatcttttgtagataatttaaaaaatcagtgtggtttattttacttatttaacccactggttgttattctgtaacagtttgtataaatggtaaattttgaatgtgttgttattttacctagatgtaaaattccacatgtattaaaatgtacaaaatgttttgttaataaaatttaataatgtttataaaaaaaaaaca

SEQ ID NO: 377586 - DNA, 4965 bp, Homo sapiens
gccctcttgattatgtgtgccctctccgggcgcccgcgttagcggccgggtggaggtggggagggaagacgctgaggaggaggaggaggcggaggaggcggtggaggggaggtggggggaatcagcaaggacatggctcctgactcctgtgcggaacgtgagtgactgagcggcaaagcccgaatggtctctagcgaccggcccgtgtcactggaggacgaggtctcccatagtatgaaggagatgattggaggctgttgcgtttgctcagacgagagaggctgggccgagaacccgctggtttattgcgacgggcacggctgcagcgtcgcggtgcatcaagatgtgaactttgtccccataaggatggagctttaaaaagaacagataatgggggttgggcccatgtggtttgtgccctgtatattccagaggtacaatttgccaatgtttccacaatggaaccaattgttttacagtctgttccgcatgatcgttataataagacttgctacatttgtgatgaacaaggaagagaaagcaaagcagccactggtgcttgcatgacatgtaataaacatggatgtcgacaggctttccatgtaacatgcgctcagtttgccggactgctttgtgaagaagaaggtaatggtgccgataatgtccaatactgtggctactgtaaataccattttagtaagctgaaaaagagcaaacggggatctaataggtcatatgatcaaagtttaagtgattcttcctctcactctcaggataaacatcatgagaaagagaaaaaaaaatataaagagaaggacaaacacaaacagaaacacaagaagcagccagaaccatcacctgcattggttccatccttgactgttactacagaaaaaacttatacaagcactagcaacaactctatatctggatcattgaagcgcttggaagatactactgcacgatttacaaatgcaaatttccaggaagtctctgcacacacctctagtggaaaagatgtttcagagactagagggtcagagggcaaagggaagaaatcttcagctcacagctcaggtcaaaggggaagaaagcctggtggtggaagaaatccaggaacaactgtgtcagcagctagcccttttcctcaaggcagtttttcaggaactccaggcagtgtaaagtcatcttctggaagttcagtgcagtctccccaggatttcctgagctttacagactcagatctgcgtaatgacagttactctcactcccaacagtcatcagcaaccaaagatgtacataaaggagagtctggaagccaggaagggggggtaaatagttttagtaccttaattggcctcccttcaacctcagctgttacttcacagcctaaaagctttgaaaattcacctggagatttgggtaattccagccttcctacagcaggatataagcgggctcaaacttctggcatagaagaagaaactgtaaaggaaaagaaaaggaaaggaaataaacaaagtaagcatgggcctggcagacccaaaggaaacaaaaatcaagagaatgtttctcatctctcagtttcttctgcttcaccaacatcatctgtagcatcagctgcaggaagcataacaagctctagtctgcagaaatctcctacattgctcaggaatggaagtttacagagcctcagtgttggctcatctccagttggttcagaaatttccatgcagtatcggcatgatggagcttgcccaacaactacgttctcagagttgctgaatgcaatacacaacggtatttataacagcaatgatgtagcagtatcgtttccaaatgtagtatctggctcgggatctagtactcctgtctccagctctcacttacctcagcagtcttctgggcatttgcaacaagtaggagcgctctctccctcagctgtgtcatctgcagcccctgctgttgctacaactcaggcaaatactctatctggatcttctctcagtcaggcaccatctcatatgtatggcaatagatcaaattcatcaatggcagctcttatagctcagtctgaaaacaatcaaacagatcaagatcttggagacaatagccgcaacctagttggcagaggaagctcaccccgaggaagtctctcgccacgatcccctgtaagcagcttacagattcgctatgatcaaccaggcaacagcagtttggaaaatctgcctccagtagcagccagcatagaacagcttttggagaggcagtggagtgaaggacagcaatttttactagaacagggtactcctagtgacattttaggaatgctgaagtcattacaccaacttcaagttgaaaaccgaagattagaggaacaaattaaaaacttgactgccaaaaaggaacggcttcagttattgaatgcacagctttcagtgccttttccaacaataacagcaaatcctagtccgtctcatcaaatacacacattttcagcacagactgctcctactactgattccttgaacagcagtaagagccctcatataggaaacagctttttacctgataattctcttcctgtattaaatcaggacttaacctccagtggacaaagtaccagcagctcatcagctctttctaccccacctcctgctgggcagagtccggctcaacaaggctcaggagtgagtggagttcagcaggtcaatggcgtgacagtgggggcactagctagtggaatgcagcctgtaacttccaccattcctgccgtgtctgcagtgggtggaataattggagctttgccaggtaaccaactggcaattaatggcattgtaggagctttaaatggggttatgcagactcctgtcacaatgtcccagaaccctacccctctcacccacacaaccgtaccacctaatgcaacacatccaatgccagctacactgactaacagtgcctcaggactaggattactttctgaccagcaacgacaaatacttattcatcaacagcagtttcagcagttgttaaattctcaacagctcacaccagaacaacatcaagcctttttgtatcagttaatgcaacatcaccaccagcagcaccaccaacctgaacttcagcagctgcagatccctggaccaacacaaatacccataaacaaccttcttgcaggtacacaggcacccccacttcacacagctaccaccaacccatttctcaccatccatggagataatgcaagtcagaaagtagcaagacttagtgataaaactgggcctgtagctcaagagaaaagttgacacctgagaaacatctagaaattgcctatcctgctgttctagcacttcatctggctgcctttgcagtccttttactacagctatgaagaaacgcaacaagaaactcaatgcacaacaaaggattaattgctgcaaggacattcttgtaaggctttgattagttttcttgttgctttgttgcactgaaatggaattcccatgcccctaccccttaccccagttttttgaacatggaaagaaaatttaataactttttaaagtgacataatttacatgcaatatgtttatcaactcaagaatttaatatagttggtacacaactagttttgtttataaattggagatgcaaatagcaaaactaaatacttgctccatttacaaactacttgattttattgtacaagttgaaatatgctcttttgtttgggttacagtatgcttgctctaagtcaaattccaaggaactaatttcttctcctggagttgcattgattcagtattacaaatatatagcacatcacctgggacttggcaatctttgttaaaaaaaaatttcctttctaatgggatttggccaattttggtaatgaagttaggatggtaatgtctgcatctgctaaaggtaattttcttttgagaattgctttctttagtgttaagacctactcatattttgaagaaatcttgagttaagtgagttctgaggctgctgggggaaccagatcaattcaaagctaaatacttctttcagaaaggggccactgtggaaagtgctggtggggtttgcccttgatcaagtgcctccattgtgctgcaagggctgtagacagcagggtgggacagtcagtcctccgagcagcaggaatcatcccgtcacctgcagccttcccatgcttccgcctttattcagaactttctgtgccactgtagatagctcaggcaaaactattacctgggtatttatccactaatgagtcacaagaaaaggagtggatttggtaagaatagagatttgttttatttaaaccacttcccattactgaccattaaaagctcaccactagagttcctgaaacaggtgaaacctgtatgacagcccttccactttggggagccacgcttttgatgtgacagtaccgcagagtgattcccccactgaggatgtcatcatcaaactcttctttggtgtgtgaattattagtggaaaagacccagctgtaattagacctccactgtgtacttagctggaagaacatgttaattctgcaatatgtttcttggttaaacattgcacagttcttacctcatttctgtaaataaagttttgtgaatctgttttgtattgtgacaaattcataagataacattgatattttgatttgtaatatttctaattggtagatttaattgaaaagtaaaattaatttatttttatatgttcaggggaattttaaagtcaaatcttttgtagataatttaaaaaatcagtgtggtttattttacttatttaacccactggttgttattctgtaacagtttgtataaatggtaaattttgaatgtgttgttattttacctagatgtaaaattccacatgtattaaaatgtacaaaatgttttgttaataaaatttaataatgtttataaaaaaaaaaca

SEQ ID NO: 377587 - DNA, 4992 bp, Homo sapiens
gccctcttgattatgtgtgccctctccgggcgcccgcgttagcggccgggtggaggtggggagggaagacgctgaggaggaggaggaggcggaggaggcggtggaggggaggtggggggaatcagcaaggacatggctcctgactcctgtgcggaacgtgagtgactgagcggcaaagcccgaatggtctctagcgaccggcccgtgtcactggaggacgaggtctcccatagtatgaaggagatgattggaggctgttgcgtttgctcagacgagagaggctgggccgagaacccgctggtttattgcgacgggcacggctgcagcgtcgcggtgcatcaagcttgctatggcattgttcaagtacccactggaccgtggttttgcaggaaatgtgaatctcaggagagagcagccagagtggttgggcccatgtggtttgtgccctgtatattccagaggtacaatttgccaatgtttccacaatggaaccaattgttttacagtctgttccgcatgatcgttataataagacttgctacatttgtgatgaacaaggaagagaaagcaaagcagccactggtgcttgcatgacatgtaataaacatggatgtcgacaggctttccatgtaacatgcgctcagtttgccggactgctttgtgaagaagaaggtaatggtgccgataatgtccaatactgtggctactgtaaataccattttagtaagctgaaaaagagcaaacggggatctaataggtcatatgatcaaagtttaagtgattcttcctctcactctcaggataaacatcatgagaaagagaaaaaaaaatataaagagaaggacaaacacaaacagaaacacaagaagcagccagaaccatcacctgcattggttccatccttgactgttactacagaaaaaacttatacaagcactagcaacaactctatatctggatcattgaagcgcttggaagatactactgcacgatttacaaatgcaaatttccaggaagtctctgcacacacctctagtggaaaagatgtttcagagactagagggtcagagggcaaagggaagaaatcttcagctcacagctcaggtcaaaggggaagaaagcctggtggtggaagaaatccaggaacaactgtgtcagcagctagcccttttcctcaaggcagtttttcaggaactccaggcagtgtaaagtcatcttctggaagttcagtgcagtctccccaggatttcctgagctttacagactcagatctgcgtaatgacagttactctcactcccaacagtcatcagcaaccaaagatgtacataaaggagagtctggaagccaggaagggggggtaaatagttttagtaccttaattggcctcccttcaacctcagctgttacttcacagcctaaaagctttgaaaattcacctggagatttgggtaattccagccttcctacagcaggatataagcgggctcaaacttctggcatagaagaagaaactgtaaaggaaaagaaaaggaaaggaaataaacaaagtaagcatgggcctggcagacccaaaggaaacaaaaatcaagagaatgtttctcatctctcagtttcttctgcttcaccaacatcatctgtagcatcagctgcaggaagcataacaagctctagtctgcagaaatctcctacattgctcaggaatggaagtttacagagcctcagtgttggctcatctccagttggttcagaaatttccatgcagtatcggcatgatggagcttgcccaacaactacgttctcagagttgctgaatgcaatacacaacggtatttataacagcaatgatgtagcagtatcgtttccaaatgtagtatctggctcgggatctagtactcctgtctccagctctcacttacctcagcagtcttctgggcatttgcaacaagtaggagcgctctctccctcagctgtgtcatctgcagcccctgctgttgctacaactcaggcaaatactctatctggatcttctctcagtcaggcaccatctcatatgtatggcaatagatcaaattcatcaatggcagctcttatagctcagtctgaaaacaatcaaacagatcaagatcttggagacaatagccgcaacctagttggcagaggaagctcaccccgaggaagtctctcgccacgatcccctgtaagcagcttacagattcgctatgatcaaccaggcaacagcagtttggaaaatctgcctccagtagcagccagcatagaacagcttttggagaggcagtggagtgaaggacagcaatttttactagaacagggtactcctagtgacattttaggaatgctgaagtcattacaccaacttcaagttgaaaaccgaagattagaggaacaaattaaaaacttgactgccaaaaaggaacggcttcagttattgaatgcacagctttcagtgccttttccaacaataacagcaaatcctagtccgtctcatcaaatacacacattttcagcacagactgctcctactactgattccttgaacagcagtaagagccctcatataggaaacagctttttacctgataattctcttcctgtattaaatcaggacttaacctccagtggacaaagtaccagcagctcatcagctctttctaccccacctcctgctgggcagagtccggctcaacaaggctcaggagtgagtggagttcagcaggtcaatggcgtgacagtgggggcactagctagtggaatgcagcctgtaacttccaccattcctgccgtgtctgcagtgggtggaataattggagctttgccaggtaaccaactggcaattaatggcattgtaggagctttaaatggggttatgcagactcctgtcacaatgtcccagaaccctacccctctcacccacacaaccgtaccacctaatgcaacacatccaatgccagctacactgactaacagtgcctcaggactaggattactttctgaccagcaacgacaaatacttattcatcaacagcagtttcagcagttgttaaattctcaacagctcacaccagaacaacatcaagcctttttgtatcagttaatgcaacatcaccaccagcagcaccaccaacctgaacttcagcagctgcagatccctggaccaacacaaatacccataaacaaccttcttgcaggtacacaggcacccccacttcacacagctaccaccaacccatttctcaccatccatggagataatgcaagtcagaaagtagcaagacttagtgataaaactgggcctgtagctcaagagaaaagttgacacctgagaaacatctagaaattgcctatcctgctgttctagcacttcatctggctgcctttgcagtccttttactacagctatgaagaaacgcaacaagaaactcaatgcacaacaaaggattaattgctgcaaggacattcttgtaaggctttgattagttttcttgttgctttgttgcactgaaatggaattcccatgcccctaccccttaccccagttttttgaacatggaaagaaaatttaataactttttaaagtgacataatttacatgcaatatgtttatcaactcaagaatttaatatagttggtacacaactagttttgtttataaattggagatgcaaatagcaaaactaaatacttgctccatttacaaactacttgattttattgtacaagttgaaatatgctcttttgtttgggttacagtatgcttgctctaagtcaaattccaaggaactaatttcttctcctggagttgcattgattcagtattacaaatatatagcacatcacctgggacttggcaatctttgttaaaaaaaaatttcctttctaatgggatttggccaattttggtaatgaagttaggatggtaatgtctgcatctgctaaaggtaattttcttttgagaattgctttctttagtgttaagacctactcatattttgaagaaatcttgagttaagtgagttctgaggctgctgggggaaccagatcaattcaaagctaaatacttctttcagaaaggggccactgtggaaagtgctggtggggtttgcccttgatcaagtgcctccattgtgctgcaagggctgtagacagcagggtgggacagtcagtcctccgagcagcaggaatcatcccgtcacctgcagccttcccatgcttccgcctttattcagaactttctgtgccactgtagatagctcaggcaaaactattacctgggtatttatccactaatgagtcacaagaaaaggagtggatttggtaagaatagagatttgttttatttaaaccacttcccattactgaccattaaaagctcaccactagagttcctgaaacaggtgaaacctgtatgacagcccttccactttggggagccacgcttttgatgtgacagtaccgcagagtgattcccccactgaggatgtcatcatcaaactcttctttggtgtgtgaattattagtggaaaagacccagctgtaattagacctccactgtgtacttagctggaagaacatgttaattctgcaatatgtttcttggttaaacattgcacagttcttacctcatttctgtaaataaagttttgtgaatctgttttgtattgtgacaaattcataagataacattgatattttgatttgtaatatttctaattggtagatttaattgaaaagtaaaattaatttatttttatatgttcaggggaattttaaagtcaaatcttttgtagataatttaaaaaatcagtgtggtttattttacttatttaacccactggttgttattctgtaacagtttgtataaatggtaaattttgaatgtgttgttattttacctagatgtaaaattccacatgtattaaaatgtacaaaatgttttgttaataaaatttaataatgtttataaaaaaaaaaca

SEQ ID NO: 377588 - DNA, 4626 bp, Homo sapiens
ggatctaactgcgaaccaaaggttgcaccaacaaccgcttggaatgctgcaacaatggttgggcccatgtggtttgtgccctgtatattccagaggtacaatttgccaatgtttccacaatggaaccaattgttttacagtctgttccgcatgatcgttataataagacttgctacatttgtgatgaacaaggaagagaaagcaaagcagccactggtgcttgcatgacatgtaataaacatggatgtcgacaggctttccatgtaacatgcgctcagtttgccggactgctttgtgaagaagaaggtaatggtgccgataatgtccaatactgtggctactgtaaataccattttagtaagctgaaaaagagcaaacggggatctaataggtcatatgatcaaagtttaagtgattcttcctctcactctcaggataaacatcatgagaaagagaaaaaaaaatataaagagaaggacaaacacaaacagaaacacaagaagcagccagaaccatcacctgcattggttccatccttgactgttactacagaaaaaacttatacaagcactagcaacaactctatatctggatcattgaagcgcttggaagatactactgcacgatttacaaatgcaaatttccaggaagtctctgcacacacctctagtggaaaagatgtttcagagactagagggtcagagggcaaagggaagaaatcttcagctcacagctcaggtcaaaggggaagaaagcctggtggtggaagaaatccaggaacaactgtgtcagcagctagcccttttcctcaaggcagtttttcaggaactccaggcagtgtaaagtcatcttctggaagttcagtgcagtctccccaggatttcctgagctttacagactcagatctgcgtaatgacagttactctcactcccaacagtcatcagcaaccaaagatgtacataaaggagagtctggaagccaggaagggggggtaaatagttttagtaccttaattggcctcccttcaacctcagctgttacttcacagcctaaaagctttgaaaattcacctggagatttgggtaattccagccttcctacagcaggatataagcgggctcaaacttctggcatagaagaagaaactgtaaaggaaaagaaaaggaaaggaaataaacaaagtaagcatgggcctggcagacccaaaggaaacaaaaatcaagagaatgtttctcatctctcagtttcttctgcttcaccaacatcatctgtagcatcagctgcaggaagcataacaagctctagtctgcagaaatctcctacattgctcaggaatggaagtttacagagcctcagtgttggctcatctccagttggttcagaaatttccatgcagtatcggcatgatggagcttgcccaacaactacgttctcagagttgctgaatgcaatacacaacggtatttataacagcaatgatgtagcagtatcgtttccaaatgtagtatctggctcgggatctagtactcctgtctccagctctcacttacctcagcagtcttctgggcatttgcaacaagtaggagcgctctctccctcagctgtgtcatctgcagcccctgctgttgctacaactcaggcaaatactctatctggatcttctctcagtcaggcaccatctcatatgtatggcaatagatcaaattcatcaatggcagctcttatagctcagtctgaaaacaatcaaacagatcaagatcttggagacaatagccgcaacctagttggcagaggaagctcaccccgaggaagtctctcgccacgatcccctgtaagcagcttacagattcgctatgatcaaccaggcaacagcagtttggaaaatctgcctccagtagcagccagcatagaacagcttttggagaggcagtggagtgaaggacagcaatttttactagaacagggtactcctagtgacattttaggaatgctgaagtcattacaccaacttcaagttgaaaaccgaagattagaggaacaaattaaaaacttgactgccaaaaaggaacggcttcagttattgaatgcacagctttcagtgccttttccaacaataacagcaaatcctagtccgtctcatcaaatacacacattttcagcacagactgctcctactactgattccttgaacagcagtaagagccctcatataggaaacagctttttacctgataattctcttcctgtattaaatcaggacttaacctccagtggacaaagtaccagcagctcatcagctctttctaccccacctcctgctgggcagagtccggctcaacaaggctcaggagtgagtggagttcagcaggtcaatggcgtgacagtgggggcactagctagtggaatgcagcctgtaacttccaccattcctgccgtgtctgcagtgggtggaataattggagctttgccaggtaaccaactggcaattaatggcattgtaggagctttaaatggggttatgcagactcctgtcacaatgtcccagaaccctacccctctcacccacacaaccgtaccacctaatgcaacacatccaatgccagctacactgactaacagtgcctcaggactaggattactttctgaccagcaacgacaaatacttattcatcaacagcagtttcagcagttgttaaattctcaacagctcacaccagaacaacatcaagcctttttgtatcagttaatgcaacatcaccaccagcagcaccaccaacctgaacttcagcagctgcagatccctggaccaacacaaatacccataaacaaccttcttgcaggtacacaggcacccccacttcacacagctaccaccaacccatttctcaccatccatggagataatgcaagtcagaaagtagcaagacttagtgataaaactgggcctgtagctcaagagaaaagttgacacctgagaaacatctagaaattgcctatcctgctgttctagcacttcatctggctgcctttgcagtccttttactacagctatgaagaaacgcaacaagaaactcaatgcacaacaaaggattaattgctgcaaggacattcttgtaaggctttgattagttttcttgttgctttgttgcactgaaatggaattcccatgcccctaccccttaccccagttttttgaacatggaaagaaaatttaataactttttaaagtgacataatttacatgcaatatgtttatcaactcaagaatttaatatagttggtacacaactagttttgtttataaattggagatgcaaatagcaaaactaaatacttgctccatttacaaactacttgattttattgtacaagttgaaatatgctcttttgtttgggttacagtatgcttgctctaagtcaaattccaaggaactaatttcttctcctggagttgcattgattcagtattacaaatatatagcacatcacctgggacttggcaatctttgttaaaaaaaaatttcctttctaatgggatttggccaattttggtaatgaagttaggatggtaatgtctgcatctgctaaaggtaattttcttttgagaattgctttctttagtgttaagacctactcatattttgaagaaatcttgagttaagtgagttctgaggctgctgggggaaccagatcaattcaaagctaaatacttctttcagaaaggggccactgtggaaagtgctggtggggtttgcccttgatcaagtgcctccattgtgctgcaagggctgtagacagcagggtgggacagtcagtcctccgagcagcaggaatcatcccgtcacctgcagccttcccatgcttccgcctttattcagaactttctgtgccactgtagatagctcaggcaaaactattacctgggtatttatccactaatgagtcacaagaaaaggagtggatttggtaagaatagagatttgttttatttaaaccacttcccattactgaccattaaaagctcaccactagagttcctgaaacaggtgaaacctgtatgacagcccttccactttggggagccacgcttttgatgtgacagtaccgcagagtgattcccccactgaggatgtcatcatcaaactcttctttggtgtgtgaattattagtggaaaagacccagctgtaattagacctccactgtgtacttagctggaagaacatgttaattctgcaatatgtttcttggttaaacattgcacagttcttacctcatttctgtaaataaagttttgtgaatctgttttgtattgtgacaaattcataagataacattgatattttgatttgtaatatttctaattggtagatttaattgaaaagtaaaattaatttatttttatatgttcaggggaattttaaagtcaaatcttttgtagataatttaaaaaatcagtgtggtttattttacttatttaacccactggttgttattctgtaacagtttgtataaatggtaaattttgaatgtgttgttattttacctagatgtaaaattccacatgtattaaaatgtacaaaatgttttgttaataaaatttaataatgtttataaaaaaaaaaca

SEQ ID NO: 377589 - DNA, 4032 bp, Homo sapiens
tttttattgtctgaaatggaaatgtttcaacagagccatcagcaagcaggaatgcagcagtgtctcctgtgacttttgtgattgatgtgttcagttctcagttctatgcaatgaaagtaacataacactgggcttttctgtgaatagcctaaacctttatttgcataattcatgaaattgtattacacaaacttggttaaaaaaatcctgttagagaatttctgcagtgtttagtaatcctgtgaatgttcaccagttgacgttttgtcgcatttgtctcttgtactgtcttaatgagccactggatttgctttgtttcattgcatccttaaggattgggttgacatgtccaagtagtcatgcctgtttgggggaagggaatggatttagcagttcaccaagaatggatcagtctgtctttaccgtttaagggtcagaggttacctgactcagaataaggggaggacaaccttgaaagaggccagataaggtgatttttataaggaactaactgcaggggaaatacaagttactttccaagcagagatatatgatattacctaaggaatattttgaaaaagttaatttttttcctttaaaattcaggattctgtattccctacttgtttttgtcaatttggaaatttagtgttttatgtaattttattcttggtgtaaggctctagtgtctaacaccataattttagtcttggtgtgcagctctatgtaaatgtgttttatggcttgtcttgggatgcaaagtgttaaaaaatacaaagcatacggatttgctgtgataagcatacagattagctgtccacagctgtgattcattactttaaccgtagaaattaaaagtggctgaggggagggtacagcaaatgcaaaccacgcttctgtgctgtaaaattgaaaggaatgaaagaacagaacataatccatggccttctacacccacaaaaacgtgtagggacaacgccttacatgccacagttcagcaattctgaactagcaacatgctagatcttctattttcgtgggaactgcaaagatagtggtaaaggtttaatgtatgttttaggaaaaatcagggcaagagtttaaaacctcttatctagtgagagtcactttatcagctctgaaatatttacactacagatcaagatcttggagacaatagccgcaacctagttggcagaggaagctcaccccgaggaagtctctcgccacgatcccctgtaagcagcttacagattcgctatgatcaaccaggcaacagcagtttggaaaatctgcctccagtagcagccagcatagaacagcttttggagaggcagtggagtgaaggacagcaatttttactagaacagggtactcctagtgacattttaggaatgctgaagtcattacaccaacttcaagttgaaaaccgaagattagaggaacaaattaaaaacttgactgccaaaaaggaacggcttcagttattgaatgcacagctttcagtgccttttccaacaataacagcaaatcctagtccgtctcatcaaatacacacattttcagcacagactgctcctactactgattccttgaacagcagtaagagccctcatataggaaacagctttttacctgataattctcttcctgtattaaatcaggacttaacctccagtggacaaagtaccagcagctcatcagctctttctaccccacctcctgctgggcagagtccggctcaacaaggctcaggagtgagtggagttcagcaggtcaatggcgtgacagtgggggcactagctagtggaatgcagcctgtaacttccaccattcctgccgtgtctgcagtgggtggaataattggagctttgccaggtaaccaactggcaattaatggcattgtaggagctttaaatggggttatgcagactcctgtcacaatgtcccagaaccctacccctctcacccacacaaccgtaccacctaatgcaacacatccaatgccagctacactgactaacagtgcctcaggactaggattactttctgaccagcaacgacaaatacttattcatcaacagcagtttcagcagttgttaaattctcaacagctcacaccagaacaacatcaagcctttttgtatcagttaatgcaacatcaccaccagcagcaccaccaacctgaacttcagcagctgcagatccctggaccaacacaaatacccataaacaaccttcttgcaggtacacaggcacccccacttcacacagctaccaccaacccatttctcaccatccatggagataatgcaagtcagaaagtagcaagacttagtgataaaactgggcctgtagctcaagagaaaagttgacacctgagaaacatctagaaattgcctatcctgctgttctagcacttcatctggctgcctttgcagtccttttactacagctatgaagaaacgcaacaagaaactcaatgcacaacaaaggattaattgctgcaaggacattcttgtaaggctttgattagttttcttgttgctttgttgcactgaaatggaattcccatgcccctaccccttaccccagttttttgaacatggaaagaaaatttaataactttttaaagtgacataatttacatgcaatatgtttatcaactcaagaatttaatatagttggtacacaactagttttgtttataaattggagatgcaaatagcaaaactaaatacttgctccatttacaaactacttgattttattgtacaagttgaaatatgctcttttgtttgggttacagtatgcttgctctaagtcaaattccaaggaactaatttcttctcctggagttgcattgattcagtattacaaatatatagcacatcacctgggacttggcaatctttgttaaaaaaaaatttcctttctaatgggatttggccaattttggtaatgaagttaggatggtaatgtctgcatctgctaaaggtaattttcttttgagaattgctttctttagtgttaagacctactcatattttgaagaaatcttgagttaagtgagttctgaggctgctgggggaaccagatcaattcaaagctaaatacttctttcagaaaggggccactgtggaaagtgctggtggggtttgcccttgatcaagtgcctccattgtgctgcaagggctgtagacagcagggtgggacagtcagtcctccgagcagcaggaatcatcccgtcacctgcagccttcccatgcttccgcctttattcagaactttctgtgccactgtagatagctcaggcaaaactattacctgggtatttatccactaatgagtcacaagaaaaggagtggatttggtaagaatagagatttgttttatttaaaccacttcccattactgaccattaaaagctcaccactagagttcctgaaacaggtgaaacctgtatgacagcccttccactttggggagccacgcttttgatgtgacagtaccgcagagtgattcccccactgaggatgtcatcatcaaactcttctttggtgtgtgaattattagtggaaaagacccagctgtaattagacctccactgtgtacttagctggaagaacatgttaattctgcaatatgtttcttggttaaacattgcacagttcttacctcatttctgtaaataaagttttgtgaatctgttttgtattgtgacaaattcataagataacattgatattttgatttgtaatatttctaattggtagatttaattgaaaagtaaaattaatttatttttatatgttcaggggaattttaaagtcaaatcttttgtagataatttaaaaaatcagtgtggtttattttacttatttaacccactggttgttattctgtaacagtttgtataaatggtaaattttgaatgtgttgttattttacctagatgtaaaattccacatgtattaaaatgtacaaaatgttttgttaataaaatttaataatgtttataaaaaaaaaaca

SEQ ID NO: 377590 - DNA, 2560 bp, Homo sapiens
ttgaatgtttgttcaaaactaggggactaaagctatgttgttattaagcatacttttgggggaataaatacttttaaatggatttgcagtgggtactagaaagctatttcctgtagctctcttccttggtgtttagttttaccattgggaccattagaaaaggataggtcaaatcagtggtatgtttggattctttgtttcaaatatgtgtttacttagtgtgagttaaattatccttgaataattaaagataaattattacatacgcttgttagaaacacatgtaaatttctattccataaaatgagttagggcctatttgttttataataaaaacatttcttgacaatgtgaattcttgtttagctgtacacatggatgtatataaacatacatatatatagaaattgtacataactgttttcagagtgtttggattcagaattgtacttaagttattaaacatcaaattgaaaagttgtctttcatttttagacttctaaaaatgcattagaggtgtgtagtaaaaagtaagaattgtaatcatttttcagtgcctcaggactaggattactttctgaccagcaacgacaaatacttattcatcaacagcagtttcagcagttgttaaattctcaacagctcacaccagaacaacatcaagcctttttgtatcagttaatgcaacatcaccaccagcagcaccaccaacctgaacttcagcagctgcagatccctggaccaacacaaatacccataaacaaccttcttgcaggtacacaggcacccccacttcacacagctaccaccaacccatttctcaccatccatggagataatgcaagtcagaaagtagcaagacttagtgataaaactgggcctgtagctcaagagaaaagttgacacctgagaaacatctagaaattgcctatcctgctgttctagcacttcatctggctgcctttgcagtccttttactacagctatgaagaaacgcaacaagaaactcaatgcacaacaaaggattaattgctgcaaggacattcttgtaaggctttgattagttttcttgttgctttgttgcactgaaatggaattcccatgcccctaccccttaccccagttttttgaacatggaaagaaaatttaataactttttaaagtgacataatttacatgcaatatgtttatcaactcaagaatttaatatagttggtacacaactagttttgtttataaattggagatgcaaatagcaaaactaaatacttgctccatttacaaactacttgattttattgtacaagttgaaatatgctcttttgtttgggttacagtatgcttgctctaagtcaaattccaaggaactaatttcttctcctggagttgcattgattcagtattacaaatatatagcacatcacctgggacttggcaatctttgttaaaaaaaaatttcctttctaatgggatttggccaattttggtaatgaagttaggatggtaatgtctgcatctgctaaaggtaattttcttttgagaattgctttctttagtgttaagacctactcatattttgaagaaatcttgagttaagtgagttctgaggctgctgggggaaccagatcaattcaaagctaaatacttctttcagaaaggggccactgtggaaagtgctggtggggtttgcccttgatcaagtgcctccattgtgctgcaagggctgtagacagcagggtgggacagtcagtcctccgagcagcaggaatcatcccgtcacctgcagccttcccatgcttccgcctttattcagaactttctgtgccactgtagatagctcaggcaaaactattacctgggtatttatccactaatgagtcacaagaaaaggagtggatttggtaagaatagagatttgttttatttaaaccacttcccattactgaccattaaaagctcaccactagagttcctgaaacaggtgaaacctgtatgacagcccttccactttggggagccacgcttttgatgtgacagtaccgcagagtgattcccccactgaggatgtcatcatcaaactcttctttggtgtgtgaattattagtggaaaagacccagctgtaattagacctccactgtgtacttagctggaagaacatgttaattctgcaatatgtttcttggttaaacattgcacagttcttacctcatttctgtaaataaagttttgtgaatctgttttgtattgtgacaaattcataagataacattgatattttgatttgtaatatttctaattggtagatttaattgaaaagtaaaattaatttatttttatatgttcaggggaattttaaagtcaaatcttttgtagataatttaaaaaatcagtgtggtttattttacttatttaacccactggttgttattctgtaacagtttgtataaatggtaaattttgaatgtgttgttattttacctagatgtaaaattccacatgtattaaaatgtacaaaatgttttgttaataaaatttaataatgtttataaaaaaaaaaca

SEQ ID NO: 377591 - DNA, 1615 bp, Homo sapiens
ctatgaagaaacgcaacaagaaactccttgcagcaattaatcctttgttgtgcatgagtttcttgttgcacaacaaaggattaattgctgcaaggacattcttgtaaggctttgattagttttcttgttgctttgttgcactgaaatggaattcccatgcccctaccccttaccccagttttttgaacatggaaagaaaatttaataactttttaaagtgacataatttacatgcaatatgtttatcaactcaagaatttaatatagttggtacacaactagttttgtttataaattggagatgcaaatagcaaaactaaatacttgctccatttacaaactacttgattttattgtacaagttgaaatatgctcttttgtttgggttacagtatgcttgctctaagtcaaattccaaggaactaatttcttctcctggagttgcattgattcagtattacaaatatatagcacatcacctgggacttggcaatctttgttaaaaaaaaatttcctttctaatgggatttggccaattttggtaatgaagttaggatggtaatgtctgcatctgctaaaggtaattttcttttgagaattgctttctttagtgttaagacctactcatattttgaagaaatcttgagttaagtgagttctgaggctgctgggggaaccagatcaattcaaagctaaatacttctttcagaaaggggccactgtggaaagtgctggtggggtttgcccttgatcaagtgcctccattgtgctgcaagggctgtagacagcagggtgggacagtcagtcctccgagcagcaggaatcatcccgtcacctgcagccttcccatgcttccgcctttattcagaactttctgtgccactgtagatagctcaggcaaaactattacctgggtatttatccactaatgagtcacaagaaaaggagtggatttggtaagaatagagatttgttttatttaaaccacttcccattactgaccattaaaagctcaccactagagttcctgaaacaggtgaaacctgtatgacagcccttccactttggggagccacgcttttgatgtgacagtaccgcagagtgattcccccactgaggatgtcatcatcaaactcttctttggtgtgtgaattattagtggaaaagacccagctgtaattagacctccactgtgtacttagctggaagaacatgttaattctgcaatatgtttcttggttaaacattgcacagttcttacctcatttctgtaaataaagttttgtgaatctgttttgtattgtgacaaattcataagataacattgatattttgatttgtaatatttctaattggtagatttaattgaaaagtaaaattaatttatttttatatgttcaggggaattttaaagtcaaatcttttgtagataatttaaaaaatcagtgtggtttattttacttatttaacccactggttgttattctgtaacagtttgtataaatggtaaattttgaatgtgttgttattttacctagatgtaaaattccacatgtattaaaatgtacaaaatgttttgttaataaaatttaataatgtttataaaaaaaaaaca

SEQ ID NO: 377592 - DNA, 2797 bp, Homo sapiens
gccctcttgattatgtgtgccctctccgggcgcccgcgttagcggccgggtggaggtggggagggaagacgctgaggaggaggaggaggcggaggaggcggtggaggggaggtggggggaatcagcaaggacatggctcctgactcctgtgcggaacgtgagtgactgagcggcaaagcccgaatggtctctagcgaccggcccgtgtcactggaggacgaggtctcccatagtatgaaggagatgattggaggctgttgcgtttgctcagacgagagaggctgggccgagaacccgctggtttattgcgacgggcacggctgcagcgtcgcggtgcatcaagcttgctatggcattgttcaagtacccactggaccgtggttttgcaggaaatgtgaatctcaggagagagcagccagagtgagatgtgaactttgtccccataaggatggagctttaaaaagaacagataatgggggttgggcccatgtggtttgtgccctgtatattccagaggtacaatttgccaatgtttccacaatggaaccaattgttttacagtctgttccgcatgatcgttataataagacttgctacatttgtgatgaacaaggaagagaaagcaaagcagccactggtgcttgcatgacatgtaataaacatggatgtcgacaggctttccatgtaacatgcgctcagtttgccggactgctttgtgaagaagaaggtaatggtgccgataatgtccaatactgtggctactgtaaataccattttagtaagctgaaaaagagcaaacggggatctaataggtcatatgatcaaagtttaagtgattcttcctctcactctcaggataaacatcatgagaaagagaaaaaaaaatataaagagaaggacaaacacaaacagaaacacaagaagcagccagaaccatcacctgcattggttccatccttgactgttactacagaaaaaacttatacaagcactagcaacaactctatatctggatcattgaagcgcttggaagatactactgcacgatttacaaatgcaaatttccaggaagtctctgcacacacctctagtggaaaagatgtttcagagactagagggtcagagggcaaagggaagaaatcttcagctcacagctcaggtcaaaggggaagaaagcctggtggtggaagaaatccaggaacaactgtgtcagcagctagcccttttcctcaaggcagtttttcaggaactccaggcagtgtaaagtcatcttctggaagttcagtgcagtctccccaggatttcctgagctttacagactcagatctgcgtaatgacagttactctcactcccaacagtcatcagcaaccaaagatgtacataaaggagagtctggaagccaggaagggggggtaaatagttttagtaccttaattggcctcccttcaacctcagctgttacttcacagcctaaaagctttgaaaattcacctggagatttgggtaattccagccttcctacagcaggatataagcgggctcaaacttctggcatagaagaagaaactgtaaaggaaaagaaaaggaaaggaaataaacaaagtaagcatgggcctggcagacccaaaggaaacaaaaatcaagagaatgtttctcatctctcagtttcttctgcttcaccaacatcatctgtagcatcagctgcaggaagcataacaagctctagtctgcagaaatctcctacattgctcaggaatggaagtttacagagcctcagtgttggctcatctccagttggttcagaaatttccatgcagtatcggcatgatggagcttgcccaacaactacgttctcagagttgctgaatgcaatacacaacggtatttataacagcaatgatgtagcagtatcgtttccaaatgtagtatctggctcgggatctagtactcctgtctccagctctcacttacctcagcagtcttctgggcatttgcaacaagtaggagcgctctctccctcagctgtgtcatctgcagcccctgctgttgctacaactcaggcaaatactctatctggatcttctctcagtcaggcaccatctcatatgtatggcaatagatcaaattcatcaatggcagctcttatagctcagtctgaaaacaatcaaacagatcaagatcttggagacaatagccgcaacctagttggcagaggaagctcaccccgaggaagtctctcgccacgatcccctgtaagcagcttacagattcgctatgatcaaccaggcaacagcagtttggaaaatctgcctccagtagcagccagcatagaacagcttttggagaggcagtggagtgaaggacagcaatttttactagaacagggtactcctagtgacattttaggaatgctgaagtcattacaccaacttcaagttgaaaaccgaagattagaggaacaaattaaaaacttgactgccaaaaaggaacggcttcagttattgaatgcacagctttcagtgccttttccaacaataacagcaaaatccccttagtgcgtaacttgaaattcccttcggccgtttgtcaaaacacactcacttaagtcttagttctcagtattcatatctgatcctccaaattagacggcctttaaaacacatctcacatttctttgtctgccaaatagtgtccaaccaacactgtgcaaaaagagtcgtattttaaataaaacctcatattatcaaaactgtgcttcagaaggctcccgttgcttagagtgaagtccgaacgtgg

SEQ ID NO: 377593 - DNA, 2337 bp, Homo sapiens
gccctcttgattatgtgtgccctctccgggcgcccgcgttagcggccgggtggaggtggggagggaagacgctgaggaggaggaggaggcggaggaggcggtggaggggaggtggggggaatcagcaaggacatggctcctgactcctgtgcggaacgtgagtgactgagcggcaaagcccgaatggtctctagcgaccggcccgtgtcactggaggacgaggtctcccatagtatgaaggagatgattggaggctgttgcgtttgctcagacgagagaggctgggccgagaacccgctggtttattgcgacgggcacggctgcagcgtcgcggtgcatcaagcttgctatggcattgttcaagtacccactggaccgtggttttgcaggaaatgtgaatctcaggagagagcagccagagtgagatgtgaactttgtccccataaggatggagctttaaaaagaacagataatgggggttgggcccatgtggtttgtgccctgtatattccagaggtacaatttgccaatgtttccacaatggaaccaattgttttacagtctgttccgcatgatcgttataataagacttgctacatttgtgatgaacaaggaagagaaagcaaagcagccactggtgcttgcatgacatgtaataaacatggatgtcgacaggctttccatgtaacatgcgctcagtttgccggactgctttgtgaagaagaaggtaatggtgccgataatgtccaatactgtggctactgtaaataccattttagtaagctgaaaaagagcaaacggggatctaataggtcatatgatcaaagtttaagtgattcttcctctcactctcaggataaacatcatgagaaagagaaaaaaaaatataaagagaaggacaaacacaaacagaaacacaagaagcagccagaaccatcacctgcattggttccatccttgactgttactacagaaaaaacttatacaagcactagcaacaactctatatctggatcattgaagcgcttggaagatactactgcacgatttacaaatgcaaatttccaggaagtctctgcacacacctctagtggaaaagatgtttcagagactagagggtcagagggcaaagggaagaaatcttcagctcacagctcaggtcaaaggggaagaaagcctggtggtggaagaaatccaggaacaactgtgtcagcagctagcccttttcctcaaggcagtttttcaggaactccaggcagtgtaaagtcatcttctggaagttcagtgcagtctccccaggatttcctgagctttacagactcagatctgcgtaatgacagttactctcactcccaacagtcatcagcaaccaaagatgtacataaaggagagtctggaagccaggaagggggggtaaatagttttagtaccttaattggcctcccttcaacctcagctgttacttcacagcctaaaagctttgaaaattcacctggagatttgggtaattccagccttcctacagcaggatataagcgggctcaaacttctggcatagaagaagaaactgtaaaggaaaagaaaaggaaaggaaataaacaaagtaagcatgggcctggcagacccaaaggaaacaaaaatcaagagaatgtttctcatctctcagtttcttctgcttcaccaacatcatctgtagcatcagctgcaggaagcataacaagctctagtctgcagaaatctcctacattgctcaggaatggaagtttacagagcctcagtgttggctcatctccagttggttcaggtaggggtttgcctattattatttttctccttcactcccaccacctcccttcttctgtcccaaaacgttttcaactgttgttacgataatacttgaaattaataaatgacatttaattaaagtgaaatttctcagtttttaaattttctaatggaaaatacaaaaatatcttaaagtcttagatgatttggtgtttgggaaagatgttcggcactaatttgattttacttaattaaatgtaggctaaacaatctattggtcattcattacttacaaaacacttagaatttatttcctatttttgtttcacctgcacagtattttttttttaatgcagaatttatatttagggtgtgagagtttttaccctttggtttttgttttgttttgagctccctttctctaaacttcaattttagtaatcattttctaaacgactcctcacacagatactacttgaattaccctatcctgagacatttttatatcagtgataaatgattttaatttatggaatccagcagtcacatttt

SEQ ID NO: 377594 - DNA, 967 bp, Homo sapiens
gccctcttgattatgtgtgccctctccgggcgcccgcgttagcggccgggtggaggtggggagggaagacgctgaggaggaggaggaggcggaggaggcggtggaggggaggtggggggaatcagcaaggacatggctcctgactcctgtgcggaacgtgagtgactgagcggcaaagcccgaatggtctctagcgaccggcccgtgtcactggaggacgaggtctcccatagtatgaaggagatgattggaggctgttgcgtttgctcagacgagagaggctgggccgagaacccgctggtttattgcgacgggcacggctgcagcgtcgcggtgcatcaagcttgctatggcattgttcaagtacccactggaccgtggttttgcaggaaatgtgaatctcaggagagagcagccagagtgatggtatgcaattcctgttggttagcctcatctgaaaacgtcactcctggatacatagaacatcactgcgcatgtgcatctccccacccccgatgcctggtgtctaacgttcctccagtttctggtgctctgatgcattgcttttgggcttgtcttactacagcagctttcttcggtcctcagtcatttaccacttgtcatatgtcctttctagtttccagggatattcttttttatatttatggctttatgccatttatctcagttgtcatttggcgtttcaagaaggagaggtggtagtgtttaagtggaattaactacttgtgtttctgatgtggtcttttatatttcttacagggttttgttttaccaagtactagtcttcagtctatcctgtttacttgattttttcccactcaactcacaaacatttttgaatcatctcatgaattctgctttccatttacatttttgcccttttgtcttttcctcttcgctgttaaacttcctgaaaaaataaaactagttgattcacttcttaaaa

SEQ ID NO: 377595 - DNA, 654 bp, Homo sapiens
gccctcttgattatgtgtgccctctccgggcgcccgcgttagcggccgggtggaggtggggagggaagacgctgaggaggaggaggaggcggaggaggcggtggaggggaggtggggggaatcagcaaggacatggctcctgactcctgtgcggaacgtgagtgactgagcggcaaagcccgaatggtctctagcgaccggcccgtgtcactggaggacgaggtctcccatagtatgaaggagatgattggaggctgttgcgtttgctcagacgagagaggctgggccgagaacccgctggtttattgcgacgggcacggctgcagcgtcgcggtgcatcaagcttgctatggcattgttcaagtacccactggaccgtggttttgcaggaaatgtgaatctcaggagagagcagccagagtgttattgcttactgtgagctaagacagttttgcctaacctcgaagtcatgaagcctccacaaatgggaagtgttcctgtaatgacgcaaccaaccttaatatacagccagcctgtcatgagacctccaaacccctttggccctgtatcaggagcacagatacagtttatgtaacttgatggaagaaaatggaattactccaaaaagacaagtgctcaagcagcaaaatcctt

SEQ ID NO: 377596 - DNA, 545 bp, Homo sapiens
ttcatcataagtgatctagcggggttcttagcttagtaagagagaaatatatctgatcatgatcacctgtttggggttgacaaacctggttaccaatattcctttagccagatggatgttggaatttgaggatttagaattacacttttatgattcttgtttttcttcagctgctcctggtgtctctgagtgtagatttcttccatttaccctctctaggaaattaagctttgcagttttctagggcaggtgagagccagttacgcgttagtatgtagtgaataagggattgttttgattgcttttcagatggtatgcaattcctgttggttagcctcatctgaaaacgtcactcctggatacatagaacatcactgcgcatgtgcatctccccacccccgatgcctggtgtctaacgttcctccagtttctggtgctctgatgcattgcttttgggcttgtcttactacagcagctttcttcggtcctcagtcatttaccacttgtcatatgtcctttctagtttccagggatattctttttta

SEQ ID NO: 377597 - DNA, 837 bp, Homo sapiens
gaaatggtaggagctattatgagttgtgggagacagaacacatgatgaaatagtatgaaatcttatgggcagggttgtgattatgcctgtgtaggaaagaatttgactaatttaacacagcctttataataaggtagtataagacatgtacttataggtaagactttttccatttcaaagtatccaggctattttgttgctcttggttccttgaagataggcttcaaagactcttaagggataaacacatttggctggtgagtcccccactggggagaaaaagtagttttcacatttggctggtgagtccaccactggggagaaaaagtagtttccagtatccatgttaacttttataatggaaaatgaatctacactctttcattgaaactgcaagaggggtggaagctgaaaagttccaactgagtgagggaagcagtacaaatgggaatgagttgtgtaataattacttttaaattaactggtaatgccattactactctctttatttagagcactgcaattttttaaatttacataggtttcatggggattttaaccctgatgatccacccccacactgcaccccatcataatatcttcagtttttcaacttgtctgtcatggtggtttttaggaagtggtgattaaaaatctgaaattaaagtgtgtcttttctttagacagaggtgacagttctacactaacaaagcaagaacttaaattcataggtatgtaccaaactccagcatggttctaaacataatagtgttaaattaatcctattgtagcttggaaaccttcccatacaaaccagtgttagcagtatgtactcat

SEQ ID NO: 377598 - DNA, 1848 bp, Homo sapiens
gtggtcatcccgcctcagccacctactacaggaccgccaagaaaagaagttcccaaaaccactcctagtgagcccaagaaaaagcagcctccaccaccagaatcaggtccagagcagagcaaacagaaaaaagtggctccccgcccaagtatccctgtaaaacaaaaaccaaaagaaaaggaaaaaccacctccggtcaataagcaggagaatgcaggcactttgaacatcctcagcactctctccaatggcaatagttctaagcaaaaaattccagcagatggagtccacaggatcagagtggactttaaggaggattgtgaagcagaaaatgtgtgggagatgggaggcttaggaatcttgacttctgttcctataacacccagggtggtttgctttctctgtgccagtagtgggcatgtagagacttatacaagcactagcaacaactctatatctggatcattgaagcgcttggaagatactactgcacgatttacaaatgcaaatttccaggaagtctctgcacacacctctagtggaaaagatgtttcagagactagagggtcagagggcaaagggaagaaatcttcagctcacagctcaggtcaaaggggaagaaagcctggtggtggaagaaatccaggaacaactgtgtcagcagctagcccttttcctcaaggcagtttttcaggaactccaggcagtgtaaagtcatcttctggaagttcagtgcagtctccccaggatttcctgagctttacagactcagatctgcgtaatgacagttactctcactcccaacagtcatcagcaaccaaagatgtacataaaggagagtctggaagccaggaagggggggtaaatagttttagtaccttaattggcctcccttcaacctcagctgttacttcacagcctaaaagctttgaaaattcacctggagatttgggtaattccagccttcctacagcaggatataagcgggctcaaacttctggcatagaagaagaaactgtaaaggaaaagaaaaggaaaggaaataaacaaagtaagcatgggcctggcagacccaaaggaaacaaaaatcaagagaatgtttctcatctctcagtttcttctgcttcaccaacatcatctgtagcatcagctgcaggaagcataacaagctctagtctgcagaaatctcctacattgctcaggaatggaagtttacagagcctcagtgttggctcatctccagttggttcagaaatttccatgcagtatcggcatgatggagcttgcccaacaactacgttctcagagttgctgaatgcaatacacaacggtatttataacagcaatgatgtagcagtatcgtttccaaatgtagtatctggctcgggatctagtactcctgtctccagctctcacttacctcagcagtcttctgggcatttgcaacaagtaggagcgctctctccctcagctgtgtcatctgcagcccctgctgttgctacaactcaggcaaatactctatctggatcttctctcagtcaggcaccatctcatatgtatggcaatagatcaaattcatcaatggcagctcttatagctcagtctgaaaacaatcaaacagatcaagatcttggagacaatagccgcaacctagttggcagaggaagctcaccccgaggaagtctctcgccacgatcccctgtaagcagcttacagattcgctatgatcaaccaggcaacagcagtttggaaaatctgcctccagtagcagccagcatagaagctggagtggtggcctgtttggattcaggcccaggggccgagacattcccttcttcactcttttcc

SEQ ID NO: 377599 - DNA, 666 bp, Homo sapiens
cctcaggatcaactcaagtaattggaaaaagtatttgaaaaatgaggtggggtggtttccaaattgacctgcccagcatggaaaaggttcatatttctaaaacttatacaagcactagcaacaactctatatctggatcattgaagcgcttggaagatactactgcacgatttacaaatgcaaatttccaggaagtctctgcacacacctctagtggaaaagatgtttcagagactagagggtcagagggcaaagggaagaaatcttcagctcacagctcaggtcaaaggggaagaaagcctggtggtggaagaaatccaggaacaactgtgtcagcagctagcccttttcctcaaggtattagtgatgttttagttaaaatacttgtgtttaagatggttaataatagttatgctttgtaaaataattggtttgtttttgaacttataactaatggatgttctagattattatatgattagttgctttagtaagattactttaaagatagtgtttcctattaaatttttttaatagggactttttctttccttttataatatgatttgtgcttccagagttgaattgtaattttaatgtttaactagatatggaataatgcttaaaattggggagaaaaataataaaagctggagctttgctttg

SEQ ID NO: 377600 - DNA, 5047 bp, Homo sapiens
gccctcttgattatgtgtgccctctccgggcgcccgcgttagcggccgggtggaggtggggagggaagacgctgaggaggaggaggaggcggaggaggcggtggaggggaggtggggggaatcagcaaggacatggctcctgactcctgtgcggaacgtgagtgactgagcggcaaagcccgaatggtctctagcgaccggcccgtgtcactggaggacgaggtctcccatagtatgaaggagatgattggaggctgttgcgtttgctcagacgagagaggctgggccgagaacccgctggtttattgcgacgggcacggctgcagcgtcgcggtgcatcaagcttgctatggcattgttcaagtacccactggaccgtggttttgcaggaaatgtgaatctcaggagagagcagccagagtgagatgtgaactttgtccccataaggatggagctttaaaaagaacagataatgggggttgggcccatgtggtttgtgccctgtatattccagaggtacaatttgccaatgtttccacaatggaaccaattgttttacagtctgttccgcatgatcgttataataagacttgctacatttgtgatgaacaaggaagagaaagcaaagcagccactggtgcttgcatgacatgtaataaacatggatgtcgacaggctttccatgtaacatgcgctcagtttgccggactgctttgtgaagaagaaggtaatggtgccgataatgtccaatactgtggctactgtaaataccattttagtaagctgaaaaagagcaaacggggatctaataggtcatatgatcaaagtttaagtgattcttcctctcactctcaggataaacatcatgagaaagagaaaaaaaaatataaagagaaggacaaacacaaacagaaacacaagaagcagccagaaccatcacctgcattggttccatccttgactgttactacagaaaaaacttatacaagcactagcaacaactctatatctggatcattgaagcgcttggaagatactactgcacgatttacaaatgcaaatttccaggaagtctctgcacacacctctagtggaaaagatgtttcagagactagagggtcagagggcaaagggaagaaatcttcagctcacagctcaggtcaaaggggaagaaagcctggtggtggaagaaatccaggaacaactgtgtcagcagctagcccttttcctcaaggcagtttttcaggaactccaggcagtgtaaagtcatcttctggaagttcagtgcagtctccccaggatttcctgagctttacagactcagatctgcgtaatgacagttactctcactcccaacagtcatcagcaaccaaagatgtacataaaggagagtctggaagccaggaagggggggtaaatagttttagtaccttaattggcctcccttcaacctcagctgttacttcacagcctaaaagctttgaaaattcacctggagatttgggtaattccagccttcctacagcaggatataagcgggctcaaacttctggcatagaagaagaaactgtaaaggaaaagaaaaggaaaggaaataaacaaagtaagcatgggcctggcagacccaaaggaaacaaaaatcaagagaatgtttctcatctctcagtttcttctgcttcaccaacatcatctgtagcatcagctgcaggaagcataacaagctctagtctgcagaaatctcctacattgctcaggaatggaagtttacagagcctcagtgttggctcatctccagttggttcagaaatttccatgcagtatcggcatgatggagcttgcccaacaactacgttctcagagttgctgaatgcaatacacaacggtatttataacagcaatgatgtagcagtatcgtttccaaatgtagtatctggctcgggatctagtactcctgtctccagctctcacttacctcagcagtcttctgggcatttgcaacaagtaggagcgctctctccctcagctgtgtcatctgcagcccctgctgttgctacaactcaggcaaatactctatctggatcttctctcagtcaggcaccatctcatatgtatggcaatagatcaaattcatcaatggcagctcttatagctcagtctgaaaacaatcaaacagatcaagatcttggagacaatagccgcaacctagttggcagaggaagctcaccccgaggaagtctctcgccacgatcccctgtaagcagcttacagattcgctatgatcaaccaggcaacagcagtttggaaaatctgcctccagtagcagccagcatagaacagcttttggagaggcagtggagtgaaggacagcaatttttactagaacagggtactcctagtgacattttaggaatgctgaagtcattacaccaacttcaagttgaaaaccgaagattagaggaacaaattaaaaacttgactgccaaaaaggaacggcttcagttattgaatgcacagctttcagtgccttttccaacaataacagcaaatcctagtccgtctcatcaaatacacacattttcagcacagactgctcctactactgattccttgaacagcagtaagagccctcatataggaaacagctttttacctgataattctcttcctgtattaaatcaggacttaacctccagtggacaaagtaccagcagctcatcagctctttctaccccacctcctgctgggcagagtccggctcaacaaggctcaggagtgagtggagttcagcaggtcaatggcgtgacagtgggggcactagctagtggaatgcagcctgtaacttccaccattcctgccgtgtctgcagtgggtggaataattggagctttgccaggtaaccaactggcaattaatggcattgtaggagctttaaatggggttatgcagactcctgtcacaatgtcccagaaccctacccctctcacccacacaaccgtaccacctaatgcaacacatccaatgccagctacactgactaacagtgcctcaggactaggattactttctgaccagcaacgacaaatacttattcatcaacagcagtttcagcagttgttaaattctcaacagctcacaccagaacaacatcaagcctttttgtatcagttaatgcaacatcaccaccagcagcaccaccaacctgaacttcagcagctgcagatccctggaccaacacaaatacccataaacaaccttcttgcaggtacacaggcacccccacttcacacagctaccaccaacccatttctcaccatccatggagataatgcaagtcagaaagtagcaagacttagtgataaaactgggcctgtagctcaagagaaaagttgacacctgagaaacatctagaaattgcctatcctgctgttctagcacttcatctggctgcctttgcagtccttttactacagctatgaagaaacgcaacaagaaactcaatgcacaacaaaggattaattgctgcaaggacattcttgtaaggctttgattagttttcttgttgctttgttgcactgaaatggaattcccatgcccctaccccttaccccagttttttgaacatggaaagaaaatttaataactttttaaagtgacataatttacatgcaatatgtttatcaactcaagaatttaatatagttggtacacaactagttttgtttataaattggagatgcaaatagcaaaactaaatacttgctccatttacaaactacttgattttattgtacaagttgaaatatgctcttttgtttgggttacagtatgcttgctctaagtcaaattccaaggaactaatttcttctcctggagttgcattgattcagtattacaaatatatagcacatcacctgggacttggcaatctttgttaaaaaaaaatttcctttctaatgggatttggccaattttggtaatgaagttaggatggtaatgtctgcatctgctaaaggtaattttcttttgagaattgctttctttagtgttaagacctactcatattttgaagaaatcttgagttaagtgagttctgaggctgctgggggaaccagatcaattcaaagctaaatacttctttcagaaaggggccactgtggaaagtgctggtggggtttgcccttgatcaagtgcctccattgtgctgcaagggctgtagacagcagggtgggacagtcagtcctccgagcagcaggaatcatcccgtcacctgcagccttcccatgcttccgcctttattcagaactttctgtgccactgtagatagctcaggcaaaactattacctgggtatttatccactaatgagtcacaagaaaaggagtggatttggtaagaatagagatttgttttatttaaaccacttcccattactgaccattaaaagctcaccactagagttcctgaaacaggtgaaacctgtatgacagcccttccactttggggagccacgcttttgatgtgacagtaccgcagagtgattcccccactgaggatgtcatcatcaaactcttctttggtgtgtgaattattagtggaaaagacccagctgtaattagacctccactgtgtacttagctggaagaacatgttaattctgcaatatgtttcttggttaaacattgcacagttcttacctcatttctgtaaataaagttttgtgaatctgttttgtattgtgacaaattcataagataacattgatattttgatttgtaatatttctaattggtagatttaattgaaaagtaaaattaatttatttttatatgttcaggggaattttaaagtcaaatcttttgtagataatttaaaaaatcagtgtggtttattttacttatttaacccactggttgttattctgtaacagtttgtataaatggtaaattttgaatgtgttgttattttacctagatgtaaaattccacatgtattaaaatgtacaaaatgttttgttaataaaatttaataatgtttataaaaaaaaaaca

SEQ ID NO: 377601 - DNA, 5014 bp, Homo sapiens
gccctcttgattatgtgtgccctctccgggcgcccgcgttagcggccgggtggaggtggggagggaagacgctgaggaggaggaggaggcggaggaggcggtggaggggaggtggggggaatcagcaaggacatggctcctgactcctgtgcggaacgtgagtgactgagcggcaaagcccgaatggtctctagcgaccggcccgtgtcactggaggacgaggtctcccatagtatgaaggagatgattggaggctgttgcgtttgctcagacgagagaggctgggccgagaacccgctggtttattgcgacgggcacggctgcagcgtcgcggtgcatcaagcttgctatggcattgttcaagtacccactggaccgtggttttgcaggaaatgtgaatctcaggagagagcagccagagtgagatgtgaactttgtccccataaggatggagctttaaaaagaacagataatgggggttgggcccatgtggtttgtgccctgtatattccagaggtacaatttgccaatgtttccacaatggaaccaattgttttacagtctgttccgcatgatcgttataataagacttgctacatttgtgatgaacaaggaagagaaagcaaagcagccactggtgcttgcatgacatgtaataaacatggatgtcgacaggctttccatgtaacatgcgctcagtttgccggactgctttgtgaagaagaaggtaatggtgccgataatgtccaatactgtggctactgtaaataccattttagtaagctgaaaaagagcaaacggggatctaataggtcatatgatcaaagtttaagtgattcttcctctcactctcaggataaacatcatgagaaagagaaaaaaaaatataaagagaaggacaaacacaaacagaaacacaagaagcagccagaaccatcacctgcattggttccatccttgactgttactacagaaaaaacttatacaagcactagcaacaactctatatctggatcattgaagcgcttggaagatactactgcacgatttacaaatgcaaatttccaggaagtctctgcacacacctctagtggaaaagatgtttcagagactagagggtcagagggcaaagggaagaaatcttcagctcacagctcaggtcaaaggggaagaaagcctggtggtggaagaaatccaggaacaactgtgtcagcagctagcccttttcctcaaggcagtttttcaggaactccaggcagtgtaaagtcatcttctggaagttcagtgcagtctccccaggatttcctgagctttacagactcagatctgcgtaatgacagttactctcactcccaacagtcatcagcaaccaaagatgtacataaaggagagtctggaagccaggaagggggggtaaatagttttagtaccttaattggcctcccttcaacctcagctgttacttcacagcctaaaagctttgaaaattcacctggagatttgggtaattccagccttcctacagcaggatataagcgggctcaaacttctggcatagaagaagaaactgtaaaggaaaagaaaaggaaaggaaataaacaaagtaagcatgggcctggcagacccaaaggaaacaaaaatcaagagaatgtttctcatctctcagtttcttctgcttcaccaacatcatctgtagcatcagctgcaggaagcataacaagctctagtctgcagaaatctcctacattgctcaggaatggaagtttacagagcctcagtgttggctcatctccagttggttcagaaatttccatgcagtatcggcatgatggagcttgcccaacaactagtatttataacagcaatgatgtagcagtatcgtttccaaatgtagtatctggctcgggatctagtactcctgtctccagctctcacttacctcagcagtcttctgggcatttgcaacaagtaggagcgctctctccctcagctgtgtcatctgcagcccctgctgttgctacaactcaggcaaatactctatctggatcttctctcagtcaggcaccatctcatatgtatggcaatagatcaaattcatcaatggcagctcttatagctcagtctgaaaacaatcaaacagatcaagatcttggagacaatagccgcaacctagttggcagaggaagctcaccccgaggaagtctctcgccacgatcccctgtaagcagcttacagattcgctatgatcaaccaggcaacagcagtttggaaaatctgcctccagtagcagccagcatagaacagcttttggagaggcagtggagtgaaggacagcaatttttactagaacagggtactcctagtgacattttaggaatgctgaagtcattacaccaacttcaagttgaaaaccgaagattagaggaacaaattaaaaacttgactgccaaaaaggaacggcttcagttattgaatgcacagctttcagtgccttttccaacaataacagcaaatcctagtccgtctcatcaaatacacacattttcagcacagactgctcctactactgattccttgaacagcagtaagagccctcatataggaaacagctttttacctgataattctcttcctgtattaaatcaggacttaacctccagtggacaaagtaccagcagctcatcagctctttctaccccacctcctgctgggcagagtccggctcaacaaggctcaggagtgagtggagttcagcaggtcaatggcgtgacagtgggggcactagctagtggaatgcagcctgtaacttccaccattcctgccgtgtctgcagtgggtggaataattggagctttgccaggtaaccaactggcaattaatggcattgtaggagctttaaatggggttatgcagactcctgtcacaatgtcccagaaccctacccctctcacccacacaaccgtaccacctaatgcaacacatccaatgccagctacactgactaacagtgcctcaggactaggattactttctgaccagcaacgacaaatacttattcatcaacagcagtttcagcagttgttaaattctcaacagctcacaccagaacaacatcaagcctttttgtatcagttaatgcaacatcaccaccagcagcaccaccaacctgaacttcagcagctgcagatccctggaccaacacaaatacccataaacaaccttcttgcaggtacacaggcacccccacttcacacagctaccaccaacccatttctcaccatccatggagataatgcaagtcagaaagtagcaagacttagtgataaaactgggcctgtagctcaagagaaaagttgacacctgagaaacatctagaaattgcctatcctgctgttctagcacttcatctggctgcctttgcagtccttttactacagctatgaagaaacgcaacaagaaactcaatgcacaacaaaggattaattgctgcaaggacattcttgtaaggctttgattagttttcttgttgctttgttgcactgaaatggaattcccatgcccctaccccttaccccagttttttgaacatggaaagaaaatttaataactttttaaagtgacataatttacatgcaatatgtttatcaactcaagaatttaatatagttggtacacaactagttttgtttataaattggagatgcaaatagcaaaactaaatacttgctccatttacaaactacttgattttattgtacaagttgaaatatgctcttttgtttgggttacagtatgcttgctctaagtcaaattccaaggaactaatttcttctcctggagttgcattgattcagtattacaaatatatagcacatcacctgggacttggcaatctttgttaaaaaaaaatttcctttctaatgggatttggccaattttggtaatgaagttaggatggtaatgtctgcatctgctaaaggtaattttcttttgagaattgctttctttagtgttaagacctactcatattttgaagaaatcttgagttaagtgagttctgaggctgctgggggaaccagatcaattcaaagctaaatacttctttcagaaaggggccactgtggaaagtgctggtggggtttgcccttgatcaagtgcctccattgtgctgcaagggctgtagacagcagggtgggacagtcagtcctccgagcagcaggaatcatcccgtcacctgcagccttcccatgcttccgcctttattcagaactttctgtgccactgtagatagctcaggcaaaactattacctgggtatttatccactaatgagtcacaagaaaaggagtggatttggtaagaatagagatttgttttatttaaaccacttcccattactgaccattaaaagctcaccactagagttcctgaaacaggtgaaacctgtatgacagcccttccactttggggagccacgcttttgatgtgacagtaccgcagagtgattcccccactgaggatgtcatcatcaaactcttctttggtgtgtgaattattagtggaaaagacccagctgtaattagacctccactgtgtacttagctggaagaacatgttaattctgcaatatgtttcttggttaaacattgcacagttcttacctcatttctgtaaataaagttttgtgaatctgttttgtattgtgacaaattcataagataacattgatattttgatttgtaatatttctaattggtagatttaattgaaaagtaaaattaatttatttttatatgttcaggggaattttaaagtcaaatcttttgtagataatttaaaaaatcagtgtggtttattttacttatttaacccactggttgttattctgtaacagtttgtataaatggtaaattttgaatgtgttgttattttacctagatgtaaaattccacatgtattaaaatgtacaaaatgttttgttaataaaatttaataatgtttataaaaaaaaaaca

SEQ ID NO: 377602 - DNA, 5251 bp, Homo sapiens
gccctcttgattatgtgtgccctctccgggcgcccgcgttagcggccgggtggaggtggggagggaagacgctgaggaggaggaggaggcggaggaggcggtggaggggaggtggggggaatcagcaaggacatggctcctgactcctgtgcggaacgtgagtgactgagcggcaaagcccgaatggtctctagcgaccggcccgtgtcactggaggacgaggtctcccatagtatgaaggagatgattggaggctgttgcgtttgctcagacgagagaggctgggccgagaacccgctggtttattgcgacgggcacggctgcagcgtcgcggtgcatcaagcttgctatggcattgttcaagtacccactggaccgtggttttgcaggaaatgtgaatctcaggagagagcagccagagtgactctacttcatgaggctggaaccatgactgctggcagctcttgtttccagccccttttaccagaagaaggggctctctagaagaatcctggaaaggactctgattggcctgtcttggatcatgtgcccatcatctctgtggctggagtggggagggtactgtgaatggcaaccctcactagaactacatagttggagtcagggagatgtgaactttgtccccataaggatggagctttaaaaagaacagataatgggggttgggcccatgtggtttgtgccctgtatattccagaggtacaatttgccaatgtttccacaatggaaccaattgttttacagtctgttccgcatgatcgttataataagacttgctacatttgtgatgaacaaggaagagaaagcaaagcagccactggtgcttgcatgacatgtaataaacatggatgtcgacaggctttccatgtaacatgcgctcagtttgccggactgctttgtgaagaagaaggtaatggtgccgataatgtccaatactgtggctactgtaaataccattttagtaagctgaaaaagagcaaacggggatctaataggtcatatgatcaaagtttaagtgattcttcctctcactctcaggataaacatcatgagaaagagaaaaaaaaatataaagagaaggacaaacacaaacagaaacacaagaagcagccagaaccatcacctgcattggttccatccttgactgttactacagaaaaaacttatacaagcactagcaacaactctatatctggatcattgaagcgcttggaagatactactgcacgatttacaaatgcaaatttccaggaagtctctgcacacacctctagtggaaaagatgtttcagagactagagggtcagagggcaaagggaagaaatcttcagctcacagctcaggtcaaaggggaagaaagcctggtggtggaagaaatccaggaacaactgtgtcagcagctagcccttttcctcaaggcagtttttcaggaactccaggcagtgtaaagtcatcttctggaagttcagtgcagtctccccaggatttcctgagctttacagactcagatctgcgtaatgacagttactctcactcccaacagtcatcagcaaccaaagatgtacataaaggagagtctggaagccaggaagggggggtaaatagttttagtaccttaattggcctcccttcaacctcagctgttacttcacagcctaaaagctttgaaaattcacctggagatttgggtaattccagccttcctacagcaggatataagcgggctcaaacttctggcatagaagaagaaactgtaaaggaaaagaaaaggaaaggaaataaacaaagtaagcatgggcctggcagacccaaaggaaacaaaaatcaagagaatgtttctcatctctcagtttcttctgcttcaccaacatcatctgtagcatcagctgcaggaagcataacaagctctagtctgcagaaatctcctacattgctcaggaatggaagtttacagagcctcagtgttggctcatctccagttggttcagaaatttccatgcagtatcggcatgatggagcttgcccaacaactacgttctcagagttgctgaatgcaatacacaacggtatttataacagcaatgatgtagcagtatcgtttccaaatgtagtatctggctcgggatctagtactcctgtctccagctctcacttacctcagcagtcttctgggcatttgcaacaagtaggagcgctctctccctcagctgtgtcatctgcagcccctgctgttgctacaactcaggcaaatactctatctggatcttctctcagtcaggcaccatctcatatgtatggcaatagatcaaattcatcaatggcagctcttatagctcagtctgaaaacaatcaaacagatcaagatcttggagacaatagccgcaacctagttggcagaggaagctcaccccgaggaagtctctcgccacgatcccctgtaagcagcttacagattcgctatgatcaaccaggcaacagcagtttggaaaatctgcctccagtagcagccagcatagaacagcttttggagaggcagtggagtgaaggacagcaatttttactagaacagggtactcctagtgacattttaggaatgctgaagtcattacaccaacttcaagttgaaaaccgaagattagaggaacaaattaaaaacttgactgccaaaaaggaacggcttcagttattgaatgcacagctttcagtgccttttccaacaataacagcaaatcctagtccgtctcatcaaatacacacattttcagcacagactgctcctactactgattccttgaacagcagtaagagccctcatataggaaacagctttttacctgataattctcttcctgtattaaatcaggacttaacctccagtggacaaagtaccagcagctcatcagctctttctaccccacctcctgctgggcagagtccggctcaacaaggctcaggagtgagtggagttcagcaggtcaatggcgtgacagtgggggcactagctagtggaatgcagcctgtaacttccaccattcctgccgtgtctgcagtgggtggaataattggagctttgccaggtaaccaactggcaattaatggcattgtaggagctttaaatggggttatgcagactcctgtcacaatgtcccagaaccctacccctctcacccacacaaccgtaccacctaatgcaacacatccaatgccagctacactgactaacagtgcctcaggactaggattactttctgaccagcaacgacaaatacttattcatcaacagcagtttcagcagttgttaaattctcaacagctcacaccagaacaacatcaagcctttttgtatcagttaatgcaacatcaccaccagcagcaccaccaacctgaacttcagcagctgcagatccctggaccaacacaaatacccataaacaaccttcttgcaggtacacaggcacccccacttcacacagctaccaccaacccatttctcaccatccatggagataatgcaagtcagaaagtagcaagacttagtgataaaactgggcctgtagctcaagagaaaagttgacacctgagaaacatctagaaattgcctatcctgctgttctagcacttcatctggctgcctttgcagtccttttactacagctatgaagaaacgcaacaagaaactcaatgcacaacaaaggattaattgctgcaaggacattcttgtaaggctttgattagttttcttgttgctttgttgcactgaaatggaattcccatgcccctaccccttaccccagttttttgaacatggaaagaaaatttaataactttttaaagtgacataatttacatgcaatatgtttatcaactcaagaatttaatatagttggtacacaactagttttgtttataaattggagatgcaaatagcaaaactaaatacttgctccatttacaaactacttgattttattgtacaagttgaaatatgctcttttgtttgggttacagtatgcttgctctaagtcaaattccaaggaactaatttcttctcctggagttgcattgattcagtattacaaatatatagcacatcacctgggacttggcaatctttgttaaaaaaaaatttcctttctaatgggatttggccaattttggtaatgaagttaggatggtaatgtctgcatctgctaaaggtaattttcttttgagaattgctttctttagtgttaagacctactcatattttgaagaaatcttgagttaagtgagttctgaggctgctgggggaaccagatcaattcaaagctaaatacttctttcagaaaggggccactgtggaaagtgctggtggggtttgcccttgatcaagtgcctccattgtgctgcaagggctgtagacagcagggtgggacagtcagtcctccgagcagcaggaatcatcccgtcacctgcagccttcccatgcttccgcctttattcagaactttctgtgccactgtagatagctcaggcaaaactattacctgggtatttatccactaatgagtcacaagaaaaggagtggatttggtaagaatagagatttgttttatttaaaccacttcccattactgaccattaaaagctcaccactagagttcctgaaacaggtgaaacctgtatgacagcccttccactttggggagccacgcttttgatgtgacagtaccgcagagtgattcccccactgaggatgtcatcatcaaactcttctttggtgtgtgaattattagtggaaaagacccagctgtaattagacctccactgtgtacttagctggaagaacatgttaattctgcaatatgtttcttggttaaacattgcacagttcttacctcatttctgtaaataaagttttgtgaatctgttttgtattgtgacaaattcataagataacattgatattttgatttgtaatatttctaattggtagatttaattgaaaagtaaaattaatttatttttatatgttcaggggaattttaaagtcaaatcttttgtagataatttaaaaaatcagtgtggtttattttacttatttaacccactggttgttattctgtaacagtttgtataaatggtaaattttgaatgtgttgttattttacctagatgtaaaattccacatgtattaaaatgtacaaaatgttttgttaataaaatttaataatgtttataaaaaaaaaaca

SEQ ID NO: 377603 - DNA, 4681 bp, Homo sapiens
ggatctaactgcgaaccaaaggttgcaccaacaaccgcttggaatgctgcaacaatgagatgtgaactttgtccccataaggatggagctttaaaaagaacagataatgggggttgggcccatgtggtttgtgccctgtatattccagaggtacaatttgccaatgtttccacaatggaaccaattgttttacagtctgttccgcatgatcgttataataagacttgctacatttgtgatgaacaaggaagagaaagcaaagcagccactggtgcttgcatgacatgtaataaacatggatgtcgacaggctttccatgtaacatgcgctcagtttgccggactgctttgtgaagaagaaggtaatggtgccgataatgtccaatactgtggctactgtaaataccattttagtaagctgaaaaagagcaaacggggatctaataggtcatatgatcaaagtttaagtgattcttcctctcactctcaggataaacatcatgagaaagagaaaaaaaaatataaagagaaggacaaacacaaacagaaacacaagaagcagccagaaccatcacctgcattggttccatccttgactgttactacagaaaaaacttatacaagcactagcaacaactctatatctggatcattgaagcgcttggaagatactactgcacgatttacaaatgcaaatttccaggaagtctctgcacacacctctagtggaaaagatgtttcagagactagagggtcagagggcaaagggaagaaatcttcagctcacagctcaggtcaaaggggaagaaagcctggtggtggaagaaatccaggaacaactgtgtcagcagctagcccttttcctcaaggcagtttttcaggaactccaggcagtgtaaagtcatcttctggaagttcagtgcagtctccccaggatttcctgagctttacagactcagatctgcgtaatgacagttactctcactcccaacagtcatcagcaaccaaagatgtacataaaggagagtctggaagccaggaagggggggtaaatagttttagtaccttaattggcctcccttcaacctcagctgttacttcacagcctaaaagctttgaaaattcacctggagatttgggtaattccagccttcctacagcaggatataagcgggctcaaacttctggcatagaagaagaaactgtaaaggaaaagaaaaggaaaggaaataaacaaagtaagcatgggcctggcagacccaaaggaaacaaaaatcaagagaatgtttctcatctctcagtttcttctgcttcaccaacatcatctgtagcatcagctgcaggaagcataacaagctctagtctgcagaaatctcctacattgctcaggaatggaagtttacagagcctcagtgttggctcatctccagttggttcagaaatttccatgcagtatcggcatgatggagcttgcccaacaactacgttctcagagttgctgaatgcaatacacaacggtatttataacagcaatgatgtagcagtatcgtttccaaatgtagtatctggctcgggatctagtactcctgtctccagctctcacttacctcagcagtcttctgggcatttgcaacaagtaggagcgctctctccctcagctgtgtcatctgcagcccctgctgttgctacaactcaggcaaatactctatctggatcttctctcagtcaggcaccatctcatatgtatggcaatagatcaaattcatcaatggcagctcttatagctcagtctgaaaacaatcaaacagatcaagatcttggagacaatagccgcaacctagttggcagaggaagctcaccccgaggaagtctctcgccacgatcccctgtaagcagcttacagattcgctatgatcaaccaggcaacagcagtttggaaaatctgcctccagtagcagccagcatagaacagcttttggagaggcagtggagtgaaggacagcaatttttactagaacagggtactcctagtgacattttaggaatgctgaagtcattacaccaacttcaagttgaaaaccgaagattagaggaacaaattaaaaacttgactgccaaaaaggaacggcttcagttattgaatgcacagctttcagtgccttttccaacaataacagcaaatcctagtccgtctcatcaaatacacacattttcagcacagactgctcctactactgattccttgaacagcagtaagagccctcatataggaaacagctttttacctgataattctcttcctgtattaaatcaggacttaacctccagtggacaaagtaccagcagctcatcagctctttctaccccacctcctgctgggcagagtccggctcaacaaggctcaggagtgagtggagttcagcaggtcaatggcgtgacagtgggggcactagctagtggaatgcagcctgtaacttccaccattcctgccgtgtctgcagtgggtggaataattggagctttgccaggtaaccaactggcaattaatggcattgtaggagctttaaatggggttatgcagactcctgtcacaatgtcccagaaccctacccctctcacccacacaaccgtaccacctaatgcaacacatccaatgccagctacactgactaacagtgcctcaggactaggattactttctgaccagcaacgacaaatacttattcatcaacagcagtttcagcagttgttaaattctcaacagctcacaccagaacaacatcaagcctttttgtatcagttaatgcaacatcaccaccagcagcaccaccaacctgaacttcagcagctgcagatccctggaccaacacaaatacccataaacaaccttcttgcaggtacacaggcacccccacttcacacagctaccaccaacccatttctcaccatccatggagataatgcaagtcagaaagtagcaagacttagtgataaaactgggcctgtagctcaagagaaaagttgacacctgagaaacatctagaaattgcctatcctgctgttctagcacttcatctggctgcctttgcagtccttttactacagctatgaagaaacgcaacaagaaactcaatgcacaacaaaggattaattgctgcaaggacattcttgtaaggctttgattagttttcttgttgctttgttgcactgaaatggaattcccatgcccctaccccttaccccagttttttgaacatggaaagaaaatttaataactttttaaagtgacataatttacatgcaatatgtttatcaactcaagaatttaatatagttggtacacaactagttttgtttataaattggagatgcaaatagcaaaactaaatacttgctccatttacaaactacttgattttattgtacaagttgaaatatgctcttttgtttgggttacagtatgcttgctctaagtcaaattccaaggaactaatttcttctcctggagttgcattgattcagtattacaaatatatagcacatcacctgggacttggcaatctttgttaaaaaaaaatttcctttctaatgggatttggccaattttggtaatgaagttaggatggtaatgtctgcatctgctaaaggtaattttcttttgagaattgctttctttagtgttaagacctactcatattttgaagaaatcttgagttaagtgagttctgaggctgctgggggaaccagatcaattcaaagctaaatacttctttcagaaaggggccactgtggaaagtgctggtggggtttgcccttgatcaagtgcctccattgtgctgcaagggctgtagacagcagggtgggacagtcagtcctccgagcagcaggaatcatcccgtcacctgcagccttcccatgcttccgcctttattcagaactttctgtgccactgtagatagctcaggcaaaactattacctgggtatttatccactaatgagtcacaagaaaaggagtggatttggtaagaatagagatttgttttatttaaaccacttcccattactgaccattaaaagctcaccactagagttcctgaaacaggtgaaacctgtatgacagcccttccactttggggagccacgcttttgatgtgacagtaccgcagagtgattcccccactgaggatgtcatcatcaaactcttctttggtgtgtgaattattagtggaaaagacccagctgtaattagacctccactgtgtacttagctggaagaacatgttaattctgcaatatgtttcttggttaaacattgcacagttcttacctcatttctgtaaataaagttttgtgaatctgttttgtattgtgacaaattcataagataacattgatattttgatttgtaatatttctaattggtagatttaattgaaaagtaaaattaatttatttttatatgttcaggggaattttaaagtcaaatcttttgtagataatttaaaaaatcagtgtggtttattttacttatttaacccactggttgttattctgtaacagtttgtataaatggtaaattttgaatgtgttgttattttacctagatgtaaaattccacatgtattaaaatgtacaaaatgttttgttaataaaatttaataatgtttataaaaaaaaaaca

SEQ ID NO: 377604 - DNA, 5044 bp, Homo sapiens
gccctcttgattatgtgtgccctctccgggcgcccgcgttagcggccgggtggaggtggggagggaagacgctgaggaggaggaggaggcggaggaggcggtggaggggaggtggggggaatcagcaaggacatggctcctgactcctgtgcggaacgtgagtgactgagcggcaaagcccgaatggtctctagcgaccggcccgtgtcactggaggacgaggtctcccatagtatgaaggagatgattggaggctgttgcgtttgctcagacgagagaggctgggccgagaacccgctggtttattgcgacgggcacggctgcagcgtcgcggtgcatcaagcttgctatggcattgttcaagtacccactggaccgtggttttgcaggaaatgtgaatctcaggagagagcagccagagtgttattgcttactgtgagctaagacagttttgcctaacctcgaagtcatgaaggttgggcccatgtggtttgtgccctgtatattccagaggtacaatttgccaatgtttccacaatggaaccaattgttttacagtctgttccgcatgatcgttataataagacttgctacatttgtgatgaacaaggaagagaaagcaaagcagccactggtgcttgcatgacatgtaataaacatggatgtcgacaggctttccatgtaacatgcgctcagtttgccggactgctttgtgaagaagaaggtaatggtgccgataatgtccaatactgtggctactgtaaataccattttagtaagctgaaaaagagcaaacggggatctaataggtcatatgatcaaagtttaagtgattcttcctctcactctcaggataaacatcatgagaaagagaaaaaaaaatataaagagaaggacaaacacaaacagaaacacaagaagcagccagaaccatcacctgcattggttccatccttgactgttactacagaaaaaacttatacaagcactagcaacaactctatatctggatcattgaagcgcttggaagatactactgcacgatttacaaatgcaaatttccaggaagtctctgcacacacctctagtggaaaagatgtttcagagactagagggtcagagggcaaagggaagaaatcttcagctcacagctcaggtcaaaggggaagaaagcctggtggtggaagaaatccaggaacaactgtgtcagcagctagcccttttcctcaaggcagtttttcaggaactccaggcagtgtaaagtcatcttctggaagttcagtgcagtctccccaggatttcctgagctttacagactcagatctgcgtaatgacagttactctcactcccaacagtcatcagcaaccaaagatgtacataaaggagagtctggaagccaggaagggggggtaaatagttttagtaccttaattggcctcccttcaacctcagctgttacttcacagcctaaaagctttgaaaattcacctggagatttgggtaattccagccttcctacagcaggatataagcgggctcaaacttctggcatagaagaagaaactgtaaaggaaaagaaaaggaaaggaaataaacaaagtaagcatgggcctggcagacccaaaggaaacaaaaatcaagagaatgtttctcatctctcagtttcttctgcttcaccaacatcatctgtagcatcagctgcaggaagcataacaagctctagtctgcagaaatctcctacattgctcaggaatggaagtttacagagcctcagtgttggctcatctccagttggttcagaaatttccatgcagtatcggcatgatggagcttgcccaacaactacgttctcagagttgctgaatgcaatacacaacggtatttataacagcaatgatgtagcagtatcgtttccaaatgtagtatctggctcgggatctagtactcctgtctccagctctcacttacctcagcagtcttctgggcatttgcaacaagtaggagcgctctctccctcagctgtgtcatctgcagcccctgctgttgctacaactcaggcaaatactctatctggatcttctctcagtcaggcaccatctcatatgtatggcaatagatcaaattcatcaatggcagctcttatagctcagtctgaaaacaatcaaacagatcaagatcttggagacaatagccgcaacctagttggcagaggaagctcaccccgaggaagtctctcgccacgatcccctgtaagcagcttacagattcgctatgatcaaccaggcaacagcagtttggaaaatctgcctccagtagcagccagcatagaacagcttttggagaggcagtggagtgaaggacagcaatttttactagaacagggtactcctagtgacattttaggaatgctgaagtcattacaccaacttcaagttgaaaaccgaagattagaggaacaaattaaaaacttgactgccaaaaaggaacggcttcagttattgaatgcacagctttcagtgccttttccaacaataacagcaaatcctagtccgtctcatcaaatacacacattttcagcacagactgctcctactactgattccttgaacagcagtaagagccctcatataggaaacagctttttacctgataattctcttcctgtattaaatcaggacttaacctccagtggacaaagtaccagcagctcatcagctctttctaccccacctcctgctgggcagagtccggctcaacaaggctcaggagtgagtggagttcagcaggtcaatggcgtgacagtgggggcactagctagtggaatgcagcctgtaacttccaccattcctgccgtgtctgcagtgggtggaataattggagctttgccaggtaaccaactggcaattaatggcattgtaggagctttaaatggggttatgcagactcctgtcacaatgtcccagaaccctacccctctcacccacacaaccgtaccacctaatgcaacacatccaatgccagctacactgactaacagtgcctcaggactaggattactttctgaccagcaacgacaaatacttattcatcaacagcagtttcagcagttgttaaattctcaacagctcacaccagaacaacatcaagcctttttgtatcagttaatgcaacatcaccaccagcagcaccaccaacctgaacttcagcagctgcagatccctggaccaacacaaatacccataaacaaccttcttgcaggtacacaggcacccccacttcacacagctaccaccaacccatttctcaccatccatggagataatgcaagtcagaaagtagcaagacttagtgataaaactgggcctgtagctcaagagaaaagttgacacctgagaaacatctagaaattgcctatcctgctgttctagcacttcatctggctgcctttgcagtccttttactacagctatgaagaaacgcaacaagaaactcaatgcacaacaaaggattaattgctgcaaggacattcttgtaaggctttgattagttttcttgttgctttgttgcactgaaatggaattcccatgcccctaccccttaccccagttttttgaacatggaaagaaaatttaataactttttaaagtgacataatttacatgcaatatgtttatcaactcaagaatttaatatagttggtacacaactagttttgtttataaattggagatgcaaatagcaaaactaaatacttgctccatttacaaactacttgattttattgtacaagttgaaatatgctcttttgtttgggttacagtatgcttgctctaagtcaaattccaaggaactaatttcttctcctggagttgcattgattcagtattacaaatatatagcacatcacctgggacttggcaatctttgttaaaaaaaaatttcctttctaatgggatttggccaattttggtaatgaagttaggatggtaatgtctgcatctgctaaaggtaattttcttttgagaattgctttctttagtgttaagacctactcatattttgaagaaatcttgagttaagtgagttctgaggctgctgggggaaccagatcaattcaaagctaaatacttctttcagaaaggggccactgtggaaagtgctggtggggtttgcccttgatcaagtgcctccattgtgctgcaagggctgtagacagcagggtgggacagtcagtcctccgagcagcaggaatcatcccgtcacctgcagccttcccatgcttccgcctttattcagaactttctgtgccactgtagatagctcaggcaaaactattacctgggtatttatccactaatgagtcacaagaaaaggagtggatttggtaagaatagagatttgttttatttaaaccacttcccattactgaccattaaaagctcaccactagagttcctgaaacaggtgaaacctgtatgacagcccttccactttggggagccacgcttttgatgtgacagtaccgcagagtgattcccccactgaggatgtcatcatcaaactcttctttggtgtgtgaattattagtggaaaagacccagctgtaattagacctccactgtgtacttagctggaagaacatgttaattctgcaatatgtttcttggttaaacattgcacagttcttacctcatttctgtaaataaagttttgtgaatctgttttgtattgtgacaaattcataagataacattgatattttgatttgtaatatttctaattggtagatttaattgaaaagtaaaattaatttatttttatatgttcaggggaattttaaagtcaaatcttttgtagataatttaaaaaatcagtgtggtttattttacttatttaacccactggttgttattctgtaacagtttgtataaatggtaaattttgaatgtgttgttattttacctagatgtaaaattccacatgtattaaaatgtacaaaatgttttgttaataaaatttaataatgtttataaaaaaaaaaca

SEQ ID NO: 377605 - DNA, 4495 bp, Homo sapiens
gtggtcatcccgcctcagccacctactacaggaccgccaagaaaagaagttcccaaaaccactcctagtgagcccaagaaaaagcagcctccaccaccagaatcaggtccagagcagagcaaacagaaaaaagtggctccccgcccaagtatccctgtaaaacaaaaaccaaaagaaaaggaaaaaccacctccggtcaataagcaggagaatgcaggcactttgaacatcctcagcactctctccaatggcaatagttctaagcaaaaaattccagcagatggagtccacaggatcagagtggactttaaggaggattgtgaagcagaaaatgtgtgggagatgggaggcttaggaatcttgacttctgttcctataacacccagggtggtttgctttctctgtgccagtagtgggcatgtagagacttatacaagcactagcaacaactctatatctggatcattgaagcgcttggaagatactactgcacgatttacaaatgcaaatttccaggaagtctctgcacacacctctagtggaaaagatgtttcagagactagagggtcagagggcaaagggaagaaatcttcagctcacagctcaggtcaaaggggaagaaagcctggtggtggaagaaatccaggaacaactgtgtcagcagctagcccttttcctcaaggcagtttttcaggaactccaggcagtgtaaagtcatcttctggaagttcagtgcagtctccccaggatttcctgagctttacagactcagatctgcgtaatgacagttactctcactcccaacagtcatcagcaaccaaagatgtacataaaggagagtctggaagccaggaagggggggtaaatagttttagtaccttaattggcctcccttcaacctcagctgttacttcacagcctaaaagctttgaaaattcacctggagatttgggtaattccagccttcctacagcaggatataagcgggctcaaacttctggcatagaagaagaaactgtaaaggaaaagaaaaggaaaggaaataaacaaagtaagcatgggcctggcagacccaaaggaaacaaaaatcaagagaatgtttctcatctctcagtttcttctgcttcaccaacatcatctgtagcatcagctgcaggaagcataacaagctctagtctgcagaaatctcctacattgctcaggaatggaagtttacagagcctcagtgttggctcatctccagttggttcagaaatttccatgcagtatcggcatgatggagcttgcccaacaactacgttctcagagttgctgaatgcaatacacaacggtatttataacagcaatgatgtagcagtatcgtttccaaatgtagtatctggctcgggatctagtactcctgtctccagctctcacttacctcagcagtcttctgggcatttgcaacaagtaggagcgctctctccctcagctgtgtcatctgcagcccctgctgttgctacaactcaggcaaatactctatctggatcttctctcagtcaggcaccatctcatatgtatggcaatagatcaaattcatcaatggcagctcttatagctcagtctgaaaacaatcaaacagatcaagatcttggagacaatagccgcaacctagttggcagaggaagctcaccccgaggaagtctctcgccacgatcccctgtaagcagcttacagattcgctatgatcaaccaggcaacagcagtttggaaaatctgcctccagtagcagccagcatagaacagcttttggagaggcagtggagtgaaggacagcaatttttactagaacagggtactcctagtgacattttaggaatgctgaagtcattacaccaacttcaagttgaaaaccgaagattagaggaacaaattaaaaacttgactgccaaaaaggaacggcttcagttattgaatgcacagctttcagtgccttttccaacaataacagcaaatcctagtccgtctcatcaaatacacacattttcagcacagactgctcctactactgattccttgaacagcagtaagagccctcatataggaaacagctttttacctgataattctcttcctgtattaaatcaggacttaacctccagtggacaaagtaccagcagctcatcagctctttctaccccacctcctgctgggcagagtccggctcaacaaggctcaggagtgagtggagttcagcaggtcaatggcgtgacagtgggggcactagctagtggaatgcagcctgtaacttccaccattcctgccgtgtctgcagtgggtggaataattggagctttgccaggtaaccaactggcaattaatggcattgtaggagctttaaatggggttatgcagactcctgtcacaatgtcccagaaccctacccctctcacccacacaaccgtaccacctaatgcaacacatccaatgccagctacactgactaacagtgcctcaggactaggattactttctgaccagcaacgacaaatacttattcatcaacagcagtttcagcagttgttaaattctcaacagctcacaccagaacaacatcaagcctttttgtatcagttaatgcaacatcaccaccagcagcaccaccaacctgaacttcagcagctgcagatccctggaccaacacaaatacccataaacaaccttcttgcaggtacacaggcacccccacttcacacagctaccaccaacccatttctcaccatccatggagataatgcaagtcagaaagtagcaagacttagtgataaaactgggcctgtagctcaagagaaaagttgacacctgagaaacatctagaaattgcctatcctgctgttctagcacttcatctggctgcctttgcagtccttttactacagctatgaagaaacgcaacaagaaactcaatgcacaacaaaggattaattgctgcaaggacattcttgtaaggctttgattagttttcttgttgctttgttgcactgaaatggaattcccatgcccctaccccttaccccagttttttgaacatggaaagaaaatttaataactttttaaagtgacataatttacatgcaatatgtttatcaactcaagaatttaatatagttggtacacaactagttttgtttataaattggagatgcaaatagcaaaactaaatacttgctccatttacaaactacttgattttattgtacaagttgaaatatgctcttttgtttgggttacagtatgcttgctctaagtcaaattccaaggaactaatttcttctcctggagttgcattgattcagtattacaaatatatagcacatcacctgggacttggcaatctttgttaaaaaaaaatttcctttctaatgggatttggccaattttggtaatgaagttaggatggtaatgtctgcatctgctaaaggtaattttcttttgagaattgctttctttagtgttaagacctactcatattttgaagaaatcttgagttaagtgagttctgaggctgctgggggaaccagatcaattcaaagctaaatacttctttcagaaaggggccactgtggaaagtgctggtggggtttgcccttgatcaagtgcctccattgtgctgcaagggctgtagacagcagggtgggacagtcagtcctccgagcagcaggaatcatcccgtcacctgcagccttcccatgcttccgcctttattcagaactttctgtgccactgtagatagctcaggcaaaactattacctgggtatttatccactaatgagtcacaagaaaaggagtggatttggtaagaatagagatttgttttatttaaaccacttcccattactgaccattaaaagctcaccactagagttcctgaaacaggtgaaacctgtatgacagcccttccactttggggagccacgcttttgatgtgacagtaccgcagagtgattcccccactgaggatgtcatcatcaaactcttctttggtgtgtgaattattagtggaaaagacccagctgtaattagacctccactgtgtacttagctggaagaacatgttaattctgcaatatgtttcttggttaaacattgcacagttcttacctcatttctgtaaataaagttttgtgaatctgttttgtattgtgacaaattcataagataacattgatattttgatttgtaatatttctaattggtagatttaattgaaaagtaaaattaatttatttttatatgttcaggggaattttaaagtcaaatcttttgtagataatttaaaaaatcagtgtggtttattttacttatttaacccactggttgttattctgtaacagtttgtataaatggtaaattttgaatgtgttgttattttacctagatgtaaaattccacatgtattaaaatgtacaaaatgttttgttaataaaatttaataatgtttataaaaaaaaaaca

SEQ ID NO: 377606 - DNA, 1543 bp, Homo sapiens
gccctcttgattatgtgtgccctctccgggcgcccgcgttagcggccgggtggaggtggggagggaagacgctgaggaggaggaggaggcggaggaggcggtggaggggaggtggggggaatcagcaaggacatggctcctgactcctgtgcggaacgtgagtgactgagcggcaaagcccgaatggtctctagcgaccggcccgtgtcactggaggacgaggtctcccatagtatgaaggagatgattggaggctgttgcgtttgctcagacgagagaggctgggccgagaacccgctggtttattgcgacgggcacggctgcagcgtcgcggtgcatcaagcttgctatggcattgttcaagtacccactggaccgtggttttgcaggaaatgtgaatctcaggagagagcagccagagtgagatgtgaactttgtccccataaggatggagctttaaaaagaacagataatgggggttgggcccatgtggtttgtgccctgtatattccagaggtacaatttgccaatgtttccacaatggaaccaattgttttacagtctgttccgcatgatcgttataataagacttgctacatttgtgatgaacaaggaagagaaagcaaagcagccactggtgcttgcatgacatgtaataaacatggatgtcgacaggctttccatgtaacatgcgctcagtttgccggactgctttgtgaagaagaaggtaatggtgccgataatgtccaatactgtggctactgtaaataccattttagtaagctgaaaaagagcaaacggggatctaataggtcatatgatcaaagtttaagtgattcttcctctcactctcaggataaacatcatgagaaagagaaaaaaaaatataaagagaaggacaaacacaaacagaaacacaagaagcagccagaaccatcacctgcattggttccatccttgactgttactacagaaaaaacttatacaagcactagcaacaactctatatctggatcattgaagcgcttggaagatactactgcacgatttacaaatgcaaatttccaggaagtctctgcacacacctctagtggaaaagatgtttcagagactagagggtcagagggcaaagggaagaaatcttcagctcacagctcaggtcaaaggggaagaaagcctggtggtggaagaaatccaggaacaactgtgtcagcagctagcccttttcctcaaggtattagtgatgttttagttaaaatacttgtgtttaagatggttaataatagttatgctttgtaaaataattggtttgtttttgaacttataactaatggatgttctagattattatatgattagttgctttagtaagattactttaaagatagtgtttcctattaaatttttttaatagggactttttctttccttttataatatgatttgtgcttccagagttgaattgtaattttaatgtttaactagatatggaataatgcttaaaattggggagaaaaataataaaagctggagctttgctttg

SEQ ID NO: 377607 - DNA, 407 bp, Homo sapiens
ggaactggagaaacagcaaaccaaacccaaagtgctgggattacaggcgtgagccaccacgcccggctggaagacttaatttgtgggtgactaatcataatgcttaaatgaagaaaagacaataaaattcaatccctcctcttctttttgtcctcaggatcaaaatacttgctggatggtggactcagagaccaataaaaataaactgcttgaacatcctttgactggttagccaggtaattcagctttagtttgatttgatcctttgtaattttttgtcttcaaccttctgaagatattaccctcctctttaatttatgatttaattaaaactatttatgcttcatgtttttctctttaatgattattaaatgaatgtgcttagagtacttgagtatccgtatgtg

SEQ ID NO: 377608 - DNA, 1116 bp, Homo sapiens
atcttcagttgcttcagaccatctggatgtatatgtgcaggcttggtctcagaggcctgacagttataatcttacctgcagtggtgaaaaacggagacgggagcaggaaagtaaatatattgaagaattggctgagctgatatctgccaatcttagtgatattgacaatttcaatgtcaaaccagataaatgtgcgattttaaaggaaacagtaagacagatacgtcaaataaaagagcaagggaatcgatctataatccaatctgatgtatgatgtggcaaaaagccgatgtggtctatctgatctgggctagggtcgtgattgataaaagactccttaggagccgtctttttgacttcagtgcatgtgttgatgtgtttccttatttgtgggtgagatcgagaccggaaacatttgtactttggtaatacaggacaaattgtccacacaataacgctgtctagtattaagcaatggaggaggctgtgttgatgaactacaagtgtattaggtaataatctttattgatttggatataggacacgaggatgattttcgtgggacatgtatcggcatcggatctggattagtttacatgtgtatctattccttgggaccaaaatggaggaccccaatgcggaacaacaaaaaagtccttggactcttttctgggtctggcccttttttgtctcatttctctggagacaccatctctgggaaactcgtccacacagggtcccttcggttccatacgacgacctcggcttacagacaataacctctcctcttcaaacttcttgggtcttgcgttttgcttctctggcctgccgtgatggcggcgtgcttcggctttcccttgtgtttcaacctggccttcgggggttctttcttcttcgagaaacctgtaggtgggcaatctttctttataaaaatcttaagtgaaaaacttactcggaaggggcgctggagccttcttaaatggtagggggacggggggcgatctaaataggtgagagagagctctcttccctagagaagaacctttcttaaggcgagcctctcttttctaacctggaagagtgtcgcggataaccttgagcttttctataaggggg

SEQ ID NO: 377609 - DNA, 8731 bp, Homo sapiens
  misc_feature (5)..(5): n is a, c, g, or t
cggcngcggctgcggcttagtcggtggcggccggcggcggctgcgggctgagcggcgagtttccgatttaaagctgagctgcgaggaaaatggcggcgggaggatcaaaatacttgctggatggtggactcagagaccaataaaaataaactgcttgaacatcctttgactggttagccagttgctgatgtatattcaagatgagtggattaggagaaaacttggatccactggccagtgattcacgaaaacgcaaattgccatgtgatactccaggacaaggtcttacctgcagtggtgaaaaacggagacgggagcaggaaagtaaatatattgaagaattggctgagctgatatctgccaatcttagtgatattgacaatttcaatgtcaaaccagataaatgtgcgattttaaaggaaacagtaagacagatacgtcaaataaaagagcaaggaaaaactatttccaatgatgatgatgttcaaaaagccgatgtatcttctacagggcagggagttattgataaagactccttaggaccgcttttacttcaggcattggatggtttcctatttgtggtgaatcgagacggaaacattgtatttgtatcagaaaatgtcacacaatacctgcaatataagcaagaggacctggttaacacaagtgtttacaatatcttacatgaagaagacagaaaggattttcttaagaatttaccaaaatctacagttaatggagtttcctggacaaatgagacccaaagacaaaaaagccatacatttaattgccgtatgttgatgaaaacaccacatgatattctggaagacataaacgccagtcctgaaatgcgccagagatatgaaacaatgcagtgctttgccctgtctcagccacgagctatgatggaggaaggggaagatttgcaatcttgtatgatctgtgtggcacgccgcattactacaggagaaagaacatttccatcaaaccctgagagctttattaccagacatgatctttcaggaaaggttgtcaatatagatacaaattcactgagatcctccatgaggcctggctttgaagatataatccgaaggtgtattcagagattttttagtctaaatgatgggcagtcatggtcccagaaacgtcactatcaagaagcttatcttaatggccatgcagaaaccccagtatatcgattctcgttggctgatggaactatagtgactgcacagacaaaaagcaaactcttccgaaatcctgtaacaaatgatcgacatggctttgtctcaacccacttccttcagagagaacagaatggatatagaccaaacccaaatcctgttggacaagggattagaccacctatggctggatgcaacagttcggtaggcggcatgagtatgtcgccaaaccaaggcttacagatgccgagcagcagggcctatggcttggcagaccctagcaccacagggcagatgagtggagctaggtatgggggttccagtaacatagcttcattgacccctgggccaggcatgcaatcaccatcttcctaccagaacaacaactatgggctcaacatgagtagccccccacatgggagtcctggtcttgccccaaaccagcagaatatcatgatttctcctcgtaatcgtgggagtccaaagatagcctcacatcagttttctcctgttgcaggtgtgcactctcccatggcatcttctggcaatactgggaaccacagcttttccagcagctctctcagtgccctgcaagccatcagtgaaggtgtggggacttcccttttatctactctgtcatcaccaggccccaaattggataactctcccaatatgaatattacccaaccaagtaaagtaagcaatcaggattccaagagtcctctgggcttttattgcgaccaaaatccagtggagagttcaatgtgtcagtcaaatagcagagatcacctcagtgacaaagaaagtaaggagagcagtgttgagggggcagagaatcaaaggggtcctttggaaagcaaaggtcataaaaaattactgcagttacttacctgttcttctgatgaccggggtcattcctccttgaccaactcccccctagattcaagttgtaaagaatcttctgttagtgtcaccagcccctctggagtctcctcctctacatctggaggagtatcctctacatccaatatgcatgggtcactgttacaagagaagcaccggattttgcacaagttgctgcagaatgggaattcaccagctgaggtagccaagattactgcagaagccactgggaaagacaccagcagtataacttcttgtggggacggaaatgttgtcaagcaggagcagctaagtcctaagaagaaggagaataatgcacttcttagatacctgctggacagggatgatcctagtgatgcactctctaaagaactacagccccaagtggaaggagtggataataaaatgagtcagtgcaccagctccaccattcctagctcaagtcaagagaaagaccctaaaattaagacagagacaagtgaagagggatctggagacttggataatctagatgctattcttggtgatctgactagttctgacttttacaataattccatatcctcaaatggtagtcatctggggactaagcaacaggtgtttcaaggaactaattctctgggtttgaaaagttcacagtctgtgcagtctattcgtcctccatataaccgagcagtgtctctggatagccctgtttctgttggctcaagtcctccagtaaaaaatatcagtgctttccccatgttaccaaagcaacccatgttgggtgggaatccaagaatgatggatagtcaggaaaattatggctcaagtatgggtgggccaaaccgaaatgtgactgtgactcagactccttcctcaggagactggggcttaccaaactcaaaggccggcagaatggaacctatgaattcaaactccatgggaagaccaggaggagattataatacttctttacccagacctgcactgggtggctctattcccacattgcctcttcggtctaatagcataccaggtgcgagaccagtattgcaacagcagcagcagatgcttcaaatgaggcctggtgaaatccccatgggaatgggggctaatccctatggccaagcagcagcatctaaccaactgggttcctggcccgatggcatgttgtccatggaacaagtttctcatggcactcaaaataggcctcttcttaggaattccctggatgatcttgttgggccaccttccaacctggaaggccagagtgacgaaagagcattattggaccagctgcacactcttctcagcaacacagatgccacaggcctggaagaaattgacagagctttgggcattcctgaacttgtcaatcagggacaggcattagagcccaaacaggatgctttccaaggccaagaagcagcagtaatgatggatcagaaggcaggattatatggacagacatacccagcacaggggcctccaatgcaaggaggctttcatcttcagggacaatcaccatcttttaactctatgatgaatcagatgaaccagcaaggcaattttcctctccaaggaatgcacccacgagccaacatcatgagaccccggacaaacacccccaagcaacttagaatgcagcttcagcagaggctgcagggccagcagtttttgaatcagagccgacaggcacttgaattgaaaatggaaaaccctactgctggtggtgctgcggtgatgaggcctatgatgcagccccagcagggttttcttaatgctcaaatggtcgcccaacgcagcagagagctgctaagtcatcacttccgacaacagagggtggctatgatgatgcagcagcagcagcagcagcaacagcagcagcagcagcagcagcagcagcaacagcaacagcaacagcaacagcagcaacagcagcaaacccaggccttcagcccacctcctaatgtgactgcttcccccagcatggatgggcttttggcaggacccacaatgccacaagctcctccgcaacagtttccatatcaaccaaattatggaatgggacaacaaccagatccagcctttggtcgagtgtctagtcctcccaatgcaatgatgtcgtcaagaatgggtccctcccagaatcccatgatgcaacacccgcaggctgcatccatctatcagtcctcagaaatgaagggctggccatcaggaaatttggccaggaacagctccttttcccagcagcagtttgcccaccaggggaatcctgcagtgtatagtatggtgcacatgaatggcagcagtggtcacatgggacagatgaacatgaaccccatgcccatgtctggcatgcctatgggtcctgatcagaaatactgctgacatctctgcaccaggacctcttaaggaaaccactgtacaaatgacactgcactaggattattgggaaggaatcattgttccaggcatccatcttggaagaaaggaccagctttgagctccatcaagggtattttaagtgatgtcatttgagcaggactggattttaagccgaagggcaatatctacgtgtttttcccccctccttctgctgtgtatcatggtgttcaaaacagaaatgttttttggcattccacctcctagggatataattctggagacatggagtgttactgatcataaaacttttgtgtcacttttttctgccttgctagccaaaatctcttaaatacacgtaggtgggccagagaacattggaagaatcaagagagattagaatatctggtttctctagttgcagtattggacaaagagcatagtcccagccttcaggtgtagtagttctgtgttgaccctttgtccagtggaattggtgattctgaattgtcctttactaatggtgttgagttgctctgtccctattatttgccctaggctttctcctaatgaaggttttcatttgccattcatgtcctgtaatacttcacctccaggaactgtcatggatgtccaaatggctttgcagaaaggaaatgagatgacagtatttaatcgcagcagtagcaaacttttcacatgctaatgtgcagctgagtgcactttatttaaaaagaatggataaatgcaatattcttgaggtcttgagggaatagtgaaacacattcctggtttttgcctacacttacgtgttagacaagaactatgatttttttttttaaagtactggtgtcaccctttgcctatatggtagagcaataatgctttttaaaaataaacttctgaaaacccaaggccaggtactgcattctgaatcagaatctcgcagtgtttctgtgaatagatttttttgtaaatatgacctttaagatattgtattatgtaaaatatgtatatacctttttttgtaggtcacaacaactcatttttacagagtttgtgaagctaaatatttaacattgttgatttcagtaagctgtgtggtgaggctaccagtggaagagacatcccttgacttttgtggcctgggggaggggtagtgctccacagcttttccttccccaccccccagccttagatgcctcgctcttttcaatctcttaatctaaatgctttttaaagagattatttgtttagatgtaggcattttaattttttaaaaattcctctaccagaactaagcactttgttaatttggggggaaagaatagatatggggaaataaacttaaaaaaaaatcaggaatttaaaaaaacgagcaatttgaagagaatcttttggattttaagcagtccgaaataatagcaattcatgggctgtgtgtgtgtgtgtatgtgtgtgtgtgtgtgtgtatgtttaattatgttaccttttcatcccctttaggagcgttttcagattttggttgctaagacctgaatcccatattgagatctcgagtagaatccttggtgtggtttctggtgtctgctcagctgtcccctcattctactaatgtgatgctttcattatgtccctgtggattagaatagtgtcagttatttcttaagtaactcagtacccagaacagccagttttactgtgattcagagccacagtctaactgagcaccttttaaacccctccctcttctgccccctaccacttttctgctgttgcctctctttgacacctgttttagtcagttgggaggaagggaaaaatcaagtttaattccctttatctgggttaattcatttggttcaaatagttgacggaattgggtttctgaatgtctgtgaatttcagaggtctctgctagccttggtatcattttctagcaataactgagagccagttaattttaagaatttcacacatttagccaatctttctagatgtctctgaaggtaagatcatttaatatctttgatatgcttacgagtaagtgaatcctgattatttccagacccaccaccagagtggatcttattttcaaagcagtatagacaattatgagtttgccctctttcccctaccaagttcaaaatatatctaagaaagattgtaaatccgaaaacttccattgtagtggcctgtgcttttcagatagtatactctcctgtttggagacagaggaagaaccaggtcagtctgtctctttttcagctcaattgtatctgacccttctttaagttatgtgtgtggggagaaatagaatggtgctcttatctttcttgactttaaaaaaattattaaaaacaaaaaaaaaataaatttttttgcaatcctttcctcagacctggctccaggctaactggaaggcagcactcccttttttatatagtagaaaaatgaagtttattataagtttttatattttctacttgttcatttggtgcaaactcaagatttcttttaataggtgcagtctttgagataatttgtttttacctgtattgccctttatcttttttaggtaattctttgtactcctgctgtctacctctcctcacaccccagcaccccccattttttcaaaccttggtatctgttgggtgaacagtataatcttttcatctgcttttagaatgtgggatatttccagtacctactttttttttttttttttgctgaatccaaagatatataaataaaatatatatattttataaagatcagaatgatataaaggagatacatgtttcttcctttaaaaaataaacggaagttacattgttaatgttcatattatgatgccacttttctaaactgcatctggattgaaaggtgtaaatatcaataacagtgctacttagttatcagtatttaatatctgaggtgagttgggggtatctatattaggggtagggtattacagaagataattggcttgatgtcctagaagttctttgatccagaggtgggtgcagctgaaagtaaacagaatggattgccagttacatgtatgcctgcccagttccctttttatttgcagaagctgtgagttttgttcacaattaggttcctaggagcaaaacctcaaggattgatttattgttttcaactccaaggcacactgttaataaacgagcagggtgttttctctcttcctttctaatatatggagtttcgaagaataaaatatgagagcaatatttaaattctcaggaattgacttatactcttgagaatgaattcagtttcaatcaagtttacattatgttgcttaaaaaaatagaaattattctttatcttgcaaagaattgaaaccacatgaaatgacttatgggggatggtgagctgtgactgctttgctgaccattttggatgtcattgtaaataaaggtttctatttaaaaaaaaaaaaaaaaaaaaaaaaaaaaaaaaaaaaaaagaaggagggaggcaaaaaacaaaaaaattggggaaggagaaaaaaaaaaaaaaatagggaaagggggcgaaaggcgttcaataaaaacaaacacggcgaccgggagccgggccgcctacaaacaaccgatcccggacggggcacatcaaccaagagtagccctgcgaaatcacatcgttgaaggacaaacacaccaccatacacggtgaagagcggcgataaccaaaatggggggcgtaccaaaacaccaacctgagacaatattatttaacgccctcccccaggaaagaacacatatcaatcagcaaacaacacagagatggtataggcgggtacgaaccacacatagcgcacagcatatctgtcgcacggcacgaggcaaacataatctgattggactcagagagcaagtagatactcacgttctaacgacaactatatcaccacgcagagttgagatgagggagtgagataaagagcgagggcggcgacacgaggcgcagagcgaccggcagccaggacaccagacgagggcgggggaaggaccagagcgacaagagcagggagatacgagcagggaggagagacgatcgcgacgagcggagacagaagcgacgaagagcagaagagaccgaaggagcggcggcgacgggctgcacgagagagcgaatcagggaggcgcgacgaaagcgaaacggacccaccgaacgcgccagacaacgcaccgcgagacacgaggaccggacgagagaacgaacagagagacgccacgagagta

SEQ ID NO: 377610 - DNA, 7892 bp, Homo sapiens
  misc_feature (5)..(5): n is a, c, g, or t
  misc_feature (7180)..(7180): n is a, c, g, or t
  misc_feature (7187)..(7187): n is a, c, g, or t
  misc_feature (7206)..(7207): n is a, c, g, or t
  misc_feature (7210)..(7211): n is a, c, g, or t
  misc_feature (7221)..(7221): n is a, c, g, or t
  misc_feature (7228)..(7230): n is a, c, g, or t
cggcngcggctgcggcttagtcggtggcggccggcggcggctgcgggctgagcggcgagtttccgatttaaagctgagctgcgaggaaaatggcggcgggaggatcaaaatacttgctggatggtggactcagagaccaataaaaataaactgcttgaacatcctttgactggttagccagttgctgatgtatattcaagatgagtggattaggagaaaacttggatccactggccagtgattcacgaaaacgcaaattgccatgtgatactccaggacaaggtcttacctgcagtggtgaaaaacggagacgggagcaggaaagtaaatatattgaagaattggctgagctgatatctgccaatcttagtgatattgacaatttcaatgtcaaaccagataaatgtgcgattttaaaggaaacagtaagacagatacgtcaaataaaagagcaaggaaaaactatttccaatgatgatgatgttcaaaaagccgatgtatcttctacagggcagggagttattgataaagactccttaggaccgcttttacttcaggcattggatggtttcctatttgtggtgaatcgagacggaaacattgtatttgtatcagaaaatgtcacacaatacctgcaatataagcaagaggacctggttaacacaagtgtttacaatatcttacatgaagaagacagaaaggattttcttaagaatttaccaaaatctacagttaatggagtttcctggacaaatgagacccaaagacaaaaaagccatacatttaattgccgtatgttgatgaaaacaccacatgatattctggaagacataaacgccagtcctgaaatgcgccagagatatgaaacaatgcagtgctttgccctgtctcagccacgagctatgatggaggaaggggaagatttgcaatcttgtatgatctgtgtggcacgccgcattactacaggagaaagaacatttccatcaaaccctgagagctttattaccagacatgatctttcaggaaaggttgtcaatatagatacaaattcactgagatcctccatgaggcctggctttgaagatataatccgaaggtgtattcagagattttttagtctaaatgatgggcagtcatggtcccagaaacgtcactatcaagaagcttatcttaatggccatgcagaaaccccagtatatcgattctcgttggctgatggaactatagtgactgcacagacaaaaagcaaactcttccgaaatcctgtaacaaatgatcgacatggctttgtctcaacccacttccttcagagagaacagaatggatatagaccaaacccaaatcctgttggacaagggattagaccacctatggctggatgcaacagttcggtaggcggcatgagtatgtcgccaaaccaaggcttacagatgccgagcagcagggcctatggcttggcagaccctagcaccacagggcagatgagtggagctaggtatgggggttccagtaacatagcttcattgacccctgggccaggcatgcaatcaccatcttcctaccagaacaacaactatgggctcaacatgagtagccccccacatgggagtcctggtcttgccccaaaccagcagaatatcatgatttctcctcgtaatcgtgggagtccaaagatagcctcacatcagttttctcctgttgcaggtgtgcactctcccatggcatcttctggcaatactgggaaccacagcttttccagcagctctctcagtgccctgcaagccatcagtgaaggtgtggggacttcccttttatctactctgtcatcaccaggccccaaattggataactctcccaatatgaatattacccaaccaagtaaagtaagcaatcaggattccaagagtcctctgggcttttattgcgaccaaaatccagtggagagttcaatgtgtcagtcaaatagcagagatcacctcagtgacaaagaaagtaaggagagcagtgttgagggggcagagaatcaaaggggtcctttggaaagcaaaggtcataaaaaattactgcagttacttacctgttcttctgatgaccggggtcattcctccttgaccaactcccccctagattcaagttgtaaagaatcttctgttagtgtcaccagcccctctggagtctcctcctctacatctggaggagtatcctctacatccaatatgcatgggtcactgttacaagagaagcaccggattttgcacaagttgctgcagaatgggaattcaccagctgaggtagccaagattactgcagaagccactgggaaagacaccagcagtataacttcttgtggggacggaaatgttgtcaagcaggagcagctaagtcctaagaagaaggagaataatgcacttcttagatacctgctggacagggatgatcctagtgatgcactctctaaagaactacagccccaagtggaaggagtggataataaaatgagtcagtgcaccagctccaccattcctagctcaagtcaagagaaagaccctaaaattaagacagagacaagtgaagagggatctggagacttggataatctagatgctattcttggtgatctgactagttctgacttttacaataattccatatcctcaaatggtagtcatctggggactaagcaacaggtgtttcaaggaactaattctctgggtttgaaaagttcacagtctgtgcagtctattcgtcctccatataaccgagcagtgtctctggatagccctgtttctgttggctcaagtcctccagtaaaaaatatcagtgctttccccatgttaccaaagcaacccatgttgggtgggaatccaagaatgatggatagtcaggaaaattatggctcaagtatgggtgggccaaaccgaaatgtgactgtgactcagactccttcctcaggagactggggcttaccaaactcaaaggccggcagaatggaacctatgaattcaaactccatgggaagaccaggaggagattataatacttctttacccagacctgcactgggtggctctattcccacattgcctcttcggtctaatagcataccaggtgcgagaccagtattgcaacagcagcagcagatgcttcaaatgaggcctggtgaaatccccatgggaatgggggctaatccctatggccaagcagcagcatctaaccaactgggttcctggcccgatggcatgttgtccatggaacaagtttctcatggcactcaaaataggcctcttcttaggaattccctggatgatcttgttgggccaccttccaacctggaaggccagagtgacgaaagagcattattggaccagctgcacactcttctcagcaacacagatgccacaggcctggaagaaattgacagagctttgggcattcctgaacttgtcaatcagggacaggcattagagcccaaacaggatgctttccaaggccaagaagcagcagtaatgatggatcagaaggcaggattatatggacagacatacccagcacaggggcctccaatgcaaggaggctttcatcttcagggacaatcaccatcttttaactctatgatgaatcagatgaaccagcaaggcaattttcctctccaaggaatgcacccacgagccaacatcatgagaccccggacaaacacccccaagcaacttagaatgcagcttcagcagaggctgcagggccagcagtttttgaatcagagccgacaggcacttgaattgaaaatggaaaaccctactgctggtggtgctgcggtgatgaggcctatgatgcagccccagcagggttttcttaatgctcaaatggtcgcccaacgcagcagagagctgctaagtcatcacttccgacaacagagggtggctatgatgatgcagcagcagcagcagcagcaacagcagcagcagcagcagcagcagcagcaacagcaacagcaacagcaacagcagcaacagcagcaaacccaggccttcagcccacctcctaatgtgactgcttcccccagcatggatgggcttttggcaggacccacaatgccacaagctcctccgcaacagtttccatatcaaccaaattatggaatgggacaacaaccagatccagcctttggtcgagtgtctagtcctcccaatgcaatgatgtcgtcaagaatgggtccctcccagaatcccatgatgcaacacccgcaggctgcatccatctatcagtcctcagaaatgaagggctggccatcaggaaatttggccaggaacagctccttttcccagcagcagtttgcccaccaggggaatcctgcagtgtatagtatggtgcacatgaatggcagcagtggtcacatgggacagatgaacatgaaccccatgcccatgtctggcatgcctatgggtcctgatcagaaatactgctgacatctctgcaccaggacctcttaaggaaaccactgtacaaatgacactgcactaggattattgggaaggaatcattgttccaggcatccatcttggaagaaaggaccagctttgagctccatcaagggtattttaagtgatgtcatttgagcaggactggattttaagccgaagggcaatatctacgtgtttttcccccctccttctgctgtgtatcatggtgttcaaaacagaaatgttttttggcattccacctcctagggatataattctggagacatggagtgttactgatcataaaacttttgtgtcacttttttctgccttgctagccaaaatctcttaaatacacgtaggtgggccagagaacattggaagaatcaagagagattagaatatctggtttctctagttgcagtattggacaaagagcatagtcccagccttcaggtgtagtagttctgtgttgaccctttgtccagtggaattggtgattctgaattgtcctttactaatggtgttgagttgctctgtccctattatttgccctaggctttctcctaatgaaggttttcatttgccattcatgtcctgtaatacttcacctccaggaactgtcatggatgtccaaatggctttgcagaaaggaaatgagatgacagtatttaatcgcagcagtagcaaacttttcacatgctaatgtgcagctgagtgcactttatttaaaaagaatggataaatgcaatattcttgaggtcttgagggaatagtgaaacacattcctggtttttgcctacacttacgtgttagacaagaactatgatttttttttttaaagtactggtgtcaccctttgcctatatggtagagcaataatgctttttaaaaataaacttctgaaaacccaaggccaggtactgcattctgaatcagaatctcgcagtgtttctgtgaatagatttttttgtaaatatgacctttaagatattgtattatgtaaaatatgtatatacctttttttgtaggtcacaacaactcatttttacagagtttgtgaagctaaatatttaacattgttgatttcagtaagctgtgtggtgaggctaccagtggaagagacatcccttgacttttgtggcctgggggaggggtagtgctccacagcttttccttccccaccccccagccttagatgcctcgctcttttcaatctcttaatctaaatgctttttaaagagattatttgtttagatgtaggcattttaattttttaaaaattcctctaccagaactaagcactttgttaatttggggggaaagaatagatatggggaaataaacttaaaaaaaaatcaggaatttaaaaaaacgagcaatttgaagagaatcttttggattttaagcagtccgaaataatagcaattcatgggctgtgtgtgtgtgtgtatgtgtgtgtgtgtgtgtgtatgtttaattatgttaccttttcatcccctttaggagcgttttcagattttggttgctaagacctgaatcccatattgagatctcgagtagaatccttggtgtggtttctggtgtctgctcagctgtcccctcattctactaatgtgatgctttcattatgtccctgtggattagaatagtgtcagttatttcttaagtaactcagtacccagaacagccagttttactgtgattcagagccacagtctaactgagcaccttttaaacccctccctcttctgccccctaccacttttctgctgttgcctctctttgacacctgttttagtcagttgggaggaagggaaaaatcaagtttaattccctttatctgggttaattcatttggttcaaatagttgacggaattgggtttctgaatgtctgtgaatttcagaggtctctgctagccttggtatcattttctagcaataactgagagccagttaattttaagaatttcacacatttagccaatctttctagatgtctctgaaggtaagatcatttaatatctttgatatgcttacgagtaagtgaatcctgattatttccagacccaccaccagagtggatcttattttcaaagcagtatagacaattatgagtttgccctctttcccctaccaagttcaaaatatatctaagaaagattgtaaatccgaaaacttccattgtagtggcctgtgcttttcagatagtatactctcctgtttggagacagaggaagaaccaggtcagtctgtctctttttcagctcaattgtatctgacccttctttaagttatgtgtgtggggagaaatagaatggtgctcttatctttcttgactttaaaaaaattattaaaaacaaaaaaaaaataaatttttttgcaatcctttcctcagacctggctccaggctaactggaaggcagcactcccttttttatatagtagaaaaatgaagtttattataagtttttatattttctacttatttcttttaataggtgcagtctttgagataatttgtttttacctgtattgccctttatcttttttaggtaattctttgtactcctgctgtctacctctcctcacaccccagcaccccccattttttcaaaccttggtatctgttgggtgaacagtataatcttttcatctgcttttagaatgtgggatatttccagtacctactttttttttttttttttgctgggttttttanttccctnttttttttttctataaggnnccnnattgttttangggagannncatgtttcttcctttaaaaaataaacggaagttacattgttaatgttcatattatgatgccacttttctaaactgcatctggattgaaaggtgtaaatatcaataacagtgctacttagttatcagtatttaatatctgaggtgagttgggggtatctatattaggggtagggtattacagaagataattggcttgatgtcctagaagttctttgatccagaggtgggtgcagctgaaagtaaacagaatggattgccagttacatgtatgcctgcccagttccctttttatttgcagaagctgtgagttttgttcacaattaggttcctaggagcaaaacctcaaggattgatttattgttttcaactccaaggcacactgttaataaacgagcagggtgttttctctcttcctttctaatatatggagtttcgaagaataaaatatgagagcaatatttaaattctcaggaattgacttatactcttgagaatgaattcagtttcaatcaagtttacattatgttgcttaaaaaaatagaaattattctttatcttgcaaagaattgaaaccacatgaaatgacttatgggggatggtgagctgtgactgctttgctgaccattttggatgtcattgtaaataaaggtttctatttaaaa

SEQ ID NO: 377611 - DNA, 7902 bp, Homo sapiens
  misc_feature (5)..(5): n is a, c, g, or t
cggcngcggctgcggcttagtcggtggcggccggcggcggctgcgggctgagcggcgagtttccgatttaaagctgagctgcgaggaaaatggcggcgggaggatcaaaatacttgctggatggtggactcagagaccaataaaaataaactgcttgaacatcctttgactggttagccagttgctgatgtatattcaagatgagtggattaggagaaaacttggatccactggccagtgattcacgaaaacgcaaattgccatgtgatactccaggacaaggtcttacctgcagtggtgaaaaacggagacgggagcaggaaagtaaatatattgaagaattggctgagctgatatctgccaatcttagtgatattgacaatttcaatgtcaaaccagataaatgtgcgattttaaaggaaacagtaagacagatacgtcaaataaaagagcaaggaaaaactatttccaatgatgatgatgttcaaaaagccgatgtatcttctacagggcagggagttattgataaagactccttaggaccgcttttacttcaggcattggatggtttcctatttgtggtgaatcgagacggaaacattgtatttgtatcagaaaatgtcacacaatacctgcaatataagcaagaggacctggttaacacaagtgtttacaatatcttacatgaagaagacagaaaggattttcttaagaatttaccaaaatctacagttaatggagtttcctggacaaatgagacccaaagacaaaaaagccatacatttaattgccgtatgttgatgaaaacaccacatgatattctggaagacataaacgccagtcctgaaatgcgccagagatatgaaacaatgcagtgctttgccctgtctcagccacgagctatgatggaggaaggggaagatttgcaatcttgtatgatctgtgtggcacgccgcattactacaggagaaagaacatttccatcaaaccctgagagctttattaccagacatgatctttcaggaaaggttgtcaatatagatacaaattcactgagatcctccatgaggcctggctttgaagatataatccgaaggtgtattcagagattttttagtctaaatgatgggcagtcatggtcccagaaacgtcactatcaagaagcttatcttaatggccatgcagaaaccccagtatatcgattctcgttggctgatggaactatagtgactgcacagacaaaaagcaaactcttccgaaatcctgtaacaaatgatcgacatggctttgtctcaacccacttccttcagagagaacagaatggatatagaccaaacccaaatcctgttggacaagggattagaccacctatggctggatgcaacagttcggtaggcggcatgagtatgtcgccaaaccaaggcttacagatgccgagcagcagggcctatggcttggcagaccctagcaccacagggcagatgagtggagctaggtatgggggttccagtaacatagcttcattgacccctgggccaggcatgcaatcaccatcttcctaccagaacaacaactatgggctcaacatgagtagccccccacatgggagtcctggtcttgccccaaaccagcagaatatcatgatttctcctcgtaatcgtgggagtccaaagatagcctcacatcagttttctcctgttgcaggtgtgcactctcccatggcatcttctggcaatactgggaaccacagcttttccagcagctctctcagtgccctgcaagccatcagtgaaggtgtggggacttcccttttatctactctgtcatcaccaggccccaaattggataactctcccaatatgaatattacccaaccaagtaaagtaagcaatcaggattccaagagtcctctgggcttttattgcgaccaaaatccagtggagagttcaatgtgtcagtcaaatagcagagatcacctcagtgacaaagaaagtaaggagagcagtgttgagggggcagagaatcaaaggggtcctttggaaagcaaaggtcataaaaaattactgcagttacttacctgttcttctgatgaccggggtcattcctccttgaccaactcccccctagattcaagttgtaaagaatcttctgttagtgtcaccagcccctctggagtctcctcctctacatctggaggagtatcctctacatccaatatgcatgggtcactgttacaagagaagcaccggattttgcacaagttgctgcagaatgggaattcaccagctgaggtagccaagattactgcagaagccactgggaaagacaccagcagtataacttcttgtggggacggaaatgttgtcaagcaggagcagctaagtcctaagaagaaggagaataatgcacttcttagatacctgctggacagggatgatcctagtgatgcactctctaaagaactacagccccaagtggaaggagtggataataaaatgagtcagtgcaccagctccaccattcctagctcaagtcaagagaaagaccctaaaattaagacagagacaagtgaagagggatctggagacttggataatctagatgctattcttggtgatctgactagttctgacttttacaataattccatatcctcaaatggtagtcatctggggactaagcaacaggtgtttcaaggaactaattctctgggtttgaaaagttcacagtctgtgcagtctattcgtcctccatataaccgagcagtgtctctggatagccctgtttctgttggctcaagtcctccagtaaaaaatatcagtgctttccccatgttaccaaagcaacccatgttgggtgggaatccaagaatgatggatagtcaggaaaattatggctcaagtatgggtgggccaaaccgaaatgtgactgtgactcagactccttcctcaggagactggggcttaccaaactcaaaggccggcagaatggaacctatgaattcaaactccatgggaagaccaggaggagattataatacttctttacccagacctgcactgggtggctctattcccacattgcctcttcggtctaatagcataccaggtgcgagaccagtattgcaacagcagcagcagatgcttcaaatgaggcctggtgaaatccccatgggaatgggggctaatccctatggccaagcagcagcatctaaccaactgggttcctggcccgatggcatgttgtccatggaacaagtttctcatggcactcaaaataggcctcttcttaggaattccctggatgatcttgttgggccaccttccaacctggaaggccagagtgacgaaagagcattattggaccagctgcacactcttctcagcaacacagatgccacaggcctggaagaaattgacagagctttgggcattcctgaacttgtcaatcagggacaggcattagagcccaaacaggatgctttccaaggccaagaagcagcagtaatgatggatcagaaggcaggattatatggacagacatacccagcacaggggcctccaatgcaaggaggctttcatcttcagggacaatcaccatcttttaactctatgatgaatcagatgaaccagcaaggcaattttcctctccaaggaatgcacccacgagccaacatcatgagaccccggacaaacacccccaagcaacttagaatgcagcttcagcagaggctgcagggccagcagtttttgaatcagagccgacaggcacttgaattgaaaatggaaaaccctactgctggtggtgctgcggtgatgaggcctatgatgcagccccagcagggttttcttaatgctcaaatggtcgcccaacgcagcagagagctgctaagtcatcacttccgacaacagagggtggctatgatgatgcagcagcagcagcagcagcaacagcagcagcagcagcagcagcagcagcaacagcaacagcaacagcaacagcagcaacagcagcaaacccaggccttcagcccacctcctaatgtgactgcttcccccagcatggatgggcttttggcaggacccacaatgccacaagctcctccgcaacagtttccatatcaaccaaattatggaatgggacaacaaccagatccagcctttggtcgagtgtctagtcctcccaatgcaatgatgtcgtcaagaatgggtccctcccagaatcccatgatgcaacacccgcaggctgcatccatctatcagtcctcagaaatgaagggctggccatcaggaaatttggccaggaacagctccttttcccagcagcagtttgcccaccaggggaatcctgcagtgtatagtatggtgcacatgaatggcagcagtggtcacatgggacagatgaacatgaaccccatgcccatgtctggcatgcctatgggtcctgatcagaaatactgctgacatctctgcaccaggacctcttaaggaaaccactgtacaaatgacactgcactaggattattgggaaggaatcattgttccaggcatccatcttggaagaaaggaccagctttgagctccatcaagggtattttaagtgatgtcatttgagcaggactggattttaagccgaagggcaatatctacgtgtttttcccccctccttctgctgtgtatcatggtgttcaaaacagaaatgttttttggcattccacctcctagggatataattctggagacatggagtgttactgatcataaaacttttgtgtcacttttttctgccttgctagccaaaatctcttaaatacacgtaggtgggccagagaacattggaagaatcaagagagattagaatatctggtttctctagttgcagtattggacaaagagcatagtcccagccttcaggtgtagtagttctgtgttgaccctttgtccagtggaattggtgattctgaattgtcctttactaatggtgttgagttgctctgtccctattatttgccctaggctttctcctaatgaaggttttcatttgccattcatgtcctgtaatacttcacctccaggaactgtcatggatgtccaaatggctttgcagaaaggaaatgagatgacagtatttaatcgcagcagtagcaaacttttcacatgctaatgtgcagctgagtgcactttatttaaaaagaatggataaatgcaatattcttgaggtcttgagggaatagtgaaacacattcctggtttttgcctacacttacgtgttagacaagaactatgatttttttttttaaagtactggtgtcaccctttgcctatatggtagagcaataatgctttttaaaaataaacttctgaaaacccaaggccaggtactgcattctgaatcagaatctcgcagtgtttctgtgaatagatttttttgtaaatatgacctttaagatattgtattatgtaaaatatgtatatacctttttttgtaggtcacaacaactcatttttacagagtttgtgaagctaaatatttaacattgttgatttcagtaagctgtgtggtgaggctaccattgacttttgtggcctgggggaggggtagtgctccacagcttttccttccccaccccccagccttagatgcctcgctcttttcaatctcttaatctaaatgctttttaaagagattatttgtttagatgtaggcattttaattttttaaaaattcctctaccagaactaagcactttgttaatttggggggaaagaatagatatggggaaataaacttaaaaaaaaatcaggaatttaaaaaaacgagcaatttgaagagaatcttttggattttaagcagtccgaaataatagcaattcatgggctgtgtgtgtgtgtgtatgtgtgtgtgtgtgtgtgtatgtttaattatgttaccttttcatcccctttaggagcgttttcagattttggttgctaagacctgaatcccatattgagatctcgagtagaatccttggtgtggtttctggtgtctgctcagctgtcccctcattctactaatgtgatgctttcattatgtccctgtggattagaatagtgtcagttatttcttaagtaactcagtacccagaacagccagttttactgtgattcagagccacagtctaactgagcaccttttaaacccctccctcttctgccccctaccacttttctgctgttgcctctctttgacacctgttttagtcagttgggaggaagggaaaaatcaagtttaattccctttatctgggttaattcatttggttcaaatagttgacggaattgggtttctgaatgtctgtgaatttcagaggtctctgctagccttggtatcattttctagcaataactgagagccagttaattttaagaatttcacacatttagccaatctttctagatgtctctgaaggtaagatcatttaatatctttgatatgcttacgagtaagtgaatcctgattatttccagacccaccaccagagtggatcttattttcaaagcagtatagacaattatgagtttgccctctttcccctaccaagttcaaaatatatctaagaaagattgtaaatccgaaaacttccattgtagtggcctgtgcttttcagatagtatactctcctgtttggagacagaggaagaaccaggtcagtctgtctctttttcagctcaattgtatctgacccttctttaagttatgtgtgtggggagaaatagaatggtgctcttatctttcttgactttaaaaaaattattaaaaacaaaaaaaaaataaatttttttgcaatcctttcctcagacctggctccaggctaactggaaggcagcactcccttttttatatagtagaaaaatgaagtttattataagtttttatattttctacttgttcatttggtgcaaactcaagatttcttttaataggtgcagtctttgagataatttgtttttacctgtattgccctttatcttttttaggtaattctttgtactcctgctgtctacctctcctcacaccccagcaccccccattttttcaaaccttggtatctgttgggtgaacagtataatcttttcatctgcttttagaatgtgggatatttccagtacctactttttttttttttttttgctgaatccaaagatatataaataaaatatatatattttataaagatcagaatgatataaaggagatacatgtttcttcctttaaaaaataaacggaagttacattgttaatgttcatattatgatgccacttttctaaactgcatctggattgaaaggtgtaaatatcaataacagtgctacttagttatcagtatttaatatctgaggtgagttgggggtatctatattaggggtagggtattacagaagataattggcttgatgtcctagaagttctttgatccagaggtgggtgcagctgaaagtaaacagaatggattgccagttacatgtatgcctgcccagttccctttttatttgcagaagctgtgagttttgttcacaattaggttcctaggagcaaaacctcaaggattgatttattgttttcaactccaaggcacactgttaataaacgagcagggtgttttctctcttcctttctaatatatggagtttcgaagaataaaatatgagagcaatatttaaattctcaggaattgacttatactcttgagaatgaattcagtttcaatcaagtttacattatgttgcttaaaaaaatagaaattattctttatcttgcaaagaattgaaaccacatgaaatgacttatgggggatggtgagctgtgactgctttgctgaccattttggatgtcattgtaaataaaggtttctatttaaaa

SEQ ID NO: 377612 - DNA, 7072 bp, Homo sapiens
  misc_feature (5)..(5): n is a, c, g, or t
cggcngcggctgcggcttagtcggtggcggccggcggcggctgcgggctgagcggcgagtttccgatttaaagctgagctgcgaggaaaatggcggcgggaggatcaaaatacttgctggatggtggactcagagaccaataaaaataaactgcttgaacatcctttgactggttagccagttgctgatgtatattcaagatgagtggattaggagaaaacttggatccactggccagtgattcacgaaaacgcaaattgccatgtgatactccaggacaaggtcttacctgcagtggtgaaaaacggagacgggagcaggaaagtaaatatattgaagaattggctgagctgatatctgccaatcttagtgatattgacaatttcaatgtcaaaccagataaatgtgcgattttaaaggaaacagtaagacagatacgtcaaataaaagagcaaggaaaaactatttccaatgatgatgatgttcaaaaagccgatgtatcttctacagggcagggagttattgataaagactccttaggaccgcttttacttcaggcattggatggtttcctatttgtggtgaatcgagacggaaacattgtatttgtatcagaaaatgtcacacaatacctgcaatataagcaagaggacctggttaacacaagtgtttacaatatcttacatgaagaagacagaaaggattttcttaagaatttaccaaaatctacagttaatggagtttcctggacaaatgagacccaaagacaaaaaagccatacatttaattgccgtatgttgatgaaaacaccacatgatattctggaagacataaacgccagtcctgaaatgcgccagagatatgaaacaatgcagtgctttgccctgtctcagccacgagctatgatggaggaaggggaagatttgcaatcttgtatgatctgtgtggcacgccgcattactacaggagaaagaacatttccatcaaaccctgagagctttattaccagacatgatctttcaggaaaggttgtcaatatagatacaaattcactgagatcctccatgaggcctggctttgaagatataatccgaaggtgtattcagagattttttagtctaaatgatgggcagtcatggtcccagaaacgtcactatcaagaagcttatcttaatggccatgcagaaaccccagtatatcgattctcgttggctgatggaactatagtgactgcacagacaaaaagcaaactcttccgaaatcctgtaacaaatgatcgacatggctttgtctcaacccacttccttcagagagaacagaatggatatagaccaaacccaaatcctgttggacaagggattagaccacctatggctggatgcaacagttcggtaggcggcatgagtatgtcgccaaaccaaggcttacagatgccgagcagcagggcctatggcttggcagaccctagcaccacagggcagatgagtggagctaggtatgggggttccagtaacatagcttcattgacccctgggccaggcatgcaatcaccatcttcctaccagaacaacaactatgggctcaacatgagtagccccccacatgggagtcctggtcttgccccaaaccagcagaatatcatgatttctcctcgtaatcgtgggagtccaaagatagcctcacatcagttttctcctgttgcaggtgtgcactctcccatggcatcttctggcaatactgggaaccacagcttttccagcagctctctcagtgccctgcaagccatcagtgaaggtgtggggacttcccttttatctactctgtcatcaccaggccccaaattggataactctcccaatatgaatattacccaaccaagtaaagtaagcaatcaggattccaagagtcctctgggcttttattgcgaccaaaatccagtggagagttcaatgtgtcagtcaaatagcagagatcacctcagtgacaaagaaagtaaggagagcagtgttgagggggcagagaatcaaaggggtcctttggaaagcaaaggtcataaaaaattactgcagttacttacctgttcttctgatgaccggggtcattcctccttgaccaactcccccctagattcaagttgtaaagaatcttctgttagtgtcaccagcccctctggagtctcctcctctacatctggaggagtatcctctacatccaatatgcatgggtcactgttacaagagaagcaccggattttgcacaagttgctgcagaatgggaattcaccagctgaggtagccaagattactgcagaagccactgggaaagacaccagcagtataacttcttgtggggacggaaatgttgtcaagcaggagcagctaagtcctaagaagaaggagaataatgcacttcttagatacctgctggacagggatgatcctagtgatgcactctctaaagaactacagccccaagtggaaggagtggataataaaatgagtcagtgcaccagctccaccattcctagctcaagtcaagagaaagaccctaaaattaagacagagacaagtgaagagggatctggagacttggataatctagatgctattcttggtgatctgactagttctgacttttacaataattccatatcctcaaatggtagtcatctggggactaagcaacaggtgtttcaaggaactaattctctgggtttgaaaagttcacagtctgtgcagtctattcgtcctccatataaccgagcagtgtctctggatagccctgtttctgttggctcaagtcctccagtaaaaaatatcagtgctttccccatgttaccaaagcaacccatgttgggtgggaatccaagaatgatggatagtcaggaaaattatggctcaagtatgggtgggccaaaccgaaatgtgactgtgactcagactccttcctcaggagactggggcttaccaaactcaaaggccggcagaatggaacctatgaattcaaactccatgggaagaccaggaggagattataatacttctttacccagacctgcactgggtggctctattcccacattgcctcttcggtctaatagcataccaggtgcgagaccagtattgcaacagcagcagcagatgcttcaaatgaggcctggtgaaatccccatgggaatgggggctaatccctatggccaagcagcagcatctaaccaactgggttcctggcccgatggcatgttgtccatggaacaagtttctcatggcactcaaaataggcctcttcttaggaattccctggatgatcttgttgggccaccttccaacctggaaggccagagtgacgaaagagcattattggaccagctgcacactcttctcagcaacacagatgccacaggcctggaagaaattgacagagctttgggcattcctgaacttgtcaatcagggacaggcattagagcccaaacaggatgctttccaaggccaagaagcagcagtaatgatggatcagaaggcaggattatatggacagacatacccagcacaggggcctccaatgcaaggaggctttcatcttcagggacaatcaccatcttttaactctatgatgaatcagatgaaccagcaaggcaattttcctctccaaggaatgcacccacgagccaacatcatgagaccccggacaaacacccccaagcaacttagaatgcagcttcagcagaggctgcagggccagcagtttttgaatcagagccgacaggcacttgaattgaaaatggaaaaccctactgctggtggtgctgcggtgatgaggcctatgatgcagccccagcagggttttcttaatgctcaaatggtcgcccaacgcagcagagagctgctaagtcatcacttccgacaacagagggtggctatgatgatgcagcagcagcagcagcagcaacagcagcagcagcagcagcagcagcagcaacagcaacagcaacagcaacagcagcaacagcagcaaacccaggccttcagcccacctcctaatgtgactgcttcccccagcatggatgggcttttggcaggacccacaatgccacaagctcctccgcaacagtttccatatcaaccaaattatggaatgggacaacaaccagatccagcctttggtcgagtgtctagtcctcccaatgcaatgatgtcgtcaagaatgggtccctcccagaatcccatgatgcaacacccgcaggctgcatccatctatcagtcctcagaaatgaagggctggccatcaggaaatttggccaggaacagctccttttcccagcagcagtttgcccaccaggggaatcctgcagtgtatagtatggtgcacatgaatggcagcagtggtcacatgggacagatgaacatgaaccccatgcccatgtctggcatgcctatgggtcctgatcagaaatactgctgacatctctgcaccaggacctcttaaggaaaccactgtacaaatgacactgcactaggattattgggaaggaatcattgttccaggcatccatcttggaagaaaggaccagctttgagctccatcaagggtattttaagtgatgtcatttgagcaggactggattttaagccgaagggcaatatctacgtgtttttcccccctccttctgctgtgtatcatggtgttcaaaacagaaatgttttttggcattccacctcctagggatataattctggagacatggagtgttactgatcataaaacttttgtgtcacttttttctgccttgctagccaaaatctcttaaatacacgtaggtgggccagagaacattggaagaatcaagagagattagaatatctggtttctctagttgcagtattggacaaagagcatagtcccagccttcaggtgtagtagttctgtgttgaccctttgtccagtggaattggtgattctgaattgtcctttactaatggtgttgagttgctctgtccctattatttgccctaggctttctcctaatgaaggttttcatttgccattcatgtcctgtaatacttcacctccaggaactgtcatggatgtccaaatggctttgcagaaaggaaatgagatgacagtatttaatcgcagcagtagcaaacttttcacatgctaatgtgcagctgagtgcactttatttaaaaagaatggataaatgcaatattcttgaggtcttgagggaatagtgaaacacattcctggtttttgcctacacttacgtgttagacaagaactatgatttttttttttaaagtactggtgtcaccctttgcctatatggtagagcaataatgctttttaaaaataaacttctgaaaacccaaggccaggtactgcattctgaatcagaatctcgcagtgtttctgtgaatagatttttttgtaaatatgacctttaagatattgtattatgtaaaatatgtatatacctttttttgtaggtcacaacaactcatttttacagagtttgtgaagctaaatatttaacattgttgatttcagtaagctgtgtggtgaggctaccagtggaagagacatcccttgacttttgtggcctgggggaggggtagtgctccacagcttttccttccccaccccccagccttagatgcctcgctcttttcaatctcttaatctaaatgctttttaaagagattatttgtttagatgtaggcattttaattttttaaaaattcccctaccaagttcaaaatatatctaagaaagattgtaaatccgaaaacttccattgtagtggcctgtgcttttcagatagtatactctcctgtttggagacagaggaagaaccaggtcagtctgtctctttttcagctcaattgtatctgacccttctttaagttatgtgtgtggggagaaatagaatggtgctcttatctttcttgactttaaaaaaattattaaaaacaaaaaaaaaataaatttttttgcaatcctttcctcagacctggctccaggctaactggaaggcagcactcccttttttatatagtagaaaaatgaagtttattataagtttttatattttctacttgttcatttggtgcaaactcaagatttcttttaataggtgcagtctttgagataatttgtttttacctgtattgccctttatcttttttaggtaattctttgtactcctgctgtctacctctcctcacaccccagcaccccccattttttcaaaccttggtatctgttgggtgaacagtataatcttttcatctgcttttagaatgtgggatatttccagtacctactttttttttttttttttgctgaatccaaagatatataaataaaatatatatattttataaagatcagaatgatataaaggagatacatgtttcttcctttaaaaaataaacggaagttacattgttaatgttcatattatgatgccacttttctaaactgcatctggattgaaaggtgtaaatatcaataacagtgctacttagttatcagtatttaatatctgaggtgagttgggggtatctatattaggggtagggtattacagaagataattggcttgatgtcctagaagttctttgatccagaggtgggtgcagctgaaagtaaacagaatggattgccagttacatgtatgcctgcccagttccctttttatttgcagaagctgtgagttttgttcacaattaggttcctaggagcaaaacctcaaggattgatttattgttttcaactccaaggcacactgttaataaacgagcagggtgttttctctcttcctttctaatatatggagtttcgaagaataaaatatgagagcaatatttaaattctcaggaattgacttatactcttgagaatgaattcagtttcaatcaagtttacattatgttgcttaaaaaaatagaaattattctttatcttgcaaagaattgaaaccacatgaaatgacttatgggggatggtgagctgtgactgctttgctgaccattttggatgtcattgtaaataaaggtttctatttaaaa

SEQ ID NO: 377613 - DNA, 4817 bp, Homo sapiens
  misc_feature (31)..(31): n is a, c, g, or t
ttttggtgtgttggcttggggttgaaaaaanaaaattcggccgatctggtttattatttgtgtttgtagcatttgagttactgttcattaaaaatactatgcatggttgctgtgatctattactcttagaaaaaaaaaaagcaccattgacattgattgcaagtctttttctaggcctcgcctcttcttaggaattccctggatgatcttgttgggccaccttccaacctggaaggccagagtgacgaaagagcattattggaccagctgcacactcttctcagcaacacagatgccacaggcctggaagaaattgacagagctttgggcattcctgaacttgtcaatcagggacaggcattagagcccaaacaggatgctttccaaggccaagaagcagcagtaatgatggatcagaaggcaggattatatggacagacatacccagcacaggggcctccaatgcaaggaggctttcatcttcagggacaatcaccatcttttaactctatgatgaatcagatgaaccagcaaggcaattttcctctccaaggaatgcacccacgagccaacatcatgagaccccggacaaacacccccaagcaacttagaatgcagcttcagcagaggctgcagggccagcagtttttgaatcagagccgacaggcacttgaattgaaaatggaaaaccctactgctggtggtgctgcggtgatgaggcctatgatgcagccccagcagggttttcttaatgctcaaatggtcgcccaacgcagcagagagctgctaagtcatcacttccgacaacagagggtggctatgatgatgcagcagcagcagcagcagcaacagcagcagcagcagcagcagcagcagcaacagcaacagcaacagcaacagcagcaacagcagcaaacccaggccttcagcccacctcctaatgtgactgcttcccccagcatggatgggcttttggcaggacccacaatgccacaagctcctccgcaacagtttccatatcaaccaaattatggaatgggacaacaaccagatccagcctttggtcgagtgtctagtcctcccaatgcaatgatgtcgtcaagaatgggtccctcccagaatcccatgatgcaacacccgcaggctgcatccatctatcagtcctcagaaatgaagggctggccatcaggaaatttggccaggaacagctccttttcccagcagcagtttgcccaccaggggaatcctgcagtgtatagtatggtgcacatgaatggcagcagtggtcacatgggacagatgaacatgaaccccatgcccatgtctggcatgcctatgggtcctgatcagaaatactgctgacatctctgcaccaggacctcttaaggaaaccactgtacaaatgacactgcactaggattattgggaaggaatcattgttccaggcatccatcttggaagaaaggaccagctttgagctccatcaagggtattttaagtgatgtcatttgagcaggactggattttaagccgaagggcaatatctacgtgtttttcccccctccttctgctgtgtatcatggtgttcaaaacagaaatgttttttggcattccacctcctagggatataattctggagacatggagtgttactgatcataaaacttttgtgtcacttttttctgccttgctagccaaaatctcttaaatacacgtaggtgggccagagaacattggaagaatcaagagagattagaatatctggtttctctagttgcagtattggacaaagagcatagtcccagccttcaggtgtagtagttctgtgttgaccctttgtccagtggaattggtgattctgaattgtcctttactaatggtgttgagttgctctgtccctattatttgccctaggctttctcctaatgaaggttttcatttgccattcatgtcctgtaatacttcacctccaggaactgtcatggatgtccaaatggctttgcagaaaggaaatgagatgacagtatttaatcgcagcagtagcaaacttttcacatgctaatgtgcagctgagtgcactttatttaaaaagaatggataaatgcaatattcttgaggtcttgagggaatagtgaaacacattcctggtttttgcctacacttacgtgttagacaagaactatgatttttttttttaaagtactggtgtcaccctttgcctatatggtagagcaataatgctttttaaaaataaacttctgaaaacccaaggccaggtactgcattctgaatcagaatctcgcagtgtttctgtgaatagatttttttgtaaatatgacctttaagatattgtattatgtaaaatatgtatatacctttttttgtaggtcacaacaactcatttttacagagtttgtgaagctaaatatttaacattgttgatttcagtaagctgtgtggtgaggctaccagtggaagagacatcccttgacttttgtggcctgggggaggggtagtgctccacagcttttccttccccaccccccagccttagatgcctcgctcttttcaatctcttaatctaaatgctttttaaagagattatttgtttagatgtaggcattttaattttttaaaaattcctctaccagaactaagcactttgttaatttggggggaaagaatagatatggggaaataaacttaaaaaaaaatcaggaatttaaaaaaacgagcaatttgaagagaatcttttggattttaagcagtccgaaataatagcaattcatgggctgtgtgtgtgtgtgtatgtgtgtgtgtgtgtgtgtatgtttaattatgttaccttttcatcccctttaggagcgttttcagattttggttgctaagacctgaatcccatattgagatctcgagtagaatccttggtgtggtttctggtgtctgctcagctgtcccctcattctactaatgtgatgctttcattatgtccctgtggattagaatagtgtcagttatttcttaagtaactcagtacccagaacagccagttttactgtgattcagagccacagtctaactgagcaccttttaaacccctccctcttctgccccctaccacttttctgctgttgcctctctttgacacctgttttagtcagttgggaggaagggaaaaatcaagtttaattccctttatctgggttaattcatttggttcaaatagttgacggaattgggtttctgaatgtctgtgaatttcagaggtctctgctagccttggtatcattttctagcaataactgagagccagttaattttaagaatttcacacatttagccaatctttctagatgtctctgaaggtaagatcatttaatatctttgatatgcttacgagtaagtgaatcctgattatttccagacccaccaccagagtggatcttattttcaaagcagtatagacaattatgagtttgccctctttcccctaccaagttcaaaatatatctaagaaagattgtaaatccgaaaacttccattgtagtggcctgtgcttttcagatagtatactctcctgtttggagacagaggaagaaccaggtcagtctgtctctttttcagctcaattgtatctgacccttctttaagttatgtgtgtggggagaaatagaatggtgctcttatctttcttgactttaaaaaaattattaaaaacaaaaaaaaaataaatttttttgcaatcctttcctcagacctggctccaggctaactggaaggcagcactcccttttttatatagtagaaaaatgaagtttattataagtttttatattttctacttgttcatttggtgcaaactcaagatttcttttaataggtgcagtctttgagataatttgtttttacctgtattgccctttatcttttttaggtaattctttgtactcctgctgtctacctctcctcacaccccagcaccccccattttttcaaaccttggtatctgttgggtgaacagtataatcttttcatctgcttttagaatgtgggatatttccagtacctactttttttttttttttttgctgaatccaaagatatataaataaaatatatatattttataaagatcagaatgatataaaggagatacatgtttcttcctttaaaaaataaacggaagttacattgttaatgttcatattatgatgccacttttctaaactgcatctggattgaaaggtgtaaatatcaataacagtgctacttagttatcagtatttaatatctgaggtgagttgggggtatctatattaggggtagggtattacagaagataattggcttgatgtcctagaagttctttgatccagaggtgggtgcagctgaaagtaaacagaatggattgccagttacatgtatgcctgcccagttccctttttatttgcagaagctgtgagttttgttcacaattaggttcctaggagcaaaacctcaaggattgatttattgttttcaactccaaggcacactgttaataaacgagcagggtgttttctctcttcctttctaatatatggagtttcgaagaataaaatatgagagcaatatttaaattctcaggaattgacttatactcttgagaatgaattcagtttcaatcaagtttacattatgttgcttaaaaaaatagaaattattctttatcttgcaaagaattgaaaccacatgaaatgacttatgggggatggtgagctgtgactgctttgctgaccattttggatgtcattgtaaataaaggtttctatttaaaa

SEQ ID NO: 377614 - DNA, 4982 bp, Homo sapiens
tttcaagtattataattattacctccttcactgtttttgtgaggagtatcttctcccatccttccctaccctccccctggcccccatttctgctataccccaaatgcctagggtttggcaattacaatttggtgttgggattgggggtttaagctgtatatggtggtctaaagtggcctggtgaaatttctaaattgtgggccttaaacttaaattgatgccattcactcttttttaccactttggtttattatttgtgtttgtagcatttgagttactgttcattaaaaatactatgcatggttgctgtgatctattactcttagaaaaaaaaaaagcaccattgacattgattgcaagtctttttctaggcctcttgggccaccttccaacctggaaggccagagtgacgaaagagcattattggaccagctgcacactcttctcagcaacacagatgccacaggcctggaagaaattgacagagctttgggcattcctgaacttgtcaatcagggacaggcattagagcccaaacaggatgctttccaaggccaagaagcagcagtaatgatggatcagaaggcaggattatatggacagacatacccagcacaggggcctccaatgcaaggaggctttcatcttcagggacaatcaccatcttttaactctatgatgaatcagatgaaccagcaaggcaattttcctctccaaggaatgcacccacgagccaacatcatgagaccccggacaaacacccccaagcaacttagaatgcagcttcagcagaggctgcagggccagcagtttttgaatcagagccgacaggcacttgaattgaaaatggaaaaccctactgctggtggtgctgcggtgatgaggcctatgatgcagccccagcagggttttcttaatgctcaaatggtcgcccaacgcagcagagagctgctaagtcatcacttccgacaacagagggtggctatgatgatgcagcagcagcagcagcagcaacagcagcagcagcagcagcagcagcagcaacagcaacagcaacagcaacagcagcaacagcagcaaacccaggccttcagcccacctcctaatgtgactgcttcccccagcatggatgggcttttggcaggacccacaatgccacaagctcctccgcaacagtttccatatcaaccaaattatggaatgggacaacaaccagatccagcctttggtcgagtgtctagtcctcccaatgcaatgatgtcgtcaagaatgggtccctcccagaatcccatgatgcaacacccgcaggctgcatccatctatcagtcctcagaaatgaagggctggccatcaggaaatttggccaggaacagctccttttcccagcagcagtttgcccaccaggggaatcctgcagtgtatagtatggtgcacatgaatggcagcagtggtcacatgggacagatgaacatgaaccccatgcccatgtctggcatgcctatgggtcctgatcagaaatactgctgacatctctgcaccaggacctcttaaggaaaccactgtacaaatgacactgcactaggattattgggaaggaatcattgttccaggcatccatcttggaagaaaggaccagctttgagctccatcaagggtattttaagtgatgtcatttgagcaggactggattttaagccgaagggcaatatctacgtgtttttcccccctccttctgctgtgtatcatggtgttcaaaacagaaatgttttttggcattccacctcctagggatataattctggagacatggagtgttactgatcataaaacttttgtgtcacttttttctgccttgctagccaaaatctcttaaatacacgtaggtgggccagagaacattggaagaatcaagagagattagaatatctggtttctctagttgcagtattggacaaagagcatagtcccagccttcaggtgtagtagttctgtgttgaccctttgtccagtggaattggtgattctgaattgtcctttactaatggtgttgagttgctctgtccctattatttgccctaggctttctcctaatgaaggttttcatttgccattcatgtcctgtaatacttcacctccaggaactgtcatggatgtccaaatggctttgcagaaaggaaatgagatgacagtatttaatcgcagcagtagcaaacttttcacatgctaatgtgcagctgagtgcactttatttaaaaagaatggataaatgcaatattcttgaggtcttgagggaatagtgaaacacattcctggtttttgcctacacttacgtgttagacaagaactatgatttttttttttaaagtactggtgtcaccctttgcctatatggtagagcaataatgctttttaaaaataaacttctgaaaacccaaggccaggtactgcattctgaatcagaatctcgcagtgtttctgtgaatagatttttttgtaaatatgacctttaagatattgtattatgtaaaatatgtatatacctttttttgtaggtcacaacaactcatttttacagagtttgtgaagctaaatatttaacattgttgatttcagtaagctgtgtggtgaggctaccagtggaagagacatcccttgacttttgtggcctgggggaggggtagtgctccacagcttttccttccccaccccccagccttagatgcctcgctcttttcaatctcttaatctaaatgctttttaaagagattatttgtttagatgtaggcattttaattttttaaaaattcctctaccagaactaagcactttgttaatttggggggaaagaatagatatggggaaataaacttaaaaaaaaatcaggaatttaaaaaaacgagcaatttgaagagaatcttttggattttaagcagtccgaaataatagcaattcatgggctgtgtgtgtgtgtgtatgtgtgtgtgtgtgtgtgtatgtttaattatgttaccttttcatcccctttaggagcgttttcagattttggttgctaagacctgaatcccatattgagatctcgagtagaatccttggtgtggtttctggtgtctgctcagctgtcccctcattctactaatgtgatgctttcattatgtccctgtggattagaatagtgtcagttatttcttaagtaactcagtacccagaacagccagttttactgtgattcagagccacagtctaactgagcaccttttaaacccctccctcttctgccccctaccacttttctgctgttgcctctctttgacacctgttttagtcagttgggaggaagggaaaaatcaagtttaattccctttatctgggttaattcatttggttcaaatagttgacggaattgggtttctgaatgtctgtgaatttcagaggtctctgctagccttggtatcattttctagcaataactgagagccagttaattttaagaatttcacacatttagccaatctttctagatgtctctgaaggtaagatcatttaatatctttgatatgcttacgagtaagtgaatcctgattatttccagacccaccaccagagtggatcttattttcaaagcagtatagacaattatgagtttgccctctttcccctaccaagttcaaaatatatctaagaaagattgtaaatccgaaaacttccattgtagtggcctgtgcttttcagatagtatactctcctgtttggagacagaggaagaaccaggtcagtctgtctctttttcagctcaattgtatctgacccttctttaagttatgtgtgtggggagaaatagaatggtgctcttatctttcttgactttaaaaaaattattaaaaacaaaaaaaaaataaatttttttgcaatcctttcctcagacctggctccaggctaactggaaggcagcactcccttttttatatagtagaaaaatgaagtttattataagtttttatattttctacttgttcatttggtgcaaactcaagatttcttttaataggtgcagtctttgagataatttgtttttacctgtattgccctttatcttttttaggtaattctttgtactcctgctgtctacctctcctcacaccccagcaccccccattttttcaaaccttggtatctgttgggtgaacagtataatcttttcatctgcttttagaatgtgggatatttccagtacctactttttttttttttttttgctgaatccaaagatatataaataaaatatatatattttataaagatcagaatgatataaaggagatacatgtttcttcctttaaaaaataaacggaagttacattgttaatgttcatattatgatgccacttttctaaactgcatctggattgaaaggtgtaaatatcaataacagtgctacttagttatcagtatttaatatctgaggtgagttgggggtatctatattaggggtagggtattacagaagataattggcttgatgtcctagaagttctttgatccagaggtgggtgcagctgaaagtaaacagaatggattgccagttacatgtatgcctgcccagttccctttttatttgcagaagctgtgagttttgttcacaattaggttcctaggagcaaaacctcaaggattgatttattgttttcaactccaaggcacactgttaataaacgagcagggtgttttctctcttcctttctaatatatggagtttcgaagaataaaatatgagagcaatatttaaattctcaggaattgacttatactcttgagaatgaattcagtttcaatcaagtttacattatgttgcttaaaaaaatagaaattattctttatcttgcaaagaattgaaaccacatgaaatgacttatgggggatggtgagctgtgactgctttgctgaccattttggatgtcattgtaaataaaggtttctatttaaaa

SEQ ID NO: 377615 - DNA, 2231 bp, Homo sapiens
agaggatcccgcctcgcgctcccaaagtactgggattacaggcgtgacgcgccacagcggccaaagttcctaagttctctatctctctgctgtgttttccctgctttaagtctgctgttacttttctactgagataaaatccactgtttgcatccaaccatttctttttgttattgtttccgcaaaccaatgagtttgtattaatatcgcatggctagagttctaaagtaaaagctataggattttggagtgtgtatgtgtgtgtttatgtgtatatacctgtattttgttatgtgtttttggccacaggtaccatattgagatctcgagtagaatccttggtgtggtttctggtgtctgctcagctgtcccctcattctactaatgtgatgctttcattatgtccctgtggattagaatagtgtcagttatttcttaagtaactcagtacccagaacagccagttttactgtgattcagagccacagtctaactgagcaccttttaaacccctccctcttctgccccctaccacttttctgctgttgcctctctttgacacctgttttagtcagttgggaggaagggaaaaatcaagtttaattccctttatctgggttaattcatttggttcaaatagttgacggaattgggtttctgaatgtctgtgaatttcagaggtctctgctagccttggtatcattttctagcaataactgagagccagttaattttaagaatttcacacatttagccaatctttctagatgtctctgaaggtaagatcatttaatatctttgatatgcttacgagtaagtgaatcctgattatttccagacccaccaccagagtggatcttattttcaaagcagtatagacaattatgagtttgccctctttcccctaccaagttcaaaatatatctaagaaagattgtaaatccgaaaacttccattgtagtggcctgtgcttttcagatagtatactctcctgtttggagacagaggaagaaccaggtcagtctgtctctttttcagctcaattgtatctgacccttctttaagttatgtgtgtggggagaaatagaatggtgctcttatctttcttgactttaaaaaaattattaaaaacaaaaaaaaaataaatttttttgcaatcctttcctcagacctggctccaggctaactggaaggcagcactcccttttttatatagtagaaaaatgaagtttattataagtttttatattttctacttgttcatttggtgcaaactcaagatttcttttaataggtgcagtctttgagataatttgtttttacctgtattgccctttatcttttttaggtaattctttgtactcctgctgtctacctctcctcacaccccagcaccccccattttttcaaaccttggtatctgttgggtgaacagtataatcttttcatctgcttttagaatgtgggatatttccagtacctactttttttttttttttttgctgaatccaaagatatataaataaaatatatatattttataaagatcagaatgatataaaggagatacatgtttcttcctttaaaaaataaacggaagttacattgttaatgttcatattatgatgccacttttctaaactgcatctggattgaaaggtgtaaatatcaataacagtgctacttagttatcagtatttaatatctgaggtgagttgggggtatctatattaggggtagggtattacagaagataattggcttgatgtcctagaagttctttgatccagaggtgggtgcagctgaaagtaaacagaatggattgccagttacatgtatgcctgcccagttccctttttatttgcagaagctgtgagttttgttcacaattaggttcctaggagcaaaacctcaaggattgatttattgttttcaactccaaggcacactgttaataaacgagcagggtgttttctctcttcctttctaatatatggagtttcgaagaataaaatatgagagcaatatttaaattctcaggaattgacttatactcttgagaatgaattcagtttcaatcaagtttacattatgttgcttaaaaaaatagaaattattctttatcttgcaaagaattgaaaccacatgaaatgacttatgggggatggtgagctgtgactgctttgctgaccattttggatgtcattgtaaataaaggtttctatttaaaa

SEQ ID NO: 377616 - DNA, 4206 bp, Homo sapiens
ggaactggagaaacagcaaaccaaacccaaagtgctgggattacaggcgtgagccaccacgcccggctggaagacttaatttgtgggtgactaatcataatgcttaaatgaagaaaagacaataaaattcaatccctcctcttctttttgtcctcaggatcaaaatacttgctggatggtggactcagagaccaataaaaataaactgcttgaacatcctttgactggttagccagttgctgatgtatattcaagatgagtggattaggagaaaacttggatccactggccagtgattcacgaaaacgcaaattgccatgtgatactccaggacaaggtcttacctgcagtggtgaaaaacggagacgggagcaggaaagtaaatatattgaagaattggctgagctgatatctgccaatcttagtgatattgacaatttcaatgtcaaaccagataaatgtgcgattttaaaggaaacagtaagacagatacgtcaaataaaagagcaaggaaaaactatttccaatgatgatgatgttcaaaaagccgatgtatcttctacagggcagggagttattgataaagactccttaggaccgcttttacttcaggcattggatggtttcctatttgtggtgaatcgagacggaaacattgtatttgtatcagaaaatgtcacacaatacctgcaatataagcaagaggacctggttaacacaagtgtttacaatatcttacatgaagaagacagaaaggattttcttaagaatttaccaaaatctacagttaatggagtttcctggacaaatgagacccaaagacaaaaaagccatacatttaattgccgtatgttgatgaaaacaccacatgatattctggaagacataaacgccagtcctgaaatgcgccagagatatgaaacaatgcagtgctttgccctgtctcagccacgagctatgatggaggaaggggaagatttgcaatcttgtatgatctgtgtggcacgccgcattactacaggagaaagaacatttccatcaaaccctgagagctttattaccagacatgatctttcaggaaaggttgtcaatatagatacaaattcactgagatcctccatgaggcctggctttgaagatataatccgaaggtgtattcagagattttttagtctaaatgatgggcagtcatggtcccagaaacgtcactatcaagaagcttatcttaatggccatgcagaaaccccagtatatcgattctcgttggctgatggaactatagtgactgcacagacaaaaagcaaactcttccgaaatcctgtaacaaatgatcgacatggctttgtctcaacccacttccttcagagagaacagaatggatatagaccaaacccaaatcctgttggacaagggattagaccacctatggctggatgcaacagttcggtaggcggcatgagtatgtcgccaaaccaaggcttacagatgccgagcagcagggcctatggcttggcagaccctagcaccacagggcagatgagtggagctaggtatgggggttccagtaacatagcttcattgacccctgggccaggcatgcaatcaccatcttcctaccagaacaacaactatgggctcaacatgagtagccccccacatgggagtcctggtcttgccccaaaccagcagaatatcatgatttctcctcgtaatcgtgggagtccaaagatagcctcacatcagttttctcctgttgcaggtgtgcactctcccatggcatcttctggcaatactgggaaccacagcttttccagcagctctctcagtgccctgcaagccatcagtgaaggtgtggggacttcccttttatctactctgtcatcaccaggccccaaattggataactctcccaatatgaatattacccaaccaagtaaagtaagcaatcaggattccaagagtcctctgggcttttattgcgaccaaaatccagtggagagttcaatgtgtcagtcaaatagcagagatcacctcagtgacaaagaaagtaaggagagcagtgttgagggggcagagaatcaaaggggtcctttggaaagcaaaggtcataaaaaattactgcagttacttacctgttcttctgatgaccggggtcattcctccttgaccaactcccccctagattcaagttgtaaagaatcttctgttagtgtcaccagcccctctggagtctcctcctctacatctggaggagtatcctctacatccaatatgcatgggtcactgttacaagagaagcaccggattttgcacaagttgctgcagaatgggaattcaccagctgaggtagccaagattactgcagaagccactgggaaagacaccagcagtataacttcttgtggggacggaaatgttgtcaagcaggagcagctaagtcctaagaagaaggagaataatgcacttcttagatacctgctggacagggatgatcctagtgatgcactctctaaagaactacagccccaagtggaaggagtggataataaaatgagtcagtgcaccagctccaccattcctagctcaagtcaagagaaagaccctaaaattaagacagagacaagtgaagagggatctggagacttggataatctagatgctattcttggtgatctgactagttctgacttttacaataattccatatcctcaaatggtagtcatctggggactaagcaacaggtgtttcaaggaactaattctctgggtttgaaaagttcacagtctgtgcagtctattcgtcctccatataaccgagcagtgtctctggatagccctgtttctgttggctcaagtcctccagtaaaaaatatcagtgctttccccatgttaccaaagcaacccatgttgggtgggaatccaagaatgatggatagtcaggaaaattatggctcaagtatgggtgggccaaaccgaaatgtgactgtgactcagactccttcctcaggagactggggcttaccaaactcaaaggccggcagaatggaacctatgaattcaaactccatgggaagaccaggaggagattataatacttctttacccagacctgcactgggtggctctattcccacattgcctcttcggtctaatagcataccaggtgcgagaccagtattgcaacagcagcagcagatgcttcaaatgaggcctggtgaaatccccatgggaatgggggctaatccctatggccaagcagcagcatctaaccaactgggttcctggcccgatggcatgttgtccatggaacaagtttctcatggcactcaaaataggcctcttcttaggaattccctggatgatcttgttgggccaccttccaacctggaaggccagagtgacgaaagagcattattggaccagctgcacactcttctcagcaacacagatgccacaggcctggaagaaattgacagagctttgggcattcctgaacttgtcaatcagggacaggcattagagcccaaacaggatgctttccaaggccaagaagcagcagtaatgatggatcagaaggcaggattatatggacagacatacccagcacaggggcctccaatgcaaggaggctttcatcttcagggacaatcaccatcttttaactctatgatgaatcagatgaaccagcaaggcaattttcctctccaaggaatgcacccacgagccaacatcatgagaccccggacaaacacccccaagcaacttagaatgcagcttcagcagaggctgcagggccagcagtttttgaatcagagccgacaggcacttgaattgaaaatggaaaaccctactgctggtggtgctgcggtgatgaggcctatgatgcagccccagcagggttttcttaatgctcaaatggtcgcccaacgcagcagagagctgctaagtcatcacttccgacaacagagggtggctatgatgatgctgctaaagttccagcaaaaaagatcaccgccgcgagtaaaaaggctccagcccagaaggttcctgcccagaaagccacaggccagaaagcagcgcctgctccaaaagctcagaagggtcaaaaagctccagcccagaaagcacctgctccaaaggcatctggcaagaaagcataagtggcaatcataaaaagtaataaaggttctttttgacctgttaaaa

SEQ ID NO: 377617 - DNA, 1431 bp, Homo sapiens
ggaactggagaaacagcaaaccaaacccaaagtgctgggattacaggcgtgagccaccacgcccggctggaagacttaatttgtgggtgactaatcataatgcttaaatgaagaaaagacaataaaattcaatccctcctcttctttttgtcctcaggatcaaaatacttgctggatggtggactcagagaccaataaaaataaactgcttgaacatcctttgactggttagccagttgctgatgtatattcaagatgagtggattaggagaaaacttggatccactggccagtgattcacgaaaacgcaaattgccatgtgatactccaggacaaggtcttacctgcagtggtgaaaaacggagacgggagcaggaaagtaaatatattgaagaattggctgagctgatatctgccaatcttagtgatattgacaatttcaatgtcaaaccagataaatgtgcgattttaaaggaaacagtaagacagatacgtcaaataaaagagcaaggaaaaactatttccaatgatgatgatgttcaaaaagccgatgtatcttctacagggcagggagttattgataaagactccttaggaccgcttttacttcaggcattggatggtttcctatttgtggtgaatcgagacggaaacattgtatttgtatcagaaaatgtcacacaatacctgcaatataagcaagaggacctggttaacacaagtgtttacaatatcttacatgaagaagacagaaaggattttcttaagaatttaccaaaatctacagttaatggagtttcctggacaaatgagacccaaagacaaaaaagccatacatttaattgccgtatgttgatgaaaacaccacatgatattctggaagacataaacgccagtcctgaaatgcgccagagatatgaaacaatgcagtgctttgccctgtctcagccacgagctatgatggaggaaggggaagatttgcaatcttgtatgatctgtgtggcacgccgcattactacaggagaaagaacatttccatcaaaccctgagagctttattaccagacatgatctttcagacggagtcttgctctgttgcccaggctggagtgcaatggtgcgatctcggctcactgcaacctccacttcttgggttcaagtgattttcctgccatggcctcccaaacagtttggactacaggcacgtgccaccatgcccggctaatttttgtatttttagtagagatggggtttcaccatgttgtccaggctggtctcgaactcttgacctcaagtgagtcgcctgcctcagcctcccaaaatgctgggattacagttgtgagccactgtgcttggccgggagtaattcttgacgtcaacctgagtttcaatcttggtctgccattttttaatcatagaaataaaaaattaa

SEQ ID NO: 377618 - DNA, 314 bp, Homo sapiens
gtaaccagtcatgtgttcttccctctggcttctccttctgttgttttcagactatgtttctcagtgttcttaccactggtgcaatctatccctgtcaactaaagaaattctttttgttttacttctgtgtaaggttttatttgtacaaatggctccttgttaaggagtagttttatgagaatattctattttacaggtaaaaagtaaaaaaatgtcaggaaggattgctcttggggaagaaaaatgttacttgatgactttgtagtcttaaaggtagataaggttttttttgaaaaaaatccttactgctaata

SEQ ID NO: 377619 - DNA, 372 bp, Homo sapiens
ctttagagacagggccttgctatcttgcccaggctggactcgaactcctggatttaattgacccttctgcctcagcttctgagtagccaagactgcaggtgcacaccaccatacctggttttgtggttgattcttgatcttgtttgtcattatgtttggtatacacatgactgtagttgctctcttgttggtgaggggtaggaaaatgatgcctgagtgttcttattttaccctgttgatgattttggtgcagatccagtctttccttggatttttagaaatgtacttgaagtatatttcctccctgtcccctcctatatatatttgttttgctgactgtagttaccagtgatgggatattttccccaacag

SEQ ID NO: 377620 - DNA, 388 bp, Homo sapiens
tctaaggagaaggcatttgggcatttttatttcttctgttttatttttgtaaggaatgggacaacaaccagatccagcctttggtcgagtgtctagtcctcccaatgcaatgatgtcgtcaagaatgggtccctcccagaatcccatgatgcaacacccgcaggctgcatccatctatcagtcctcagaaatgaagggctggccatcaggaaatttggccaggaacaggtaaagaacagtgacttataaagttagtcacatcctagtcccagaagtccaagaacttaatgtatttttcagtcaagcctttttggatggagaggttgaaaggactgggttcatattagaaggtgtgatttggcttgtccattttgagagtccttcaagc

SEQ ID NO: 377621 - DNA, 601 bp, Homo sapiens
tttccccatgttaccaaagcaacccatgttgggtgggaatccaagaatgatggatagtcaggaaaattatggctcaagtatgggtacgttatttctaattagtatgtatgattattttgggaaaagcatatttaaaatacttaaagccatctaaataattgggagtaaataataactttttgaataacgttagtatgtttcttccatgaatatccttcatttattctatgttttggttatgtaaactcttcaagagtcttttggtctatgacattttccagcctgttgaatatatgagaatagtggcctatgtctccacagttggccagcccttttcttaccatgacaaagtgctgttttgtcaaggttgatgttgtgtataatggctgtacttacatggtataagaaggatttcattataatatggaaaagacctaagtatggctacctgttttaggtgggccaaaccgaaatgtgactgtgactcagactccttcctcaggagactggggcttaccaaactcaaaggccggcagaatggaacctatgaattcaaactccatgggaagaccaggaggagattataatacttctttaccca

SEQ ID NO: 377622 - DNA, 363 bp, Homo sapiens
gatgttattttgaatgtatccttagcatgtagagaagtgatgcctggcacataacaagcatttacttaaatacttgttgaatgactggatgttttttgcactttctttagagcatttgacttctgttgctttcatagatgttcttcactgttcttttatgtgttgtgtttaagggacaggcattagagcccaaacaggatgctttccaaggccaagaagcagcagtaatgatggatcagaaggcaggattatatggacagacatacccagcacaggggcctccaatgcaaggaggctttcatcttcagggacaatcaccatcttttaactctatgatgaatcagatgaaccagcaaggcaatt

SEQ ID NO: 377623 - DNA, 233 bp, Homo sapiens
tgaaaaaagaaagttagatgtttcaggataatttttgctcttatttgagaatttgtgctttctttttgctcccccagggcctggtgaaatccccatgggaatgggggctaatccctatggccaagcagcagcatctaaccaactgggttcctggcccgatggcatgttgtccatggaacaagtttctcatggcactcaaaataggtggggtgttattttgtgactctgtagaa

SEQ ID NO: 377624 - DNA, 7918 bp, Homo sapiens
  misc_feature (5)..(5): n is a, c, g, or t
cggcngcggctgcggcttagtcggtggcggccggcggcggctgcgggctgagcggcgagtttccgatttaaagctgagctgcgaggaaaatggcggcgggaggatcaaaatacttgctggatggtggactcagagaccaataaaaataaactgcttgaacatcctttgactggttagccagttgctgatgtatattcaagatgagtggattaggagaaaacttggatccactggccagtgattcacgaaaacgcaaattgccatgtgatactccaggacaaggtcttacctgcagtggtgaaaaacggagacgggagcaggaaagtaaatatattgaagaattggctgagctgatatctgccaatcttagtgatattgacaatttcaatgtcaaaccagataaatgtgcgattttaaaggaaacagtaagacagatacgtcaaataaaagagcaaggaaaaactatttccaatgatgatgatgttcaaaaagccgatgtatcttctacagggcagggagttattgataaagactccttaggaccgcttttacttcaggcattggatggtttcctatttgtggtgaatcgagacggaaacattgtatttgtatcagaaaatgtcacacaatacctgcaatataagcaagaggacctggttaacacaagtgtttacaatatcttacatgaagaagacagaaaggattttcttaagaatttaccaaaatctacagttaatggagtttcctggacaaatgagacccaaagacaaaaaagccatacatttaattgccgtatgttgatgaaaacaccacatgatattctggaagacataaacgccagtcctgaaatgcgccagagatatgaaacaatgcagtgctttgccctgtctcagccacgagctatgatggaggaaggggaagatttgcaatcttgtatgatctgtgtggcacgccgcattactacaggagaaagaacatttccatcaaaccctgagagctttattaccagacatgatctttcaggaaaggttgtcaatatagatacaaattcactgagatcctccatgaggcctggctttgaagatataatccgaaggtgtattcagagattttttagtctaaatgatgggcagtcatggtcccagaaacgtcactatcaagaagcttatcttaatggccatgcagaaaccccagtatatcgattctcgttggctgatggaactatagtgactgcacagacaaaaagcaaactcttccgaaatcctgtaacaaatgatcgacatggctttgtctcaacccacttccttcagagagaacagaatggatatagaccaaacccaaatcctgttggacaagggattagaccacctatggctggatgcaacagttcggtaggcggcatgagtatgtcgccaaaccaaggcttacagatgccgagcagcagggcctatggcttggcagaccctagcaccacagggcagatgagtggagctaggtatgggggttccagtaacatagcttcattgacccctgggccaggcatgcaatcaccatcttcctaccagaacaacaactatgggctcaacatgagtagccccccacatgggagtcctggtcttgccccaaaccagcagaatatcatgatttctcctcgtaatcgtgggagtccaaagatagcctcacatcagttttctcctgttgcaggtgtgcactctcccatggcatcttctggcaatactgggaaccacagcttttccagcagctctctcagtgccctgcaagccatcagtgaaggtgtggggacttcccttttatctactctgtcatcaccaggccccaaattggataactctcccaatatgaatattacccaaccaagtaaagtaagcaatcaggattccaagagtcctctgggcttttattgcgaccaaaatccagtggagagttcaatgtgtcagtcaaatagcagagatcacctcagtgacaaagaaagtaaggagagcagtgttgagggggcagagaatcaaaggggtcctttggaaagcaaaggtcataaaaaattactgcagttacttacctgttcttctgatgaccggggtcattcctccttgaccaactcccccctagattcaagttgtaaagaatcttctgttagtgtcaccagcccctctggagtctcctcctctacatctggaggagtatcctctacatccaatatgcatgggtcactgttacaagagaagcaccggattttgcacaagttgctgcagaatgggaattcaccagctgaggtagccaagattactgcagaagccactgggaaagacaccagcagtataacttcttgtggggacggaaatgttgtcaagcaggagcagctaagtcctaagaagaaggagaataatgcacttcttagatacctgctggacagggatgatcctagtgatgcactctctaaagaactacagccccaagtggaaggagtggataataaaatgagtcagtgcaccagctccaccattcctagctcaagtcaagagaaagaccctaaaattaagacagagacaagtgaagagggatctggagacttggataatctagatgctattcttggtgatctgactagttctgacttttacaataattccatatcctcaaatggtagtcatctggggactaagcaacaggtgtttcaaggaactaattctctgggtttgaaaagttcacagtctgtgcagtctattcgtcctccatataaccgagcagtgtctctggatagccctgtttctgttggctcaagtcctccagtaaaaaatatcagtgctttccccatgttaccaaagcaacccatgttgggtgggaatccaagaatgatggatagtcaggaaaattatggctcaagtatgggtgggccaaaccgaaatgtgactgtgactcagactccttcctcaggagactggggcttaccaaactcaaaggccggcagaatggaacctatgaattcaaactccatgggaagaccaggaggagattataatacttctttacccagacctgcactgggtggctctattcccacattgcctcttcggtctaatagcataccaggtgcgagaccagtattgcaacagcagcagcagatgcttcaaatgaggcctggtgaaatccccatgggaatgggggctaatccctatggccaagcagcagcatctaaccaactgggttcctggcccgatggcatgttgtccatggaacaagtttctcatggcactcaaaataggcctcttcttaggaattccctggatgatcttgttgggccaccttccaacctggaaggccagagtgacgaaagagcattattggaccagctgcacactcttctcagcaacacagatgccacaggcctggaagaaattgacagagctttgggcattcctgaacttgtcaatcagggacaggcattagagcccaaacaggatgctttccaaggccaagaagcagcagtaatgatggatcagaaggcaggattatatggacagacatacccagcacaggggcctccaatgcaaggaggctttcatcttcagggacaatcaccatcttttaactctatgatgaatcagatgaaccagcaaggcaattttcctctccaaggaatgcacccacgagccaacatcatgagaccccggacaaacacccccaagcaacttagaatgcagcttcagcagaggctgcagggccagcagtttttgaatcagagccgacaggcacttgaattgaaaatggaaaaccctactgctggtggtgctgcggtgatgaggcctatgatgcagccccagcagggttttcttaatgctcaaatggtcgcccaacgcagcagagagctgctaagtcatcacttccgacaacagagggtggctatgatgatgcagcagcagcagcagcagcaacagcagcagcagcagcagcagcagcagcaacagcaacagcaacagcaacagcagcaacagcagcaaacccaggccttcagcccacctcctaatgtgactgcttcccccagcatggatgggcttttggcaggacccacaatgccacaagctcctccgcaacagtttccatatcaaccaaattatggaatgggacaacaaccagatccagcctttggtcgagtgtctagtcctcccaatgcaatgatgtcgtcaagaatgggtccctcccagaatcccatgatgcaacacccgcaggctgcatccatctatcagtcctcagaaatgaagggctggccatcaggaaatttggccaggaacagctccttttcccagcagcagtttgcccaccaggggaatcctgcagtgtatagtatggtgcacatgaatggcagcagtggtcacatgggacagatgaacatgaaccccatgcccatgtctggcatgcctatgggtcctgatcagaaatactgctgacatctctgcaccaggacctcttaaggaaaccactgtacaaatgacactgcactaggattattgggaaggaatcattgttccaggcatccatcttggaagaaaggaccagctttgagctccatcaagggtattttaagtgatgtcatttgagcaggactggattttaagccgaagggcaatatctacgtgtttttcccccctccttctgctgtgtatcatggtgttcaaaacagaaatgttttttggcattccacctcctagggatataattctggagacatggagtgttactgatcataaaacttttgtgtcacttttttctgccttgctagccaaaatctcttaaatacacgtaggtgggccagagaacattggaagaatcaagagagattagaatatctggtttctctagttgcagtattggacaaagagcatagtcccagccttcaggtgtagtagttctgtgttgaccctttgtccagtggaattggtgattctgaattgtcctttactaatggtgttgagttgctctgtccctattatttgccctaggctttctcctaatgaaggttttcatttgccattcatgtcctgtaatacttcacctccaggaactgtcatggatgtccaaatggctttgcagaaaggaaatgagatgacagtatttaatcgcagcagtagcaaacttttcacatgctaatgtgcagctgagtgcactttatttaaaaagaatggataaatgcaatattcttgaggtcttgagggaatagtgaaacacattcctggtttttgcctacacttacgtgttagacaagaactatgatttttttttttaaagtactggtgtcaccctttgcctatatggtagagcaataatgctttttaaaaataaacttctgaaaacccaaggccaggtactgcattctgaatcagaatctcgcagtgtttctgtgaatagatttttttgtaaatatgacctttaagatattgtattatgtaaaatatgtatatacctttttttgtaggtcacaacaactcatttttacagagtttgtgaagctaaatatttaacattgttgatttcagtaagctgtgtggtgaggctaccagtggaagagacatcccttgacttttgtggcctgggggaggggtagtgctccacagcttttccttccccaccccccagccttagatgcctcgctcttttcaatctcttaatctaaatgctttttaaagagattatttgtttagatgtaggcattttaattttttaaaaattcctctaccagaactaagcactttgttaatttggggggaaagaatagatatggggaaataaacttaaaaaaaaatcaggaatttaaaaaaacgagcaatttgaagagaatcttttggattttaagcagtccgaaataatagcaattcatgggctgtgtgtgtgtgtgtatgtgtgtgtgtgtgtgtgtatgtttaattatgttaccttttcatcccctttaggagcgttttcagattttggttgctaagacctgaatcccatattgagatctcgagtagaatccttggtgtggtttctggtgtctgctcagctgtcccctcattctactaatgtgatgctttcattatgtccctgtggattagaatagtgtcagttatttcttaagtaactcagtacccagaacagccagttttactgtgattcagagccacagtctaactgagcaccttttaaacccctccctcttctgccccctaccacttttctgctgttgcctctctttgacacctgttttagtcagttgggaggaagggaaaaatcaagtttaattccctttatctgggttaattcatttggttcaaatagttgacggaattgggtttctgaatgtctgtgaatttcagaggtctctgctagccttggtatcattttctagcaataactgagagccagttaattttaagaatttcacacatttagccaatctttctagatgtctctgaaggtaagatcatttaatatctttgatatgcttacgagtaagtgaatcctgattatttccagacccaccaccagagtggatcttattttcaaagcagtatagacaattatgagtttgccctctttcccctaccaagttcaaaatatatctaagaaagattgtaaatccgaaaacttccattgtagtggcctgtgcttttcagatagtatactctcctgtttggagacagaggaagaaccaggtcagtctgtctctttttcagctcaattgtatctgacccttctttaagttatgtgtgtggggagaaatagaatggtgctcttatctttcttgactttaaaaaaattattaaaaacaaaaaaaaaataaatttttttgcaatcctttcctcagacctggctccaggctaactggaaggcagcactcccttttttatatagtagaaaaatgaagtttattataagtttttatattttctacttgttcatttggtgcaaactcaagatttcttttaataggtgcagtctttgagataatttgtttttacctgtattgccctttatcttttttaggtaattctttgtactcctgctgtctacctctcctcacaccccagcaccccccattttttcaaaccttggtatctgttgggtgaacagtataatcttttcatctgcttttagaatgtgggatatttccagtacctactttttttttttttttttgctgaatccaaagatatataaataaaatatatatattttataaagatcagaatgatataaaggagatacatgtttcttcctttaaaaaataaacggaagttacattgttaatgttcatattatgatgccacttttctaaactgcatctggattgaaaggtgtaaatatcaataacagtgctacttagttatcagtatttaatatctgaggtgagttgggggtatctatattaggggtagggtattacagaagataattggcttgatgtcctagaagttctttgatccagaggtgggtgcagctgaaagtaaacagaatggattgccagttacatgtatgcctgcccagttccctttttatttgcagaagctgtgagttttgttcacaattaggttcctaggagcaaaacctcaaggattgatttattgttttcaactccaaggcacactgttaataaacgagcagggtgttttctctcttcctttctaatatatggagtttcgaagaataaaatatgagagcaatatttaaattctcaggaattgacttatactcttgagaatgaattcagtttcaatcaagtttacattatgttgcttaaaaaaatagaaattattctttatcttgcaaagaattgaaaccacatgaaatgacttatgggggatggtgagctgtgactgctttgctgaccattttggatgtcattgtaaataaaggtttctatttaaaa

SEQ ID NO: 377625 - DNA, 7914 bp, Homo sapiens
  misc_feature (5)..(5): n is a, c, g, or t
  misc_feature (7202)..(7202): n is a, c, g, or t
  misc_feature (7209)..(7209): n is a, c, g, or t
  misc_feature (7228)..(7229): n is a, c, g, or t
  misc_feature (7232)..(7233): n is a, c, g, or t
  misc_feature (7243)..(7243): n is a, c, g, or t
  misc_feature (7250)..(7252): n is a, c, g, or t
cggcngcggctgcggcttagtcggtggcggccggcggcggctgcgggctgagcggcgagtttccgatttaaagctgagctgcgaggaaaatggcggcgggaggatcaaaatacttgctggatggtggactcagagaccaataaaaataaactgcttgaacatcctttgactggttagccagttgctgatgtatattcaagatgagtggattaggagaaaacttggatccactggccagtgattcacgaaaacgcaaattgccatgtgatactccaggacaaggtcttacctgcagtggtgaaaaacggagacgggagcaggaaagtaaatatattgaagaattggctgagctgatatctgccaatcttagtgatattgacaatttcaatgtcaaaccagataaatgtgcgattttaaaggaaacagtaagacagatacgtcaaataaaagagcaaggaaaaactatttccaatgatgatgatgttcaaaaagccgatgtatcttctacagggcagggagttattgataaagactccttaggaccgcttttacttcaggcattggatggtttcctatttgtggtgaatcgagacggaaacattgtatttgtatcagaaaatgtcacacaatacctgcaatataagcaagaggacctggttaacacaagtgtttacaatatcttacatgaagaagacagaaaggattttcttaagaatttaccaaaatctacagttaatggagtttcctggacaaatgagacccaaagacaaaaaagccatacatttaattgccgtatgttgatgaaaacaccacatgatattctggaagacataaacgccagtcctgaaatgcgccagagatatgaaacaatgcagtgctttgccctgtctcagccacgagctatgatggaggaaggggaagatttgcaatcttgtatgatctgtgtggcacgccgcattactacaggagaaagaacatttccatcaaaccctgagagctttattaccagacatgatctttcaggaaaggttgtcaatatagatacaaattcactgagatcctccatgaggcctggctttgaagatataatccgaaggtgtattcagagattttttagtctaaatgatgggcagtcatggtcccagaaacgtcactatcaagaagcttatcttaatggccatgcagaaaccccagtatatcgattctcgttggctgatggaactatagtgactgcacagacaaaaagcaaactcttccgaaatcctgtaacaaatgatcgacatggctttgtctcaacccacttccttcagagagaacagaatggatatagaccaaacccaaatcctgttggacaagggattagaccacctatggctggatgcaacagttcggtaggcggcatgagtatgtcgccaaaccaaggcttacagatgccgagcagcagggcctatggcttggcagaccctagcaccacagggcagatgagtggagctaggtatgggggttccagtaacatagcttcattgacccctgggccaggcatgcaatcaccatcttcctaccagaacaacaactatgggctcaacatgagtagccccccacatgggagtcctggtcttgccccaaaccagcagaatatcatgatttctcctcgtaatcgtgggagtccaaagatagcctcacatcagttttctcctgttgcaggtgtgcactctcccatggcatcttctggcaatactgggaaccacagcttttccagcagctctctcagtgccctgcaagccatcagtgaaggtgtggggacttcccttttatctactctgtcatcaccaggccccaaattggataactctcccaatatgaatattacccaaccaagtaaagtaagcaatcaggattccaagagtcctctgggcttttattgcgaccaaaatccagtggagagttcaatgtgtcagtcaaatagcagagatcacctcagtgacaaagaaagtaaggagagcagtgttgagggggcagagaatcaaaggggtcctttggaaagcaaaggtcataaaaaattactgcagttacttacctgttcttctgatgaccggggtcattcctccttgaccaactcccccctagattcaagttgtaaagaatcttctgttagtgtcaccagcccctctggagtctcctcctctacatctggaggagtatcctctacatccaatatgcatgggtcactgttacaagagaagcaccggattttgcacaagttgctgcagaatgggaattcaccagctgaggtagccaagattactgcagaagccactgggaaagacaccagcagtataacttcttgtggggacggaaatgttgtcaagcaggagcagctaagtcctaagaagaaggagaataatgcacttcttagatacctgctggacagggatgatcctagtgatgcactctctaaagaactacagccccaagtggaaggagtggataataaaatgagtcagtgcaccagctccaccattcctagctcaagtcaagagaaagaccctaaaattaagacagagacaagtgaagagggatctggagacttggataatctagatgctattcttggtgatctgactagttctgacttttacaataattccatatcctcaaatggtagtcatctggggactaagcaacaggtgtttcaaggaactaattctctgggtttgaaaagttcacagtctgtgcagtctattcgtcctccatataaccgagcagtgtctctggatagccctgtttctgttggctcaagtcctccagtaaaaaatatcagtgctttccccatgttaccaaagcaacccatgttgggtgggaatccaagaatgatggatagtcaggaaaattatggctcaagtatgggtgggccaaaccgaaatgtgactgtgactcagactccttcctcaggagactggggcttaccaaactcaaaggccggcagaatggaacctatgaattcaaactccatgggaagaccaggaggagattataatacttctttacccagacctgcactgggtggctctattcccacattgcctcttcggtctaatagcataccaggtgcgagaccagtattgcaacagcagcagcagatgcttcaaatgaggcctggtgaaatccccatgggaatgggggctaatccctatggccaagcagcagcatctaaccaactgggttcctggcccgatggcatgttgtccatggaacaagtttctcatggcactcaaaataggcctcttcttaggaattccctggatgatcttgttgggccaccttccaacctggaaggccagagtgacgaaagagcattattggaccagctgcacactcttctcagcaacacagatgccacaggcctggaagaaattgacagagctttgggcattcctgaacttgtcaatcagggacaggcattagagcccaaacaggatgctttccaaggccaagaagcagcagtaatgatggatcagaaggcaggattatatggacagacatacccagcacaggggcctccaatgcaaggaggctttcatcttcagggacaatcaccatcttttaactctatgatgaatcagatgaaccagcaaggcaattttcctctccaaggaatgcacccacgagccaacatcatgagaccccggacaaacacccccaagcaacttagaatgcagcttcagcagaggctgcagggccagcagtttttgaatcagagccgacaggcacttgaattgaaaatggaaaaccctactgctggtggtgctgcggtgatgaggcctatgatgcagccccagcagggttttcttaatgctcaaatggtcgcccaacgcagcagagagctgctaagtcatcacttccgacaacagagggtggctatgatgatgcagcagcagcagcagcagcaacagcagcagcagcagcagcagcagcagcaacagcaacagcaacagcaacagcagcaacagcagcaaacccaggccttcagcccacctcctaatgtgactgcttcccccagcatggatgggcttttggcaggacccacaatgccacaagctcctccgcaacagtttccatatcaaccaaattatggaatgggacaacaaccagatccagcctttggtcgagtgtctagtcctcccaatgcaatgatgtcgtcaagaatgggtccctcccagaatcccatgatgcaacacccgcaggctgcatccatctatcagtcctcagaaatgaagggctggccatcaggaaatttggccaggaacagctccttttcccagcagcagtttgcccaccaggggaatcctgcagtgtatagtatggtgcacatgaatggcagcagtggtcacatgggacagatgaacatgaaccccatgcccatgtctggcatgcctatgggtcctgatcagaaatactgctgacatctctgcaccaggacctcttaaggaaaccactgtacaaatgacactgcactaggattattgggaaggaatcattgttccaggcatccatcttggaagaaaggaccagctttgagctccatcaagggtattttaagtgatgtcatttgagcaggactggattttaagccgaagggcaatatctacgtgtttttcccccctccttctgctgtgtatcatggtgttcaaaacagaaatgttttttggcattccacctcctagggatataattctggagacatggagtgttactgatcataaaacttttgtgtcacttttttctgccttgctagccaaaatctcttaaatacacgtaggtgggccagagaacattggaagaatcaagagagattagaatatctggtttctctagttgcagtattggacaaagagcatagtcccagccttcaggtgtagtagttctgtgttgaccctttgtccagtggaattggtgattctgaattgtcctttactaatggtgttgagttgctctgtccctattatttgccctaggctttctcctaatgaaggttttcatttgccattcatgtcctgtaatacttcacctccaggaactgtcatggatgtccaaatggctttgcagaaaggaaatgagatgacagtatttaatcgcagcagtagcaaacttttcacatgctaatgtgcagctgagtgcactttatttaaaaagaatggataaatgcaatattcttgaggtcttgagggaatagtgaaacacattcctggtttttgcctacacttacgtgttagacaagaactatgatttttttttttaaagtactggtgtcaccctttgcctatatggtagagcaataatgctttttaaaaataaacttctgaaaacccaaggccaggtactgcattctgaatcagaatctcgcagtgtttctgtgaatagatttttttgtaaatatgacctttaagatattgtattatgtaaaatatgtatatacctttttttgtaggtcacaacaactcatttttacagagtttgtgaagctaaatatttaacattgttgatttcagtaagctgtgtggtgaggctaccagtggaagagacatcccttgacttttgtggcctgggggaggggtagtgctccacagcttttccttccccaccccccagccttagatgcctcgctcttttcaatctcttaatctaaatgctttttaaagagattatttgtttagatgtaggcattttaattttttaaaaattcctctaccagaactaagcactttgttaatttggggggaaagaatagatatggggaaataaacttaaaaaaaaatcaggaatttaaaaaaacgagcaatttgaagagaatcttttggattttaagcagtccgaaataatagcaattcatgggctgtgtgtgtgtgtgtatgtgtgtgtgtgtgtgtgtatgtttaattatgttaccttttcatcccctttaggagcgttttcagattttggttgctaagacctgaatcccatattgagatctcgagtagaatccttggtgtggtttctggtgtctgctcagctgtcccctcattctactaatgtgatgctttcattatgtccctgtggattagaatagtgtcagttatttcttaagtaactcagtacccagaacagccagttttactgtgattcagagccacagtctaactgagcaccttttaaacccctccctcttctgccccctaccacttttctgctgttgcctctctttgacacctgttttagtcagttgggaggaagggaaaaatcaagtttaattccctttatctgggttaattcatttggttcaaatagttgacggaattgggtttctgaatgtctgtgaatttcagaggtctctgctagccttggtatcattttctagcaataactgagagccagttaattttaagaatttcacacatttagccaatctttctagatgtctctgaaggtaagatcatttaatatctttgatatgcttacgagtaagtgaatcctgattatttccagacccaccaccagagtggatcttattttcaaagcagtatagacaattatgagtttgccctctttcccctaccaagttcaaaatatatctaagaaagattgtaaatccgaaaacttccattgtagtggcctgtgcttttcagatagtatactctcctgtttggagacagaggaagaaccaggtcagtctgtctctttttcagctcaattgtatctgacccttctttaagttatgtgtgtggggagaaatagaatggtgctcttatctttcttgactttaaaaaaattattaaaaacaaaaaaaaaataaatttttttgcaatcctttcctcagacctggctccaggctaactggaaggcagcactcccttttttatatagtagaaaaatgaagtttattataagtttttatattttctacttgttcatttggtgcaaactcaagatttcttttaataggtgcagtctttgagataatttgtttttacctgtattgccctttatcttttttaggtaattctttgtactcctgctgtctacctctcctcacaccccagcaccccccattttttcaaaccttggtatctgttgggtgaacagtataatcttttcatctgcttttagaatgtgggatatttccagtacctactttttttttttttttttgctgggttttttanttccctnttttttttttctataaggnnccnnattgttttangggagannncatgtttcttcctttaaaaaataaacggaagttacattgttaatgttcatattatgatgccacttttctaaactgcatctggattgaaaggtgtaaatatcaataacagtgctacttagttatcagtatttaatatctgaggtgagttgggggtatctatattaggggtagggtattacagaagataattggcttgatgtcctagaagttctttgatccagaggtgggtgcagctgaaagtaaacagaatggattgccagttacatgtatgcctgcccagttccctttttatttgcagaagctgtgagttttgttcacaattaggttcctaggagcaaaacctcaaggattgatttattgttttcaactccaaggcacactgttaataaacgagcagggtgttttctctcttcctttctaatatatggagtttcgaagaataaaatatgagagcaatatttaaattctcaggaattgacttatactcttgagaatgaattcagtttcaatcaagtttacattatgttgcttaaaaaaatagaaattattctttatcttgcaaagaattgaaaccacatgaaatgacttatgggggatggtgagctgtgactgctttgctgaccattttggatgtcattgtaaataaaggtttctatttaaaa

SEQ ID NO: 377626 - DNA, 7903 bp, Homo sapiens
  misc_feature (5)..(5): n is a, c, g, or t
cggcngcggctgcggcttagtcggtggcggccggcggcggctgcgggctgagcggcgagtttccgatttaaagctgagctgcgaggaaaatggcggcgggaggatcaaaatacttgctggatggtggactcagagaccaataaaaataaactgcttgaacatcctttgactggttagccagttgctgatgtatattcaagatgagtggattaggagaaaacttggatccactggccagtgattcacgaaaacgcaaattgccatgtgatactccaggacaaggtcttacctgcagtggtgaaaaacggagacgggagcaggaaagtaaatatattgaagaattggctgagctgatatctgccaatcttagtgatattgacaatttcaatgtcaaaccagataaatgtgcgattttaaaggaaacagtaagacagatacgtcaaataaaagagcaaggaaaaactatttccaatgatgatgatgttcaaaaagccgatgtatcttctacagggcagggagttattgataaagactccttaggaccgcttttacttcaggcattggatggtttcctatttgtggtgaatcgagacggaaacattgtatttgtatcagaaaatgtcacacaatacctgcaatataagcaagaggacctggttaacacaagtgtttacaatatcttacatgaagaagacagaaaggattttcttaagaatttaccaaaatctacagttaatggagtttcctggacaaatgagacccaaagacaaaaaagccatacatttaattgccgtatgttgatgaaaacaccacatgatattctggaagacataaacgccagtcctgaaatgcgccagagatatgaaacaatgcagtgctttgccctgtctcagccacgagctatgatggaggaaggggaagatttgcaatcttgtatgatctgtgtggcacgccgcattactacaggagaaagaacatttccatcaaaccctgagagctttattaccagacatgatctttcaggaaaggttgtcaatatagatacaaattcactgagatcctccatgaggcctggctttgaagatataatccgaaggtgtattcagagattttttagtctaaatgatgggcagtcatggtcccagaaacgtcactatcaagaagttaccagtgatgggatattttccccaacagcttatcttaatggccatgcagaaaccccagtatatcgattctcgttggctgatggaactatagtgactgcacagacaaaaagcaaactcttccgaaatcctgtaacaaatgatcgacatggctttgtctcaacccacttccttcagagagaacagaatggatatagaccaaacccaaatcctgttggacaagggattagaccacctatggctggatgcaacagttcggtaggcggcatgagtatgtcgccaaaccaaggcttacagatgccgagcagcagggcctatggcttggcagaccctagcaccacagggcagatgagtggagctaggtatgggggttccagtaacatagcttcattgacccctgggccaggcatgcaatcaccatcttcctaccagaacaacaactatgggctcaacatgagtagccccccacatgggagtcctggtcttgccccaaaccagcagaatatcatgatttctcctcgtaatcgtgggagtccaaagatagcctcacatcagttttctcctgttgcaggtgtgcactctcccatggcatcttctggcaatactgggaaccacagcttttccagcagctctctcagtgccctgcaagccatcagtgaaggtgtggggacttcccttttatctactctgtcatcaccaggccccaaattggataactctcccaatatgaatattacccaaccaagtaaagtaagcaatcaggattccaagagtcctctgggcttttattgcgaccaaaatccagtggagagttcaatgtgtcagtcaaatagcagagatcacctcagtgacaaagaaagtaaggagagcagtgttgagggggcagagaatcaaaggggtcctttggaaagcaaaggtcataaaaaattactgcagttacttacctgttcttctgatgaccggggtcattcctccttgaccaactcccccctagattcaagttgtaaagaatcttctgttagtgtcaccagcccctctggagtctcctcctctacatctggaggagtatcctctacatccaatatgcatgggtcactgttacaagagaagcaccggattttgcacaagttgctgcagaatgggaattcaccagctgaggtagccaagattactgcagaagccactgggaaagacaccagcagtataacttcttgtggggacggaaatgttgtcaagcaggagcagctaagtcctaagaagaaggagaataatgcacttcttagatacctgctggacagggatgatcctagtgatgcactctctaaagaactacagccccaagtggaaggagtggataataaaatgagtcagtgcaccagctccaccattcctagctcaagtcaagagaaagaccctaaaattaagacagagacaagtgaagagggatctggagacttggataatctagatgctattcttggtgatctgactagttctgacttttacaataattccatatcctcaaatggtagtcatctggggactaagcaacaggtgtttcaaggaactaattctctgggtttgaaaagttcacagtctgtgcagtctattcgtcctccatataaccgagcagtgtctctggatagccctgtttctgttggctcaagtcctccagtaaaaaatatcagtgctttccccatgttaccaaagcaacccatgttgggtgggaatccaagaatgatggatagtcaggaaaattatggctcaagtatgggagactggggcttaccaaactcaaaggccggcagaatggaacctatgaattcaaactccatgggaagaccaggaggagattataatacttctttacccagacctgcactgggtggctctattcccacattgcctcttcggtctaatagcataccaggtgcgagaccagtattgcaacagcagcagcagatgcttcaaatgaggcctggtgaaatccccatgggaatgggggctaatccctatggccaagcagcagcatctaaccaactgggttcctggcccgatggcatgttgtccatggaacaagtttctcatggcactcaaaataggcctcttcttaggaattccctggatgatcttgttgggccaccttccaacctggaaggccagagtgacgaaagagcattattggaccagctgcacactcttctcagcaacacagatgccacaggcctggaagaaattgacagagctttgggcattcctgaacttgtcaatcagggacaggcattagagcccaaacaggatgctttccaaggccaagaagcagcagtaatgatggatcagaaggcaggattatatggacagacatacccagcacaggggcctccaatgcaaggaggctttcatcttcagggacaatcaccatcttttaactctatgatgaatcagatgaaccagcaaggcaattttcctctccaaggaatgcacccacgagccaacatcatgagaccccggacaaacacccccaagcaacttagaatgcagcttcagcagaggctgcagggccagcagtttttgaatcagagccgacaggcacttgaattgaaaatggaaaaccctactgctggtggtgctgcggtgatgaggcctatgatgcagccccagcagggttttcttaatgctcaaatggtcgcccaacgcagcagagagctgctaagtcatcacttccgacaacagagggtggctatgatgatgcagcagcagcagcagcagcaacagcagcagcagcagcagcagcagcagcaacagcaacagcaacagcaacagcagcaacagcagcaaacccaggccttcagcccacctcctaatgtgactgcttcccccagcatggatgggcttttggcaggacccacaatgccacaagctcctccgcaacagtttccatatcaaccaaattatggaatgggacaacaaccagatccagcctttggtcgagtgtctagtcctcccaatgcaatgatgtcgtcaagaatgggtccctcccagaatcccatgatgcaacacccgcaggctgcatccatctatcagtcctcagaaatgaagggctggccatcaggaaatttggccaggaacagctccttttcccagcagcagtttgcccaccaggggaatcctgcagtgtatagtatggtgcacatgaatggcagcagtggtcacatgggacagatgaacatgaaccccatgcccatgtctggcatgcctatgggtcctgatcagaaatactgctgacatctctgcaccaggacctcttaaggaaaccactgtacaaatgacactgcactaggattattgggaaggaatcattgttccaggcatccatcttggaagaaaggaccagctttgagctccatcaagggtattttaagtgatgtcatttgagcaggactggattttaagccgaagggcaatatctacgtgtttttcccccctccttctgctgtgtatcatggtgttcaaaacagaaatgttttttggcattccacctcctagggatataattctggagacatggagtgttactgatcataaaacttttgtgtcacttttttctgccttgctagccaaaatctcttaaatacacgtaggtgggccagagaacattggaagaatcaagagagattagaatatctggtttctctagttgcagtattggacaaagagcatagtcccagccttcaggtgtagtagttctgtgttgaccctttgtccagtggaattggtgattctgaattgtcctttactaatggtgttgagttgctctgtccctattatttgccctaggctttctcctaatgaaggttttcatttgccattcatgtcctgtaatacttcacctccaggaactgtcatggatgtccaaatggctttgcagaaaggaaatgagatgacagtatttaatcgcagcagtagcaaacttttcacatgctaatgtgcagctgagtgcactttatttaaaaagaatggataaatgcaatattcttgaggtcttgagggaatagtgaaacacattcctggtttttgcctacacttacgtgttagacaagaactatgatttttttttttaaagtactggtgtcaccctttgcctatatggtagagcaataatgctttttaaaaataaacttctgaaaacccaaggccaggtactgcattctgaatcagaatctcgcagtgtttctgtgaatagatttttttgtaaatatgacctttaagatattgtattatgtaaaatatgtatatacctttttttgtaggtcacaacaactcatttttacagagtttgtgaagctaaatatttaacattgttgatttcagtaagctgtgtggtgaggctaccagtggaagagacatcccttgacttttgtggcctgggggaggggtagtgctccacagcttttccttccccaccccccagccttagatgcctcgctcttttcaatctcttaatctaaatgctttttaaagagattatttgtttagatgtaggcattttaattttttaaaaattcctctaccagaactaagcactttgttaatttggggggaaagaatagatatggggaaataaacttaaaaaaaaatcaggaatttaaaaaaacgagcaatttgaagagaatcttttggattttaagcagtccgaaataatagcaattcatgggctgtgtgtgtgtgtgtatgtgtgtgtgtgtgtgtgtatgtttaattatgttaccttttcatcccctttaggagcgttttcagattttggttgctaagacctgaatcccatattgagatctcgagtagaatccttggtgtggtttctggtgtctgctcagctgtcccctcattctactaatgtgatgctttcattatgtccctgtggattagaatagtgtcagttatttcttaagtaactcagtacccagaacagccagttttactgtgattcagagccacagtctaactgagcaccttttaaacccctccctcttctgccccctaccacttttctgctgttgcctctctttgacacctgttttagtcagttgggaggaagggaaaaatcaagtttaattccctttatctgggttaattcatttggttcaaatagttgacggaattgggtttctgaatgtctgtgaatttcagaggtctctgctagccttggtatcattttctagcaataactgagagccagttaattttaagaatttcacacatttagccaatctttctagatgtctctgaaggtaagatcatttaatatctttgatatgcttacgagtaagtgaatcctgattatttccagacccaccaccagagtggatcttattttcaaagcagtatagacaattatgagtttgccctctttcccctaccaagttcaaaatatatctaagaaagattgtaaatccgaaaacttccattgtagtggcctgtgcttttcagatagtatactctcctgtttggagacagaggaagaaccaggtcagtctgtctctttttcagctcaattgtatctgacccttctttaagttatgtgtgtggggagaaatagaatggtgctcttatctttcttgactttaaaaaaattattaaaaacaaaaaaaaaataaatttttttgcaatcctttcctcagacctggctccaggctaactggaaggcagcactcccttttttatatagtagaaaaatgaagtttattataagtttttatattttctacttgttcatttggtgcaaactcaagatttcttttaataggtgcagtctttgagataatttgtttttacctgtattgccctttatcttttttaggtaattctttgtactcctgctgtctacctctcctcacaccccagcaccccccattttttcaaaccttggtatctgttgggtgaacagtataatcttttcatctgcttttagaatgtgggatatttccagtacctactttttttttttttttttgctgaatccaaagatatataaataaaatatatatattttataaagatcagaatgatataaaggagatacatgtttcttcctttaaaaaataaacggaagttacattgttaatgttcatattatgatgccacttttctaaactgcatctggattgaaaggtgtaaatatcaataacagtgctacttagttatcagtatttaatatctgaggtgagttgggggtatctatattaggggtagggtattacagaagataattggcttgatgtcctagaagttctttgatccagaggtgggtgcagctgaaagtaaacagaatggattgccagttacatgtatgcctgcccagttccctttttatttgcagaagctgtgagttttgttcacaattaggttcctaggagcaaaacctcaaggattgatttattgttttcaactccaaggcacactgttaataaacgagcagggtgttttctctcttcctttctaatatatggagtttcgaagaataaaatatgagagcaatatttaaattctcaggaattgacttatactcttgagaatgaattcagtttcaatcaagtttacattatgttgcttaaaaaaatagaaattattctttatcttgcaaagaattgaaaccacatgaaatgacttatgggggatggtgagctgtgactgctttgctgaccattttggatgtcattgtaaataaaggtttctatttaaaa

SEQ ID NO: 377627 - DNA, 5118 bp, Homo sapiens
  misc_feature (1)..(3): n is a, c, g, or t
  misc_feature (6)..(6): n is a, c, g, or t
  misc_feature (14)..(16): n is a, c, g, or t
  misc_feature (18)..(23): n is a, c, g, or t
  misc_feature (25)..(34): n is a, c, g, or t
  misc_feature (37)..(44): n is a, c, g, or t
  misc_feature (46)..(49): n is a, c, g, or t
  misc_feature (51)..(52): n is a, c, g, or t
  misc_feature (56)..(59): n is a, c, g, or t
  misc_feature (61)..(64): n is a, c, g, or t
  misc_feature (67)..(67): n is a, c, g, or t
  misc_feature (69)..(69): n is a, c, g, or t
  misc_feature (72)..(74): n is a, c, g, or t
  misc_feature (77)..(77): n is a, c, g, or t
  misc_feature (80)..(80): n is a, c, g, or t
  misc_feature (84)..(84): n is a, c, g, or t
  misc_feature (86)..(86): n is a, c, g, or t
  misc_feature (97)..(98): n is a, c, g, or t
  misc_feature (102)..(102): n is a, c, g, or t
  misc_feature (105)..(105): n is a, c, g, or t
  misc_feature (119)..(119): n is a, c, g, or t
  misc_feature (145)..(145): n is a, c, g, or t
  misc_feature (149)..(149): n is a, c, g, or t
  misc_feature (156)..(156): n is a, c, g, or t
  misc_feature (171)..(171): n is a, c, g, or t
  misc_feature (176)..(176): n is a, c, g, or t
  misc_feature (180)..(180): n is a, c, g, or t
  misc_feature (214)..(214): n is a, c, g, or t
  misc_feature (218)..(218): n is a, c, g, or t
  misc_feature (226)..(226): n is a, c, g, or t
  misc_feature (233)..(233): n is a, c, g, or t
  misc_feature (236)..(236): n is a, c, g, or t
  misc_feature (242)..(243): n is a, c, g, or t
  misc_feature (245)..(245): n is a, c, g, or t
  misc_feature (249)..(249): n is a, c, g, or t
  misc_feature (275)..(275): n is a, c, g, or t
  misc_feature (287)..(287): n is a, c, g, or t
  misc_feature (297)..(298): n is a, c, g, or t
nnnttncttttttnnntnnnnnncnnnnnnnnnnctnnnnnnnngnnnngnngcannnncnnnntcncngcnnnctncancctncncctcccaggtnnaagngantctcctgcctcagnctcccgagtagctgggattacaggcntgcnccaccanatctggctatttttntattnttantattttagtagagatggggtttcaccatgttggncagnctggtctngaactcntgncctcanntnatcngcccacctcggcctcccaaagtgctnggattacaggcntgagccaccnngcccagatgacaagactaattttttatccctttggtttattggctacaacatcttcttggaatcagaggtgaattttttcttaccttgggatgcctgagactaggggagtatagaattccaattggtaattaaggcatctttctgctcctgatcagaagggcaggttagttgggagaggtcagatggcacaacagaagtcaccttgtaagtaaggcaaagacttgaaggcattagcgtttctcattactaggtcaataacctgagggaatcaatggctttttgccgctctacctcttgtgtatctctttgacttttctttctctgtctagggcattcctgaacttgtcaatcagggacaggcattagagcccaaacaggatgctttccaaggccaagaagcagcagtaatgatggatcagaaggcaggattatatggacagacatacccagcacaggggcctccaatgcaaggaggctttcatcttcagggacaatcaccatcttttaactctatgatgaatcagatgaaccagcaaggcaattttcctctccaaggaatgcacccacgagccaacatcatgagaccccggacaaacacccccaagcaacttagaatgcagcttcagcagaggctgcagggccagcagtttttgaatcagagccgacaggcacttgaattgaaaatggaaaaccctactgctggtggtgctgcggtgatgaggcctatgatgcagccccagcagggttttcttaatgctcaaatggtcgcccaacgcagcagagagctgctaagtcatcacttccgacaacagagggtggctatgatgatgcagcagcagcagcagcagcaacagcagcagcagcagcagcagcagcagcaacagcaacagcaacagcaacagcagcaacagcagcaaacccaggccttcagcccacctcctaatgtgactgcttcccccagcatggatgggcttttggcaggacccacaatgccacaagctcctccgcaacagtttccatatcaaccaaattatggaatgggacaacaaccagatccagcctttggtcgagtgtctagtcctcccaatgcaatgatgtcgtcaagaatgggtccctcccagaatcccatgatgcaacacccgcaggctgcatccatctatcagtcctcagaaatgaagggctggccatcaggaaatttggccaggaacagctccttttcccagcagcagtttgcccaccaggggaatcctgcagtgtatagtatggtgcacatgaatggcagcagtggtcacatgggacagatgaacatgaaccccatgcccatgtctggcatgcctatgggtcctgatcagaaatactgctgacatctctgcaccaggacctcttaaggaaaccactgtacaaatgacactgcactaggattattgggaaggaatcattgttccaggcatccatcttggaagaaaggaccagctttgagctccatcaagggtattttaagtgatgtcatttgagcaggactggattttaagccgaagggcaatatctacgtgtttttcccccctccttctgctgtgtatcatggtgttcaaaacagaaatgttttttggcattccacctcctagggatataattctggagacatggagtgttactgatcataaaacttttgtgtcacttttttctgccttgctagccaaaatctcttaaatacacgtaggtgggccagagaacattggaagaatcaagagagattagaatatctggtttctctagttgcagtattggacaaagagcatagtcccagccttcaggtgtagtagttctgtgttgaccctttgtccagtggaattggtgattctgaattgtcctttactaatggtgttgagttgctctgtccctattatttgccctaggctttctcctaatgaaggttttcatttgccattcatgtcctgtaatacttcacctccaggaactgtcatggatgtccaaatggctttgcagaaaggaaatgagatgacagtatttaatcgcagcagtagcaaacttttcacatgctaatgtgcagctgagtgcactttatttaaaaagaatggataaatgcaatattcttgaggtcttgagggaatagtgaaacacattcctggtttttgcctacacttacgtgttagacaagaactatgatttttttttttaaagtactggtgtcaccctttgcctatatggtagagcaataatgctttttaaaaataaacttctgaaaacccaaggccaggtactgcattctgaatcagaatctcgcagtgtttctgtgaatagatttttttgtaaatatgacctttaagatattgtattatgtaaaatatgtatatacctttttttgtaggtcacaacaactcatttttacagagtttgtgaagctaaatatttaacattgttgatttcagtaagctgtgtggtgaggctaccagtggaagagacatcccttgacttttgtggcctgggggaggggtagtgctccacagcttttccttccccaccccccagccttagatgcctcgctcttttcaatctcttaatctaaatgctttttaaagagattatttgtttagatgtaggcattttaattttttaaaaattcctctaccagaactaagcactttgttaatttggggggaaagaatagatatggggaaataaacttaaaaaaaaatcaggaatttaaaaaaacgagcaatttgaagagaatcttttggattttaagcagtccgaaataatagcaattcatgggctgtgtgtgtgtgtgtatgtgtgtgtgtgtgtgtgtatgtttaattatgttaccttttcatcccctttaggagcgttttcagattttggttgctaagacctgaatcccatattgagatctcgagtagaatccttggtgtggtttctggtgtctgctcagctgtcccctcattctactaatgtgatgctttcattatgtccctgtggattagaatagtgtcagttatttcttaagtaactcagtacccagaacagccagttttactgtgattcagagccacagtctaactgagcaccttttaaacccctccctcttctgccccctaccacttttctgctgttgcctctctttgacacctgttttagtcagttgggaggaagggaaaaatcaagtttaattccctttatctgggttaattcatttggttcaaatagttgacggaattgggtttctgaatgtctgtgaatttcagaggtctctgctagccttggtatcattttctagcaataactgagagccagttaattttaagaatttcacacatttagccaatctttctagatgtctctgaaggtaagatcatttaatatctttgatatgcttacgagtaagtgaatcctgattatttccagacccaccaccagagtggatcttattttcaaagcagtatagacaattatgagtttgccctctttcccctaccaagttcaaaatatatctaagaaagattgtaaatccgaaaacttccattgtagtggcctgtgcttttcagatagtatactctcctgtttggagacagaggaagaaccaggtcagtctgtctctttttcagctcaattgtatctgacccttctttaagttatgtgtgtggggagaaatagaatggtgctcttatctttcttgactttaaaaaaattattaaaaacaaaaaaaaaataaatttttttgcaatcctttcctcagacctggctccaggctaactggaaggcagcactcccttttttatatagtagaaaaatgaagtttattataagtttttatattttctacttgttcatttggtgcaaactcaagatttcttttaataggtgcagtctttgagataatttgtttttacctgtattgccctttatcttttttaggtaattctttgtactcctgctgtctacctctcctcacaccccagcaccccccattttttcaaaccttggtatctgttgggtgaacagtataatcttttcatctgcttttagaatgtgggatatttccagtacctactttttttttttttttttgctgaatccaaagatatataaataaaatatatatattttataaagatcagaatgatataaaggagatacatgtttcttcctttaaaaaataaacggaagttacattgttaatgttcatattatgatgccacttttctaaactgcatctggattgaaaggtgtaaatatcaataacagtgctacttagttatcagtatttaatatctgaggtgagttgggggtatctatattaggggtagggtattacagaagataattggcttgatgtcctagaagttctttgatccagaggtgggtgcagctgaaagtaaacagaatggattgccagttacatgtatgcctgcccagttccctttttatttgcagaagctgtgagttttgttcacaattaggttcctaggagcaaaacctcaaggattgatttattgttttcaactccaaggcacactgttaataaacgagcagggtgttttctctcttcctttctaatatatggagtttcgaagaataaaatatgagagcaatatttaaattctcaggaattgacttatactcttgagaatgaattcagtttcaatcaagtttacattatgttgcttaaaaaaatagaaattattctttatcttgcaaagaattgaaaccacatgaaatgacttatgggggatggtgagctgtgactgctttgctgaccattttggatgtcattgtaaataaaggtttctatttaaaa

SEQ ID NO: 377628 - DNA, 5014 bp, Homo sapiens
tttcaagtattataattattacctccttcactgtttttgtgaggagtatcttctcccatccttccctaccctccccctggcccccatttctgctataccccaaatgcctagggtttggcaattacaatttggtgttgggattgggggtttaagctgtatatggtggtctaaagtggcctggtgaaatttctaaattgtgggccttaaacttaaattgatgccattcactcttttttaccactttggtttattatttgtgtttgtagcatttgagttactgttcattaaaaatactatgcatggttgctgtgatctattactcttagaaaaaaaaaaagcaccattgacattgattgcaagtctttttctaggcctcgcctcttcttaggaattccctggatgatcttgttgggccaccttccaacctggaaggccagagtgacgaaagagcattattggaccagctgcacactcttctcagcaacacagatgccacaggcctggaagaaattgacagagctttgggcattcctgaacttgtcaatcagggacaggcattagagcccaaacaggatgctttccaaggccaagaagcagcagtaatgatggatcagaaggcaggattatatggacagacatacccagcacaggggcctccaatgcaaggaggctttcatcttcagggacaatcaccatcttttaactctatgatgaatcagatgaaccagcaaggcaattttcctctccaaggaatgcacccacgagccaacatcatgagaccccggacaaacacccccaagcaacttagaatgcagcttcagcagaggctgcagggccagcagtttttgaatcagagccgacaggcacttgaattgaaaatggaaaaccctactgctggtggtgctgcggtgatgaggcctatgatgcagccccagcagggttttcttaatgctcaaatggtcgcccaacgcagcagagagctgctaagtcatcacttccgacaacagagggtggctatgatgatgcagcagcagcagcagcagcaacagcagcagcagcagcagcagcagcagcaacagcaacagcaacagcaacagcagcaacagcagcaaacccaggccttcagcccacctcctaatgtgactgcttcccccagcatggatgggcttttggcaggacccacaatgccacaagctcctccgcaacagtttccatatcaaccaaattatggaatgggacaacaaccagatccagcctttggtcgagtgtctagtcctcccaatgcaatgatgtcgtcaagaatgggtccctcccagaatcccatgatgcaacacccgcaggctgcatccatctatcagtcctcagaaatgaagggctggccatcaggaaatttggccaggaacagctccttttcccagcagcagtttgcccaccaggggaatcctgcagtgtatagtatggtgcacatgaatggcagcagtggtcacatgggacagatgaacatgaaccccatgcccatgtctggcatgcctatgggtcctgatcagaaatactgctgacatctctgcaccaggacctcttaaggaaaccactgtacaaatgacactgcactaggattattgggaaggaatcattgttccaggcatccatcttggaagaaaggaccagctttgagctccatcaagggtattttaagtgatgtcatttgagcaggactggattttaagccgaagggcaatatctacgtgtttttcccccctccttctgctgtgtatcatggtgttcaaaacagaaatgttttttggcattccacctcctagggatataattctggagacatggagtgttactgatcataaaacttttgtgtcacttttttctgccttgctagccaaaatctcttaaatacacgtaggtgggccagagaacattggaagaatcaagagagattagaatatctggtttctctagttgcagtattggacaaagagcatagtcccagccttcaggtgtagtagttctgtgttgaccctttgtccagtggaattggtgattctgaattgtcctttactaatggtgttgagttgctctgtccctattatttgccctaggctttctcctaatgaaggttttcatttgccattcatgtcctgtaatacttcacctccaggaactgtcatggatgtccaaatggctttgcagaaaggaaatgagatgacagtatttaatcgcagcagtagcaaacttttcacatgctaatgtgcagctgagtgcactttatttaaaaagaatggataaatgcaatattcttgaggtcttgagggaatagtgaaacacattcctggtttttgcctacacttacgtgttagacaagaactatgatttttttttttaaagtactggtgtcaccctttgcctatatggtagagcaataatgctttttaaaaataaacttctgaaaacccaaggccaggtactgcattctgaatcagaatctcgcagtgtttctgtgaatagatttttttgtaaatatgacctttaagatattgtattatgtaaaatatgtatatacctttttttgtaggtcacaacaactcatttttacagagtttgtgaagctaaatatttaacattgttgatttcagtaagctgtgtggtgaggctaccagtggaagagacatcccttgacttttgtggcctgggggaggggtagtgctccacagcttttccttccccaccccccagccttagatgcctcgctcttttcaatctcttaatctaaatgctttttaaagagattatttgtttagatgtaggcattttaattttttaaaaattcctctaccagaactaagcactttgttaatttggggggaaagaatagatatggggaaataaacttaaaaaaaaatcaggaatttaaaaaaacgagcaatttgaagagaatcttttggattttaagcagtccgaaataatagcaattcatgggctgtgtgtgtgtgtgtatgtgtgtgtgtgtgtgtgtatgtttaattatgttaccttttcatcccctttaggagcgttttcagattttggttgctaagacctgaatcccatattgagatctcgagtagaatccttggtgtggtttctggtgtctgctcagctgtcccctcattctactaatgtgatgctttcattatgtccctgtggattagaatagtgtcagttatttcttaagtaactcagtacccagaacagccagttttactgtgattcagagccacagtctaactgagcaccttttaaacccctccctcttctgccccctaccacttttctgctgttgcctctctttgacacctgttttagtcagttgggaggaagggaaaaatcaagtttaattccctttatctgggttaattcatttggttcaaatagttgacggaattgggtttctgaatgtctgtgaatttcagaggtctctgctagccttggtatcattttctagcaataactgagagccagttaattttaagaatttcacacatttagccaatctttctagatgtctctgaaggtaagatcatttaatatctttgatatgcttacgagtaagtgaatcctgattatttccagacccaccaccagagtggatcttattttcaaagcagtatagacaattatgagtttgccctctttcccctaccaagttcaaaatatatctaagaaagattgtaaatccgaaaacttccattgtagtggcctgtgcttttcagatagtatactctcctgtttggagacagaggaagaaccaggtcagtctgtctctttttcagctcaattgtatctgacccttctttaagttatgtgtgtggggagaaatagaatggtgctcttatctttcttgactttaaaaaaattattaaaaacaaaaaaaaaataaatttttttgcaatcctttcctcagacctggctccaggctaactggaaggcagcactcccttttttatatagtagaaaaatgaagtttattataagtttttatattttctacttgttcatttggtgcaaactcaagatttcttttaataggtgcagtctttgagataatttgtttttacctgtattgccctttatcttttttaggtaattctttgtactcctgctgtctacctctcctcacaccccagcaccccccattttttcaaaccttggtatctgttgggtgaacagtataatcttttcatctgcttttagaatgtgggatatttccagtacctactttttttttttttttttgctgaatccaaagatatataaataaaatatatatattttataaagatcagaatgatataaaggagatacatgtttcttcctttaaaaaataaacggaagttacattgttaatgttcatattatgatgccacttttctaaactgcatctggattgaaaggtgtaaatatcaataacagtgctacttagttatcagtatttaatatctgaggtgagttgggggtatctatattaggggtagggtattacagaagataattggcttgatgtcctagaagttctttgatccagaggtgggtgcagctgaaagtaaacagaatggattgccagttacatgtatgcctgcccagttccctttttatttgcagaagctgtgagttttgttcacaattaggttcctaggagcaaaacctcaaggattgatttattgttttcaactccaaggcacactgttaataaacgagcagggtgttttctctcttcctttctaatatatggagtttcgaagaataaaatatgagagcaatatttaaattctcaggaattgacttatactcttgagaatgaattcagtttcaatcaagtttacattatgttgcttaaaaaaatagaaattattctttatcttgcaaagaattgaaaccacatgaaatgacttatgggggatggtgagctgtgactgctttgctgaccattttggatgtcattgtaaataaaggtttctatttaaaa

SEQ ID NO: 377629 - DNA, 7142 bp, Homo sapiens
ggaactggagaaacagcaaaccaaacccaaagtgctgggattacaggcgtgagccaccacgcccggctggaagacttaatttgtgggtgactaatcataatgcttaaatgaagaaaagacaataaaattcaatccctcctcttctttttgtcctcaggatcaaaatacttgctggatggtggactcagagaccaataaaaataaactgcttgaacatcctttgactggttagccagttgctgatgtatattcaagatgagtggattaggagaaaacttggatccactggccagtgattcacgaaaacgcaaattgccatgtgatactccaggacaaggtcttacctgcagtggtgaaaaacggagacgggagcaggaaagtaaatatattgaagaattggctgagctgatatctgccaatcttagtgatattgacaatttcaatgtcaaaccagataaatgtgcgattttaaaggaaacagtaagacagatacgtcaaataaaagagcaaggaaaaactatttccaatgatgatgatgttcaaaaagccgatgtatcttctacagggcagggagttattgataaagactccttaggaccgcttttacttcaggcattggatggtttcctatttgtggtgaatcgagacggaaacattgtatttgtatcagaaaatgtcacacaatacctgcaatataagcaagaggacctggttaacacaagtgtttacaatatcttacatgaagaagacagaaaggattttcttaagaatttaccaaaatctacagttaatggagtttcctggacaaatgagacccaaagacaaaaaagccatacatttaattgccgtatgttgatgaaaacaccacatgatattctggaagacataaacgccagtcctgaaatgcgccagagatatgaaacaatgcagtgctttgccctgtctcagccacgagctatgatggaggaaggggaagatttgcaatcttgtatgatctgtgtggcacgccgcattactacaggagaaagaacatttccatcaaaccctgagagctttattaccagacatgatctttcaggaaaggttgtcaatatagatacaaattcactgagatcctccatgaggcctggctttgaagatataatccgaaggtgtattcagagattttttagtctaaatgatgggcagtcatggtcccagaaacgtcactatcaagaagcttatcttaatggccatgcagaaaccccagtatatcgattctcgttggctgatggaactatagtgactgcacagacaaaaagcaaactcttccgaaatcctgtaacaaatgatcgacatggctttgtctcaacccacttccttcagagagaacagaatggatatagaccaaacccaaatcctgttggacaagggattagaccacctatggctggatgcaacagttcggtaggcggcatgagtatgtcgccaaaccaaggcttacagatgccgagcagcagggcctatggcttggcagaccctagcaccacagggcagatgagtggagctaggtatgggggttccagtaacatagcttcattgacccctgggccaggcatgcaatcaccatcttcctaccagaacaacaactatgggctcaacatgagtagccccccacatgggagtcctggtcttgccccaaaccagcagaatatcatgatttctcctcgtaatcgtgggagtccaaagatagcctcacatcagttttctcctgttgcaggtgtgcactctcccatggcatcttctggcaatactgggaaccacagcttttccagcagctctctcagtgccctgcaagccatcagtgaaggtgtggggacttcccttttatctactctgtcatcaccaggccccaaattggataactctcccaatatgaatattacccaaccaagtaaagtaagcaatcaggattccaagagtcctctgggcttttattgcgaccaaaatccagtggagagttcaatgtgtcagtcaaatagcagagatcacctcagtgacaaagaaagtaaggagagcagtgttgagggggcagagaatcaaaggggtcctttggaaagcaaaggtcataaaaaattactgcagttacttacctgttcttctgatgaccggggtcattcctccttgaccaactcccccctagattcaagttgtaaagaatcttctgttagtgtcaccagcccctctggagtctcctcctctacatctggaggagtatcctctacatccaatatgcatgggtcactgttacaagagaagcaccggattttgcacaagttgctgcagaatgggaattcaccagctgaggtagccaagattactgcagaagccactgggaaagacaccagcagtataacttcttgtggggacggaaatgttgtcaagcaggagcagctaagtcctaagaagaaggagaataatgcacttcttagatacctgctggacagggatgatcctagtgatgcactctctaaagaactacagccccaagtggaaggagtggataataaaatgagtcagtgcaccagctccaccattcctagctcaagtcaagagaaagaccctaaaattaagacagagacaagtgaagagggatctggagacttggataatctagatgctattcttggtgatctgactagttctgacttttacaataattccatatcctcaaatggtagtcatctggggactaagcaacaggtgtttcaaggaactaattctctgggtttgaaaagttcacagtctgtgcagtctattcgtcctccatataaccgagcagtgtctctggatagccctgtttctgttggctcaagtcctccagtaaaaaatatcagtgctttccccatgttaccaaagcaacccatgttgggtgggaatccaagaatgatggatagtcaggaaaattatggctcaagtatgggtgggccaaaccgaaatgtgactgtgactcagactccttcctcaggagactggggcttaccaaactcaaaggccggcagaatggaacctatgaattcaaactccatgggaagaccaggaggagattataatacttctttacccagacctgcactgggtggctctattcccacattgcctcttcggtctaatagcataccaggtgcgagaccagtatagcagcagcagcagcagcagcagcaacagcaacagcaacagcaacagcagcaacagcagcaaacccaggccttcagcccacctcctaatgtgactgcttcccccagcatggatgggcttttggcaggacccacaatgccacaagctcctccgcaacagtttccatatcaaccaaattatggaatgggacaacaaccagatccagcctttggtcgagtgtctagtcctcccaatgcaatgatgtcgtcaagaatgggtccctcccagaatcccatgatgcaacacccgcaggctgcatccatctatcagtcctcagaaatgaagggctggccatcaggaaatttggccaggaacagctccttttcccagcagcagtttgcccaccaggggaatcctgcagtgtatagtatggtgcacatgaatggcagcagtggtcacatgggacagatgaacatgaaccccatgcccatgtctggcatgcctatgggtcctgatcagaaatactgctgacatctctgcaccaggacctcttaaggaaaccactgtacaaatgacactgcactaggattattgggaaggaatcattgttccaggcatccatcttggaagaaaggaccagctttgagctccatcaagggtattttaagtgatgtcatttgagcaggactggattttaagccgaagggcaatatctacgtgtttttcccccctccttctgctgtgtatcatggtgttcaaaacagaaatgttttttggcattccacctcctagggatataattctggagacatggagtgttactgatcataaaacttttgtgtcacttttttctgccttgctagccaaaatctcttaaatacacgtaggtgggccagagaacattggaagaatcaagagagattagaatatctggtttctctagttgcagtattggacaaagagcatagtcccagccttcaggtgtagtagttctgtgttgaccctttgtccagtggaattggtgattctgaattgtcctttactaatggtgttgagttgctctgtccctattatttgccctaggctttctcctaatgaaggttttcatttgccattcatgtcctgtaatacttcacctccaggaactgtcatggatgtccaaatggctttgcagaaaggaaatgagatgacagtatttaatcgcagcagtagcaaacttttcacatgctaatgtgcagctgagtgcactttatttaaaaagaatggataaatgcaatattcttgaggtcttgagggaatagtgaaacacattcctggtttttgcctacacttacgtgttagacaagaactatgatttttttttttaaagtactggtgtcaccctttgcctatatggtagagcaataatgctttttaaaaataaacttctgaaaacccaaggccaggtactgcattctgaatcagaatctcgcagtgtttctgtgaatagatttttttgtaaatatgacctttaagatattgtattatgtaaaatatgtatatacctttttttgtaggtcacaacaactcatttttacagagtttgtgaagctaaatatttaacattgttgatttcagtaagctgtgtggtgaggctaccagtggaagagacatcccttgacttttgtggcctgggggaggggtagtgctccacagcttttccttccccaccccccagccttagatgcctcgctcttttcaatctcttaatctaaatgctttttaaagagattatttgtttagatgtaggcattttaattttttaaaaattcctctaccagaactaagcactttgttaatttggggggaaagaatagatatggggaaataaacttaaaaaaaaatcaggaatttaaaaaaacgagcaatttgaagagaatcttttggattttaagcagtccgaaataatagcaattcatgggctgtgtgtgtgtgtgtatgtgtgtgtgtgtgtgtgtatgtttaattatgttaccttttcatcccctttaggagcgttttcagattttggttgctaagacctgaatcccatattgagatctcgagtagaatccttggtgtggtttctggtgtctgctcagctgtcccctcattctactaatgtgatgctttcattatgtccctgtggattagaatagtgtcagttatttcttaagtaactcagtacccagaacagccagttttactgtgattcagagccacagtctaactgagcaccttttaaacccctccctcttctgccccctaccacttttctgctgttgcctctctttgacacctgttttagtcagttgggaggaagggaaaaatcaagtttaattccctttatctgggttaattcatttggttcaaatagttgacggaattgggtttctgaatgtctgtgaatttcagaggtctctgctagccttggtatcattttctagcaataactgagagccagttaattttaagaatttcacacatttagccaatctttctagatgtctctgaaggtaagatcatttaatatctttgatatgcttacgagtaagtgaatcctgattatttccagacccaccaccagagtggatcttattttcaaagcagtatagacaattatgagtttgccctctttcccctaccaagttcaaaatatatctaagaaagattgtaaatccgaaaacttccattgtagtggcctgtgcttttcagatagtatactctcctgtttggagacagaggaagaaccaggtcagtctgtctctttttcagctcaattgtatctgacccttctttaagttatgtgtgtggggagaaatagaatggtgctcttatctttcttgactttaaaaaaattattaaaaacaaaaaaaaaataaatttttttgcaatcctttcctcagacctggctccaggctaactggaaggcagcactcccttttttatatagtagaaaaatgaagtttattataagtttttatattttctacttgttcatttggtgcaaactcaagatttcttttaataggtgcagtctttgagataatttgtttttacctgtattgccctttatcttttttaggtaattctttgtactcctgctgtctacctctcctcacaccccagcaccccccattttttcaaaccttggtatctgttgggtgaacagtataatcttttcatctgcttttagaatgtgggatatttccagtacctactttttttttttttttttgctgaatccaaagatatataaataaaatatatatattttataaagatcagaatgatataaaggagatacatgtttcttcctttaaaaaataaacggaagttacattgttaatgttcatattatgatgccacttttctaaactgcatctggattgaaaggtgtaaatatcaataacagtgctacttagttatcagtatttaatatctgaggtgagttgggggtatctatattaggggtagggtattacagaagataattggcttgatgtcctagaagttctttgatccagaggtgggtgcagctgaaagtaaacagaatggattgccagttacatgtatgcctgcccagttccctttttatttgcagaagctgtgagttttgttcacaattaggttcctaggagcaaaacctcaaggattgatttattgttttcaactccaaggcacactgttaataaacgagcagggtgttttctctcttcctttctaatatatggagtttcgaagaataaaatatgagagcaatatttaaattctcaggaattgacttatactcttgagaatgaattcagtttcaatcaagtttacattatgttgcttaaaaaaatagaaattattctttatcttgcaaagaattgaaaccacatgaaatgacttatgggggatggtgagctgtgactgctttgctgaccattttggatgtcattgtaaataaaggtttctatttaaaa

SEQ ID NO: 377630 - DNA, 599 bp, Homo sapiens
ccgcctctcttcccccacccggagtggccggcagtccccggcaggcgtgcgccgggcagcagacagccgggagagctcgagcgccaggaagctggggacccgtgaccgtcacggagagatagagaacccctagcggacctgaggaacctgggctctgcttcctccgcctgctgcctggactgctcagtgaggtggggggatccccggccaccggtgctgtggctgtagctgacctctttggaccgggatgtgggtatcctgggctcctggcctgtggctgctcggtctttgggctaccttcggccatggggcaaatacaggtgcacaatgcccaccttcacagcaggaaggactcaaattggaacacagtagtagcctgccagccaacgtgactggcttcaacctcatccaccgactcagcctcatgaagaagtctgccatcaagaagatccgcaaccccaaggggcctctcatcctgcgcctgggggcggcccccgtgacccagcccacgcgcactttgggaggccaaggtcggcagatcacttgaggtcaggagttcgagaccagcctggccagcatggcgaaaccccgtctctact

SEQ ID NO: 377631 - DNA, 796 bp, Homo sapiens
ttcacgcccacagactaatgcctggtacgtaatagttgcttgttaaatgtttgtaggatgaccgaatgggccaaatgaaagattgttcgaacatcagctaagtggtcctgcttggacagcagccaccctctgttgaccttggccctggcaagctgggaggaaggctgctggaatcccaggggctctatggggcctgggcctcttcatccatttcccttggcttcctttgcagggtccgcctggcatgaggggctccccgggtcctccaggccctatcgtaagtatcagtggtgccctggtctgcttgagaagctctcaaaggggtcattacactcagacaccatcccgcggccttgtccccaaaaggctgggcaaggcaggaggagggaacttccactgccctccccatccctccgcagagcatctgcagggactgtgctctcccaccaccggatgccctggaaccgccctgctctgcctactgcctgcggtcctgcttaggggaggtcctcagaggcacctctttgcttccctgtccccaccctctgctgcgctttccacagtggccccaggccgccctcggcagggggcctaggcttcaggctcacagcctcccaaccagggaagcatgcggcatgctggccagacctctccatgcccctgtgactccagtccccacaagggctcggggctaagatggagctgtcctccattgctctgtagggccatctctagggtaaatctacaaaaaccagaccagggtatctactctggagtcctgtgtggcgtgacatgg

SEQ ID NO: 377632 - DNA, 1071 bp, Homo sapiens
ctcacaatagaccagtcacacttacactagggattggcaagttttccagaagacatgagacatagcgctgtgggatgagagggaggagcacccaacccagcctggggagtcggagaggctgcagagagaacaggaacacttcagctcaggaggggtgcactggatagagagagatgaggggaagggcattcaggaccataacaacatggcagaatcagagaatcatcaccagtgaggtctggtgggaggcagagggtggggagaggaggctgaggaaggaacgatcaggaccacataatgaatggccttgcatgcccggccaacgaatgagtgctttatcctgaggacatttgggagccatcagaatttctaagcagggagtaacaccaggagaactgtcttctagaaggaccactctggggcagtgaggtggagtgacctgtcaggatgctgtggccacagtctagagggagacgctgggggcctggtgggagggtggagagaaaagagcagattggtgagacatcatgatgtaaatttgacagcactaagtatctatctttgtagggtgatccaggagctgcaggacagaagggccaggcaggagagaaggggagagccggcatgcctggtggacctggcaagagtggttccatggggcctgttgggccaccgggccctgcaggagagagaggccaccctggagctccggggccttcggggagccctggcttgcctggtgtgcctggctccatggtaagggggaaggctggcagctgtgggcactgtcccatagagcaggcatgtggggtggagctcggatcatcttccaagctcctgctgacattctgtgggaaagagcctggctcccatagagggcagctcttaactgtgtgcggaagggtggggatgataggaccctctccccagaaaaatgcacttaagaacaaaatgttttgtatcatatctgggtggttaggactttggattgagaatctacggaggttgctgtgagccaagatcgcgccactgcactccagtctgggtgacaaagtgagactctgtctcaga

SEQ ID NO: 377633 - DNA, 369 bp, Homo sapiens
aacggaggagccattcttcctggagccaaggggaggaacagttgtcttttgagccaagactttcaaggagtctcttttccagctgccttgaaaatactcccatgacctcctctccccatgacccccaagccccagactgtgccctccaggctgtcccagggttactgtgcctgtgagatgtgacctgcctgtttctcccaccagggccccccaggttttcctggtgctgttggctcccccggattgcctgtaagaacctagcgctgctcgacctcccctcccccccgtcagccaggtctctgtggcttttgcttgtctccctcctgtcgtgccttcacctccgtcctccgtgtttgttgtcccccttca

SEQ ID NO: 377634 - DNA, 5421 bp, Homo sapiens
ccgcctctcttcccccacccggagtggccggcagtccccggcaggcgtgcgccgggcagcagacagccgggagagctcgagcgccaggaagctggggacccgtgaccgtcacggagagatagagaacccctagcggacctgaggaacctgggctctgcttcctccgcctgctgcctggactgctcagtgaggtggggggatccccggccaccggtgctgtggctgtagctgacctctttggaccgggatgtgggtatcctgggctcctggcctgtggctgctcggtctttgggctaccttcggccatggggcaaatacaggtgcacaatgcccaccttcacagcaggaaggactcaaattggaacacagtagtagcctgccagccaacgtgactggcttcaacctcatccaccgactcagcctcatgaagaagtctgccatcaagaagatccgcaaccccaaggggcctctcatcctgcgcctgggggcggcccccgtgacccagcccacgcgacgagtattccctcggggtctcccggaggagtttgccctggtgctgacactactgctgaagaaacacacccaccagaagacgtggtatctgtttcaagtgaccgatgcaaatgggtatccacagatatccctggaagtcaacagccaagagcggagcctggagctcagggcccagggccaggatggcgactttgtgtcctgcatcttcccagtgccccagctcttcgacttgcgttggcacaagctgatgctgagtgtggctggacgtgtggcctctgtgcacgtggactgcagctcagcctcctcccagcctctggggccccgacgacccatgaggcctgtgggccatgtatttctaggcttggatgctgagcagggcaagcctgtctcgtttgaccttcagcaggtgcacatctactgtgacccggagctcgtgctggaggagggctgctgtgagattttaccagcagggtgccccccagagacctccaaggcccgccgggacacccagagcaatgagctcattgagatcaatccacagtctgaaggcaaggtctacacccgctgcttctgcctggaggagcctcaaaacagcgaggtggatgcccagctgacgggaagaatcagccagaaggcagaaaggggagcaaaggtccatcaggagacagcagccgatgagtgtccgccctgtgtccatggtgcccgggacagcaatgtcacacttgctccctctggccccaagggagggaaaggtgagcggggcctgcctggtccaccaggctccaagggagagaagggagcacggggcaatgactgtgttcgaatctccccggatgccccgcttcagtgtgcagaaggcccgaagggagagaagggggagtcaggagctctgggaccctcaggactcccaggctcaacaggcgagaagggccagaaaggcgagaagggcgacggaggcatcaagggcgtgccgggaaagccaggccgggacggccggccaggagagatctgtgtcattgggcccaaagggcagaagggagaccctggctttgttgggcctgaggggctggcaggagagcctgggccccccggcctccctggaccccctgggataggactgcctgggaccccgggggatccaggtggcccaccaggccccaagggagacaagggcagctcggggatcccaggaaaggaaggccctggtgggaaacctgggaagccaggtgtgaagggagagaagggtgacccctgtgaagtgtgcccaacactgcctgaagggttccagaactttgttggacttcctggaaagccagggcccaaaggggagcctggtgatcctgtaccagccaggggagaccctggcatccaaggcatcaaaggagagaagggggagccctgcttgtcctgcagctcggttgtaggggcccagcatcttgtgtcctccacaggggccagtggagatgtgggttcccctggctttggtctgcctggccttccgggtagagctggggttccagggctgaaaggagagaagggtaacttcggggaggcagggccagctggcagtccagggccaccaggaccagtggggccagcaggcatcaaaggggcgaagggggagccctgtgagccgtgcccagccctgtccaaccttcaggatggggatgtccgtgtggtggccttgcctggcccatccggagagaagggggaacctgggcctccaggctttggcttgccaggaaaacagggcaaggctggagagcgtggactgaaggggcagaagggtgatgctgggaatcctggagaccctggaacgccgggcaccacagggcggccaggactgtcaggagagcctggagttcagggccccgcggggccaaaaggagaaaagggtgatggctgcactgcctgccccagcctgcaggggacagtgacagacatggcaggacggcctgggcagcccggccccaaaggagagcagggccccgaaggcgtgggccgacctggtaaacccggccaacccggtctaccaggagttcaagggcccccaggactgaagggcgtgcagggagagccagggcctccaggaaggggagtccagggaccccagggggagcctggagccccgggtttgcctggcattcagggacttccgggacctcggggaccacctggccccactggagagaagggtgcccagggatctccaggggtgaaaggagccaccggacccgtgggacctcctggggccagtgtctctgggcctccgggccgtgatgggcagcaaggacagacgggactcagaggaacaccagtgagtacagtgccttggggcagcaggaagggtgagccaggggagtgctcctgcccctctcaaggagacctcatcttctctggcatgccgggtccaccaggtattcccggaccaccaggcccccctggagtacctgggctgcagggagtgcctggaaacaacggtttgccaggacagcctgggctcactgcagaactgggatccttaccaattgaacagcacctccttaagagtatctgcggggactgtgtccaggggcagagggcccacccagggtacctcgtggagaagggagagaagggagaccagggcatccctggtgtgccaggcctcgacaactgcgcccagtgctttttgtcactggagcgcccaagagccgaggaggcccggggtgacaacagtgagggagatcctggctgtgttgggagcccaggcctacctggtcctccgggattgccaggccagagaggagaagagggtccgcctggcatgaggggctccccgggtcctccaggccctatcggccccccaggttttcctggtgctgttggctcccccggattgcctggccttcaaggagagcgaggtctcacgggcctgactggagacaagggggagccgggtcctccagggcaaccaggttacccaggtgccacgggccccccaggactgcctggcatcaagggggagcgtggctacaccgggtcagcgggagagaaaggagagccgggccccccaggatctgaaggcctcccaggccccccaggcccagcgggtcccagaggagagcgaggaccccaaggtaactccggtgagaagggcgaccagggatttcaaggccagccaggctttccgggcccaccgggtccccctggattcccaggcaaagttggatcacctggcccacctggccctcaagcagagaagggcagcgaagggattcgaggcccatcaggcctgcctggctcccctgggccaccgggacctcctgggattcagggccccgccggtctggatggtttggatgggaaggacggcaagcctggcttgaggggggaccctggtcctgctggcccccctggactcatgggaccaccgggctttaaggggaaaacaggacatcctggcctcccaggacctaagggtgactgtggcaaaccaggtccccctggcagcactggccggcctggcgcagagggtgaacctggtgccatgggaccccagggaagacccggtcccccgggacacgttgggccaccagggcctccaggccagccaggaccagctgggatctctgcagtgggtctgaaaggagaccgaggagccaccggagaaaggggccttgcaggcctcccaggccagcccggcccccctggacaccctggccccccaggcgaacctggtacggatggtgcagctggcaaagagggaccccctggaaagcagggattctatggacctcctggtcccaagggtgatccaggagctgcaggacagaagggccaggcaggagagaaggggagagccggcatgcctggtggacctggcaagagtggttccatggggcctgttgggccaccgggccctgcaggagagagaggccaccctggagctccggggccttcggggagccctggcttgcctggtgtgcctggctccatgggagacatggtgaattatgatgaaatcaagaggttcatcagacaagagatcattaaaatgtttgatgagagaatggcttactacacctccaggatgcagttccccatggagatggcggcagctccgggacgaccagggcctccagggaaggatggtgctccgggcaggccaggtgctccagggtcacctgggctccctggtcagattggcagagaaggacggcagggcttgccaggagtaagaggattgcctggtaccaaaggtgaaaaaggggacattggtattggcattgcaggagaaaatggtcttcccggccccccaggtcctcaaggtcctccaggctatggcaagatgggtgcaacaggaccaatgggccagcaaggcatccctggcatccctgggcccccgggtcccatgggccagccaggcaaggctggccactgtaatccctctgactgctttggggccatgccgatggagcagcagtacccacccatgaaaaccatgaaggggccttttggctgaaattccccacctgcctttggatgaaagactccgttgggaataaatggccaaagcttataggactctgtgacaggttgtgaatgttttttttgttgttgttgttgtttttaattgctgttaatattttttaaataataaagaaacaaaactatctgccctttcccttccagtgggttcctctggtgctgcagccagagctccctgttgccctccttttcccgtttagtcccaggaacaaaaaagggcattttgggtacaggggcatatacctgtaatcctagctattcaaggggctgaggtgggaggatcgcctgagcccaggagtttgagaccagtctaagcaacataatgagactcagtctccgaaaaataaaaattaaaaaataaagggtatttccctcctt

SEQ ID NO: 377635 - DNA, 5723 bp, Homo sapiens
ccgcctctcttcccccacccggagtggccggcagtccccggcaggcgtgcgccgggcagcagacagccgggagagctcgagcgccaggaagctggggacccgtgaccgtcacggagagatagagaacccctagcggacctgaggaacctgggctctgcttcctccgcctgctgcctggactgctcagtgaggtggggggatccccggccaccggtgctgtggctgtagctgacctctttggaccgggatgtgggtatcctgggctcctggcctgtggctgctcggtctttgggctaccttcggccatggggcaaatacaggtgcacaatgcccaccttcacagcaggaaggactcaaattggaacacagtagtagcctgccagccaacgtgactggcttcaacctcatccaccgactcagcctcatgaagaagtctgccatcaagaagatccgcaaccccaaggggcctctcatcctgcgcctgggggcggcccccgtgacccagcccacgcgacgagtattccctcggggtctcccggaggagtttgccctggtgctgacactactgctgaagaaacacacccaccagaagacgtggtatctgtttcaagtgaccgatgcaaatgggtatccacagatatccctggaagtcaacagccaagagcggagcctggagctcagggcccagggccaggatggcgactttgtgtcctgcatcttcccagtgccccagctcttcgacttgcgttggcacaagctgatgctgagtgtggctggacgtgtggcctctgtgcacgtggactgcagctcagcctcctcccagcctctggggccccgacgacccatgaggcctgtgggccatgtatttctaggcttggatgctgagcagggcaagcctgtctcgtttgaccttcagcaggtgcacatctactgtgacccggagctcgtgctggaggagggctgctgtgagattttaccagcagggtgccccccagagacctccaaggcccgccgggacacccagagcaatgagctcattgagatcaatccacagtctgaaggcaaggtctacacccgctgcttctgcctggaggagcctcaaaacagcgaggtggatgcccagctgacgggaagaatcagccagaaggcagaaaggggagcaaaggtccatcaggagacagcagccgatgagtgtccgccctgtgtccatggtgcccgggacagcaatgtcacacttgctccctctggccccaagggagggaaaggtgagcggggcctgcctggtccaccaggctccaagggagagaagggagcacggggcaatgactgtgttcgaatctccccggatgccccgcttcagtgtgcagaaggcccgaagggagagaagggggagtcaggagctctgggaccctcaggactcccaggctcaacaggcgagaagggccagaaaggcgagaagggcgacggaggcatcaagggcgtgccgggaaagccaggccgggacggccggccaggagagatctgtgtcattgggcccaaagggcagaagggagaccctggctttgttgggcctgaggggctggcaggagagcctgggccccccggcctccctggaccccctgggataggactgcctgggaccccgggggatccaggtggcccaccaggccccaagggagacaagggcagctcggggatcccaggaaaggaaggccctggtgggaaacctgggaagccaggtgtgaagggagagaagggtgacccctgtgaagtgtgcccaacactgcctgaagggttccagaactttgttggacttcctggaaagccagggcccaaaggggagcctggtgatcctgtaccagccaggggagaccctggcatccaaggcatcaaaggagagaagggggagccctgcttgtcctgcagctcggttgtaggggcccagcatcttgtgtcctccacaggggccagtggagatgtgggttcccctggctttggtctgcctggccttccgggtagagctggggttccagggctgaaaggagagaagggtaacttcggggaggcagggccagctggcagtccagggccaccaggaccagtggggccagcaggcatcaaaggggcgaagggggagccctgtgagccgtgcccagccctgtccaaccttcaggatggggatgtccgtgtggtggccttgcctggcccatccggagagaagggggaacctgggcctccaggctttggcttgccaggaaaacagggcaaggctggagagcgtggactgaaggggcagaagggtgatgctgggaatcctggagaccctggaacgccgggcaccacagggcggccaggactgtcaggagagcctggagttcagggccccgcggggccaaaaggagaaaagggtgatggctgcactgcctgccccagcctgcaggggacagtgacagacatggcaggacggcctgggcagcccggccccaaaggagagcagggccccgaaggcgtgggccgacctggtaaacccggccaacccggtctaccaggagttcaagggcccccaggactgaagggcgtgcagggagagccagggcctccaggaaggggagtccagggaccccagggggagcctggagccccgggtttgcctggcattcagggacttccgggacctcggggaccacctggccccactggagagaagggtgcccagggatctccaggggtgaaaggagccaccggacccgtgggacctcctggggccagtgtctctgggcctccgggccgtgatgggcagcaaggacagacgggactcagaggaacaccagtgagtacagtgccttggggcagcaggaagggtgagccaggggagtgctcctgcccctctcaaggagacctcatcttctctggcatgccgggtccaccaggtattcccggaccaccaggcccccctggagtacctgggctgcagggagtgcctggaaacaacggtttgccaggacagcctgggctcactgcagaactgggatccttaccaattgaacagcacctccttaagagtatctgcggggactgtgtccaggggcagagggcccacccagggtacctcgtggagaagggagagaagggagaccagggcatccctggtgtgccaggcctcgacaactgcgcccagtgctttttgtcactggagcgcccaagagccgaggaggcccggggtgacaacagtgagggagatcctggctgtgttgggagcccaggcctacctggtcctccgggattgccaggccagagaggagaagagggtccgcctggcatgaggggctccccgggtcctccaggccctatcggccccccaggttttcctggtgctgttggctcccccggattgcctggccttcaaggagagcgaggtctcacgggcctgactggagacaagggggagccgggtcctccagggcaaccaggttacccaggtgccacgggccccccaggactgcctggcatcaagggggagcgtggctacaccgggtcagcgggagagaaaggagagccgggccccccaggatctgaaggcctcccaggccccccaggcccagcgggtcccagaggagagcgaggaccccaaggtaactccggtgagaagggcgaccagggatttcaaggccagccaggctttccgggcccaccgggtccccctggattcccaggcaaagttggatcacctggcccacctggccctcaagcagagaagggcagcgaagggattcgaggcccatcaggcctgcctggctcccctgggccaccgggacctcctgggattcagggccccgccggtctggatggtttggatgggaaggacggcaagcctggcttgaggggggaccctggtcctgctggcccccctggactcatgggaccaccgggctttaaggggaaaacaggacatcctggcctcccaggacctaagggtgactgtggcaaaccaggtccccctggcagcactggccggcctggcgcagagggtgaacctggtgccatgggaccccagggaagacccggtcccccgggacacgttgggccaccagggcctccaggccagccaggaccagctgggatctctgcagtgggtctgaaaggagaccgaggagccaccggagaaaggggccttgcaggcctcccaggccagcccggcccccctggacaccctggccccccaggcgaacctggtacggatggtgcagctggcaaagagggaccccctggaaagcagggattctatggacctcctggtcccaaggtgagtgggcactggctgggcttgagaggagaagctcacgagtggatgaagcccagctgcaagttacggctttagccacagagaggagacacaggaaggccagtgggcagggggcaaaaatgcagaacttggagcaggatagtgtctgaaaatttctcacatggggtcattagctgtggttggggggaaggaaatctccagttcatttactcactgattgactgattgattcattcattgtttccatttcccgagcactcccttgctcctgctcacattccaggcccttgtcctggcctcagggtgatccaggagctgcaggacagaagggccaggcaggagagaaggggagagccggcatgcctggtggacctggcaagagtggttccatggggcctgttgggccaccgggccctgcaggagagagaggccaccctggagctccggggccttcggggagccctggcttgcctggtgtgcctggctccatgggagacatggtgaattatgatgaaatcaagaggttcatcagacaagagatcattaaaatgtttgatgagagaatggcttactacacctccaggatgcagttccccatggagatggcggcagctccgggacgaccagggcctccagggaaggatggtgctccgggcaggccaggtgctccagggtcacctgggctccctggtcagattggcagagaaggacggcagggcttgccaggagtaagaggattgcctggtaccaaaggtgaaaaaggggacattggtattggcattgcaggagaaaatggtcttcccggccccccaggtcctcaaggtcctccaggctatggcaagatgggtgcaacaggaccaatgggccagcaaggcatccctggcatccctgggcccccgggtcccatgggccagccaggcaaggctggccactgtaatccctctgactgctttggggccatgccgatggagcagcagtacccacccatgaaaaccatgaaggggccttttggctgaaattccccacctgcctttggatgaaagactccgttgggaataaatggccaaagcttataggactctgtgacaggttgtgaatgttttttttgttgttgttgttgtttttaattgctgttaatattttttaaataataaagaaacaaaactatctgccctttcccttccagtgggttcctctggtgctgcagccagagctccctgttgccctccttttcccgtttagtcccaggaacaaaaaagggcattttgggtacaggggcatatacctgtaatcctagctattcaaggggctgaggtgggaggatcgcctgagcccaggagtttgagaccagtctaagcaacataatgagactcagtctccgaaaaataaaaattaaaaaataaagggtatttccctcctt

SEQ ID NO: 377636 - DNA, 3543 bp, Homo sapiens
aactcagggctgggctagagtgccacctccggtctccatggcaacctcccagggctttccaggagactctagggtgccttttgggcaagctgggctggagcccacccttactggagaccctggcatccaaggcatcaaaggagagaagggggagccctgcttgtcctgcagctcggttgtaggggcccagcatcttgtgtcctccacaggggccagtggagatgtgggttcccctggctttggtctgcctggccttccgggtagagctggggttccagggctgaaaggagagaagggtaacttcggggaggcagggccagctggcagtccagggccaccaggaccagtggggccagcaggcatcaaaggggcgaagggggagccctgtgagccgtgcccagccctgtccaaccttcaggatggggatgtccgtgtggtggccttgcctggcccatccggagagaagggggaacctgggcctccaggctttggcttgccaggaaaacagggcaaggctggagagcgtggactgaaggggcagaagggtgatgctgggaatcctggagaccctggaacgccgggcaccacagggcggccaggactgtcaggagagcctggagttcagggccccgcggggccaaaaggagaaaagggccaacccggtctaccaggagttcaagggcccccaggactgaagggcgtgcagggagagccagggcctccaggaaggggagtccagggaccccagggggagcctggagccccgggtttgcctggcattcagggacttccgggacctcggggaccacctggccccactggagagaagggtgcccagggatctccaggggtgaaaggagccaccggacccgtgggacctcctggggccagtgtctctgggcctccgggccgtgatgggcagcaaggacagacgggactcagaggaacaccagtgagtacagtgccttggggcagcaggaagggtgagccaggggagtgctcctgcccctctcaaggagacctcatcttctctggcatgccgggtccaccaggtattcccggaccaccaggcccccctggagtacctgggctgcagggagtgcctggaaacaacggtttgccaggacagcctgggctcactgcagaactgggatccttaccaattgaacagcacctccttaagagtatctgcggggactgtgtccaggggcagagggcccacccagggtacctcgtggagaagggagagaagggagaccagggcatccctggtgtgccaggcctcgacaactgcgcccagtgctttttgtcactggagcgcccaagagccgaggaggcccggggtgacaacagtgagggagatcctggctgtgttgggagcccaggcctacctggtcctccgggattgccaggccagagaggagaagagggtccgcctggcatgaggggctccccgggtcctccaggccctatcggccccccaggttttcctggtgctgttggctcccccggattgcctggccttcaaggagagcgaggtctcacgggcctgactggagacaagggggagccgggtcctccagggcaaccaggttacccaggtgccacgggccccccaggactgcctggcatcaagggggagcgtggctacaccgggtcagcgggagagaaaggagagccgggccccccaggatctgaaggcctcccaggccccccaggcccagcgggtcccagaggagagcgaggaccccaaggtaactccggtgagaagggcgaccagggatttcaaggccagccaggctttccgggcccaccgggtccccctggattcccaggcaaagttggatcacctggcccacctggccctcaagcagagaagggcagcgaagggattcgaggcccatcaggcctgcctggctcccctgggccaccgggacctcctgggattcagggccccgccggtctggatggtttggatgggaaggacggcaagcctggcttgaggggggaccctggtcctgctggcccccctggactcatgggaccaccgggctttaaggggaaaacaggacatcctggcctcccaggacctaagggtgactgtggcaaaccaggtccccctggcagcactggccggcctggcgcagagggtgaacctggtgccatgggaccccagggaagacccggtcccccgggacacgttgggccaccagggcctccaggccagccaggaccagctgggatctctgcagtgggtctgaaaggagaccgaggagccaccggagaaaggggccttgcaggcctcccaggccagcccggcccccctggacaccctggccccccaggcgaacctggtacggatggtgcagctggcaaagagggaccccctggaaagcagggattctatggacctcctggtcccaagggtgatccaggagctgcaggacagaagggccaggcaggagagaaggggagagccggcatgcctggtggacctggcaagagtggttccatggggcctgttgggccaccgggccctgcaggagagagaggccaccctggagctccggggccttcggggagccctggcttgcctggtgtgcctggctccatgggagacatggtgaattatgatgaaatcaagaggttcatcagacaagagatcattaaaatgtttgatgagagaatggcttactacacctccaggatgcagttccccatggagatggcggcagctccgggacgaccagggcctccagggaaggatggtgctccgggcaggccaggtgctccagggtcacctgggctccctggtcagattggcagagaaggacggcagggcttgccaggagtaagaggattgcctggtaccaaaggtgaaaaaggggacattggtattggcattgcaggagaaaatggtcttcccggccccccaggtcctcaaggtcctccaggctatggcaagatgggtgcaacaggaccaatgggccagcaaggcatccctggcatccctgggcccccgggtcccatgggccagccaggcaaggctggccactgtaatccctctgactgctttggggccatgccgatggagcagcagtacccacccatgaaaaccatgaaggggccttttggctgaaattccccacctgcctttggatgaaagactccgttgggaataaatggccaaagcttataggactctgtgacaggttgtgaatgttttttttgttgttgttgttgtttttaattgctgttaatattttttaaataataaagaaacaaaactatctgccctttcccttccagtgggttcctctggtgctgcagccagagctccctgttgccctccttttcccgtttagtcccaggaacaaaaaagggcattttgggtacaggggcatatacctgtaatcctagctattcaaggggctgaggtgggaggatcgcctgagcccaggagtttgagaccagtctaagcaacataatgagactcagtctccgaaaaataaaaattaaaaaataaagggtatttccctcctt

SEQ ID NO: 377637 - DNA, 3666 bp, Homo sapiens
aactcagggctgggctagagtgccacctccggtctccatggcaacctcccagggctttccaggagactctagggtgccttttgggcaagctgggctggagcccacccttactggagaccctggcatccaaggcatcaaaggagagaagggggagccctgcttgtcctgcagctcggttgtaggggcccagcatcttgtgtcctccacaggggccagtggagatgtgggttcccctggctttggtctgcctggccttccgggtagagctggggttccagggctgaaaggagagaagggtaacttcggggaggcagggccagctggcagtccagggccaccaggaccagtggggccagcaggcatcaaaggggcgaagggggagccctgtgagccgtgcccagccctgtccaaccttcaggatggggatgtccgtgtggtggccttgcctggcccatccggagagaagggggaacctgggcctccaggctttggcttgccaggaaaacagggcaaggctggagagcgtggactgaaggggcagaagggtgatgctgggaatcctggagaccctggaacgccgggcaccacagggcggccaggactgtcaggagagcctggagttcagggccccgcggggccaaaaggagaaaagggtgatggctgcactgcctgccccagcctgcaggggacagtgacagacatggcaggacggcctgggcagcccggccccaaaggagagcagggccccgaaggcgtgggccgacctggtaaacccggccaacccggtctaccaggagttcaagggcccccaggactgaagggcgtgcagggagagccagggcctccaggaaggggagtccagggaccccagggggagcctggagccccgggtttgcctggcattcagggacttccgggacctcggggaccacctggccccactggagagaagggtgcccagggatctccaggggtgaaaggagccaccggacccgtgggacctcctggggccagtgtctctgggcctccgggccgtgatgggcagcaaggacagacgggactcagaggaacaccagtgagtacagtgccttggggcagcaggaagggtgagccaggggagtgctcctgcccctctcaaggagacctcatcttctctggcatgccgggtccaccaggtattcccggaccaccaggcccccctggagtacctgggctgcagggagtgcctggaaacaacggtttgccaggacagcctgggctcactgcagaactgggatccttaccaattgaacagcacctccttaagagtatctgcggggactgtgtccaggggcagagggcccacccagggtacctcgtggagaagggagagaagggagaccagggcatccctggtgtgccaggcctcgacaactgcgcccagtgctttttgtcactggagcgcccaagagccgaggaggcccggggtgacaacagtgagggagatcctggctgtgttgggagcccaggcctacctggtcctccgggattgccaggccagagaggagaagagggtccgcctggcatgaggggctccccgggtcctccaggccctatcggccccccaggttttcctggtgctgttggctcccccggattgcctggccttcaaggagagcgaggtctcacgggcctgactggagacaagggggagccgggtcctccagggcaaccaggttacccaggtgccacgggccccccaggactgcctggcatcaagggggagcgtggctacaccgggtcagcgggagagaaaggagagccgggccccccaggatctgaaggcctcccaggccccccaggcccagcgggtcccagaggagagcgaggaccccaaggtaactccggtgagaagggcgaccagggatttcaaggccagccaggctttccgggcccaccgggtccccctggattcccaggcaaagttggatcacctggcccacctggccctcaagcagagaagggcagcgaagggattcgaggcccatcaggcctgcctggctcccctgggccaccgggacctcctgggattcagggccccgccggtctggatggtttggatgggaaggacggcaagcctggcttgaggggggaccctggtcctgctggcccccctggactcatgggaccaccgggctttaaggggaaaacaggacatcctggcctcccaggacctaagggtgactgtggcaaaccaggtccccctggcagcactggccggcctggcgcagagggtgaacctggtgccatgggaccccagggaagacccggtcccccgggacacgttgggccaccagggcctccaggccagccaggaccagctgggatctctgcagtgggtctgaaaggagaccgaggagccaccggagaaaggggccttgcaggcctcccaggccagcccggcccccctggacaccctggccccccaggcgaacctggtacggatggtgcagctggcaaagagggaccccctggaaagcagggattctatggacctcctggtcccaagggtgatccaggagctgcaggacagaagggccaggcaggagagaaggggagagccggcatgcctggtggacctggcaagagtggttccatggggcctgttgggccaccgggccctgcaggagagagaggccaccctggagctccggggccttcggggagccctggcttgcctggtgtgcctggctccatgggagacatggtgaattatgatgaaatcaagaggttcatcagacaagagatcattaaaatgtttgatgagagaatggcttactacacctccaggatgcagttccccatggagatggcggcagctccgggacgaccagggcctccagggaaggatggtgctccgggcaggccaggtgctccagggtcacctgggctccctggtcagattggcagagaaggacggcagggcttgccaggagtaagaggattgcctggtaccaaaggtgaaaaaggggacattggtattggcattgcaggagaaaatggtcttcccggccccccaggtcctcaaggtcctccaggctatggcaagatgggtgcaacaggaccaatgggccagcaaggcatccctggcatccctgggcccccgggtcccatgggccagccaggcaaggctggccactgtaatccctctgactgctttggggccatgccgatggagcagcagtacccacccatgaaaaccatgaaggggccttttggctgaaattccccacctgcctttggatgaaagactccgttgggaataaatggccaaagcttataggactctgtgacaggttgtgaatgttttttttgttgttgttgttgtttttaattgctgttaatattttttaaataataaagaaacaaaactatctgccctttcccttccagtgggttcctctggtgctgcagccagagctccctgttgccctccttttcccgtttagtcccaggaacaaaaaagggcattttgggtacaggggcatatacctgtaatcctagctattcaaggggctgaggtgggaggatcgcctgagcccaggagtttgagaccagtctaagcaacataatgagactcagtctccgaaaaataaaaattaaaaaataaagggtatttccctcctt

SEQ ID NO: 377638 - DNA, 2211 bp, Homo sapiens
ttaatggcatggcacctgcaaaggctggggtaaggaattaggggtgggggctgtagctctcgtggaaagtgacatgccctctcaccctacaaagtgacagggactgctctggaggcagccttcctgtgtctctcccctgcctccctccaagaaagtgatttttgcttggggtgggggacttggacagggccttcaaggagagcgaggtctcacgggcctgactggagacaagggggagccgggtcctccagggcaaccaggttacccaggtgccacgggccccccaggactgcctggcatcaagggggagcgtggctacaccgggtcagcgggagagaaaggagagccgggccccccaggatctgaaggcctcccaggccccccaggcccagcgggtcccagaggagagcgaggaccccaaggtaactccggtgagaagggcgaccagggatttcaaggccagccaggctttccgggcccaccgggtccccctggattcccaggcaaagttggatcacctggcccacctggccctcaagcagagaagggcagcgaagggattcgaggcccatcaggcctgcctggctcccctgggccaccgggacctcctgggattcagggccccgccggtctggatggtttggatgggaaggacggcaagcctggcttgaggggggaccctggtcctgctggcccccctggactcatgggaccaccgggctttaaggggaaaacaggacatcctggcctcccaggacctaagggtgactgtggcaaaccaggtccccctggcagcactggccggcctggcgcagagggtgaacctggtgccatgggaccccagggaagacccggtcccccgggacacgttgggccaccagggcctccaggccagccaggaccagctgggatctctgcagtgggtctgaaaggagaccgaggagccaccggagaaaggggccttgcaggcctcccaggccagcccggcccccctggacaccctggccccccaggcgaacctggtacggatggtgcagctggcaaagagggaccccctggaaagcagggattctatggacctcctggtcccaagggtgatccaggagctgcaggacagaagggccaggcaggagagaaggggagagccggcatgcctggtggacctggcaagagtggttccatggggcctgttgggccaccgggccctgcaggagagagaggccaccctggagctccggggccttcggggagccctggcttgcctggtgtgcctggctccatgggagacatggtgaattatgatgaaatcaagaggttcatcagacaagagatcattaaaatgtttgatgagagaatggcttactacacctccaggatgcagttccccatggagatggcggcagctccgggacgaccagggcctccagggaaggatggtgctccgggcaggccaggtgctccagggtcacctgggctccctggtcagattggcagagaaggacggcagggcttgccaggagtaagaggattgcctggtaccaaaggtgaaaaaggggacattggtattggcattgcaggagaaaatggtcttcccggccccccaggtcctcaaggtcctccaggctatggcaagatgggtgcaacaggaccaatgggccagcaaggcatccctggcatccctgggcccccgggtcccatgggccagccaggcaaggctggccactgtaatccctctgactgctttggggccatgccgatggagcagcagtacccacccatgaaaaccatgaaggggccttttggctgaaattccccacctgcctttggatgaaagactccgttgggaataaatggccaaagcttataggactctgtgacaggttgtgaatgttttttttgttgttgttgttgtttttaattgctgttaatattttttaaataataaagaaacaaaactatctgccctttcccttccagtgggttcctctggtgctgcagccagagctccctgttgccctccttttcccgtttagtcccaggaacaaaaaagggcattttgggtacaggggcatatacctgtaatcctagctattcaaggggctgaggtgggaggatcgcctgagcccaggagtttgagaccagtctaagcaacataatgagactcagtctccgaaaaataaaaattaaaaaataaagggtatttccctcctt

SEQ ID NO: 377639 - DNA, 2199 bp, Homo sapiens
gggagccgcataaggtgtttgagcaagagagtgacataatcagagctatgctggaggagaagagggcagccatttgctggctggcttgcagtgagccaggaggtggcaggacgagttaggaggctggttcagtagctcgggcaagagcagggaagcctgagcagatcaggcagagggggcagtcccctgtcacatccccctacctcatccttcacctccccaggaggagtgactgattctgttcctttgtatccttagggccccccaggatctgaaggcctcccaggccccccaggcccagcgggtcccagaggagagcgaggaccccaaggtaactccggtgagaagggcgaccagggatttcaaggccagccaggctttccgggcccaccggtgagtgaagaagacacaaagccagctctgtctgatgtggtctcatcgggaggggcaggcctgaccaggccaggctgggggtccccctggattcccaggcaaagttggatcacctggcccacctggccctcaagcagagaagggcagcgaagggattcgaggcccatcaggcctgcctggctcccctgggccaccgggacctcctgggattcagggccccgccggtctggatggtttggatgggaaggacggcaagcctggcttgaggggggaccctggtcctgctggcccccctggactcatgggaccaccgggctttaaggggaaaacaggacatcctggcctcccaggacctaagggtgactgtggcaaaccaggtccccctggcagcactggccggcctggcgcagagggtgaacctggtgccatgggaccccagggaagacccggtcccccgggacacgttgggccaccagggcctccaggccagccaggaccagctgggatctctgcagtgggtctgaaaggagaccgaggagccaccggagaaaggggccttgcaggcctcccaggccagcccggcccccctggacaccctggccccccaggcgaacctggtacggatggtgcagctggcaaagagggaccccctggaaagcagggattctatggacctcctggtcccaagggtgatccaggagctgcaggacagaagggccaggcaggagagaaggggagagccggcatgcctggtggacctggcaagagtggttccatggggcctgttgggccaccgggccctgcaggagagagaggccaccctggagctccggggccttcggggagccctggcttgcctggtgtgcctggctccatgggagacatggtgaattatgatgaaatcaagaggttcatcagacaagagatcattaaaatgtttgatgagagaatggcttactacacctccaggatgcagttccccatggagatggcggcagctccgggacgaccagggcctccagggaaggatggtgctccgggcaggccaggtgctccagggtcacctgggctccctggtcagattggcagagaaggacggcagggcttgccaggagtaagaggattgcctggtaccaaaggtgaaaaaggggacattggtattggcattgcaggagaaaatggtcttcccggccccccaggtcctcaaggtcctccaggctatggcaagatgggtgcaacaggaccaatgggccagcaaggcatccctggcatccctgggcccccgggtcccatgggccagccaggcaaggctggccactgtaatccctctgactgctttggggccatgccgatggagcagcagtacccacccatgaaaaccatgaaggggccttttggctgaaattccccacctgcctttggatgaaagactccgttgggaataaatggccaaagcttataggactctgtgacaggttgtgaatgttttttttgttgttgttgttgtttttaattgctgttaatattttttaaataataaagaaacaaaactatctgccctttcccttccagtgggttcctctggtgctgcagccagagctccctgttgccctccttttcccgtttagtcccaggaacaaaaaagggcattttgggtacaggggcatatacctgtaatcctagctattcaaggggctgaggtgggaggatcgcctgagcccaggagtttgagaccagtctaagcaacataatgagactcagtctccgaaaaataaaaattaaaaaataaagggtatttccctcctt

SEQ ID NO: 377640 - DNA, 1856 bp, Homo sapiens
ttttttttttttaaaccctgtacctggtcaaaaagaaacaacaacaacaacaataataatgataataataaattccaaacaaacatctcctgggtaccaggtctttccaggccccccagtatgccacagactggccctctcattctgacttctcgcctctcttcatctgtgatgggggcgcagccaacatgcttaaacaaggccatgccccagaggacattattttcccttccagctgggcagggaggctgcgctcctttctcacacagagccgggctggacacacctgggggcctcaggctgtggaaggggcctcttcactgcacctgcctccccagggagcctcagagatgctgcccggacttcacctctgacttttgctttcctctagggaccccctggaaagcagggattctatggacctcctggtcccaaggtgagtgggcactggctgggcttgagaggagaagctcacgagtggatgaagcccagctgcaagttacggctttagccacagagaggagacacaggaaggccagtgggcagggggcaaaaatgcagaacttggagcaggatagtgtctgaaaatttctcacatggggtcattagctgtggttggggggaaggaaatctccagttcatttactcactgattgactgattgattcattcattgtttccatttcccgagcactcccttgctcctgctcacattccaggcccttgtcctggcctcagggtgatccaggagctgcaggacagaagggccaggcaggagagaaggggagagccggcatgcctggtggacctggcaagagtggttccatggggcctgttgggccaccgggccctgcaggagagagaggccaccctggagctccggggccttcggggagccctggcttgcctggtgtgcctggctccatgggagacatggtgaattatgatgaaatcaagaggttcatcagacaagagatcattaaaatgtttgatgagagaatggcttactacacctccaggatgcagttccccatggagatggcggcagctccgggacgaccagggcctccagggaaggatggtgctccgggcaggccaggtgctccagggtcacctgggctccctggtcagattggcagagaaggacggcagggcttgccaggagtaagaggattgcctggtaccaaaggtgaaaaaggggacattggtattggcattgcaggagaaaatggtcttcccggccccccaggtcctcaaggtcctccaggctatggcaagatgggtgcaacaggaccaatgggccagcaaggcatccctggcatccctgggcccccgggtcccatgggccagccaggcaaggctggccactgtaatccctctgactgctttggggccatgccgatggagcagcagtacccacccatgaaaaccatgaaggggccttttggctgaaattccccacctgcctttggatgaaagactccgttgggaataaatggccaaagcttataggactctgtgacaggttgtgaatgttttttttgttgttgttgttgtttttaattgctgttaatattttttaaataataaagaaacaaaactatctgccctttcccttccagtgggttcctctggtgctgcagccagagctccctgttgccctccttttcccgtttagtcccaggaacaaaaaagggcattttgggtacaggggcatatacctgtaatcctagctattcaaggggctgaggtgggaggatcgcctgagcccaggagtttgagaccagtctaagcaacataatgagactcagtctccgaaaaataaaaattaaaaaataaagggtatttccctcctt

SEQ ID NO: 377641 - DNA, 4628 bp, Homo sapiens
ccgcctctcttcccccacccggagtggccggcagtccccggcaggcgtgcgccgggcagcagacagccgggagagctcgagcgccaggaagctggggacccgtgaccgtcacggagagatagagaacccctagcggacctgaggaacctgggctctgcttcctccgcctgctgcctggactgctcagtgaggtggggggatccccggccaccggtgctgtggctgtagctgacctctttggaccgggatgtgggtatcctgggctcctggcctgtggctgctcggtctttgggctaccttcggccatggggcaaatacaggtgcacaatgcccaccttcacagcaggaaggactcaaattggaacacagtagtagcctgccagccaacgtgactggcttcaacctcatccaccgactcagcctcatgaagaagtctgccatcaagaagatccgcaaccccaaggggcctctcatcctgcgcctgggggcggcccccgtgacccagcccacgcgacgagtattccctcggggtctcccggaggagtttgccctggtgctgacactactgctgaagaaacacacccaccagaagacgtggtatctgtttcaagtgaccgatgcaaatgggtatccacagatatccctggaagtcaacagccaagagcggagcctggagctcagggcccagggccaggatggcgactttgtgtcctgcatcttcccagtgccccagctcttcgacttgcgttggcacaagctgatgctgagtgtggctggacgtgtggcctctgtgcacgtggactgcagctcagcctcctcccagcctctggggccccgacgacccatgaggcctgtgggccatgtatttctaggcttggatgctgagcagggcaagcctgtctcgtttgaccttcagcaggtgcacatctactgtgacccggagctcgtgctggaggagggctgctgtgagattttaccagcagggtgccccccagagacctccaaggcccgccgggacacccagagcaatgagctcattgagatcaatccacagtctgaaggcaaggtctacacccgctgcttctgcctggaggagcctcaaaacagcgaggtggatgcccagctgacgggaagaatcagccagaaggcagaaaggggagcaaaggtccatcaggagacagcagccgatgagtgtccgccctgtgtccatggtgcccgggacagcaatgtcacacttgctccctctggccccaagggagggaaaggtgagcggggcctgcctggtccaccaggctccaagggagagaagggagcacggggcaatgactgtgttcgaatctccccggatgccccgcttcagtgtgcagaaggcccgaagggagagaagggggagtcaggagctctgggaccctcaggactcccaggctcaacaggcgagaagggccagaaaggcgagaagggcgacggaggcatcaagggcgtgccgggaaagccaggccgggacggccggccaggagagatctgtgtcattgggcccaaagggcagaagggagaccctggctttgttgggcctgaggggctggcaggagagcctgggccccccggcctccctggaccccctgggataggactgcctgggaccccgggggatccaggtggcccaccaggccccaagggagacaagggcagctcggggatcccaggaaaggaaggccctggtgggaaacctgggaagccaggtgtgaagggagagaagggtgacccctgtgaagtgtgcccaacactgcctgaagggttccagaactttgttggacttcctggaaagccagggcccaaaggggagcctggtgatcctgtaccagccaggggagaccctggcatccaaggcatcaaaggagagaagggggagccctgcttgtcctgcagctcggttgtaggggcccagcatcttgtgtcctccacaggggccagtggagatgtgggttcccctggctttggtctgcctggccttccgggtagagctggggttccagggctgaaaggagagaagggtaacttcggggaggcagggccagctggcagtccagggccaccaggaccagtggggccagcaggcatcaaaggggcgaagggggagccctgtgagccgtgcccagccctgtccaaccttcaggatggggatgtccgtgtggtggccttgcctggcccatccggagagaagggggaacctgggcctccaggctttggcttgccaggaaaacagggcaaggctggagagcgtggactgaaggggcagaagggtgatgctgggaatcctggagaccctggaacgccgggcaccacagggcggccaggactgtcaggagagcctggagttcagggccccgcggggccaaaaggagaaaagggtgatggctgcactgcctgccccagcctgcaggggacagtgacagacatggcaggacggcctgggcagcccggccccaaaggagagcagggccccgaaggcgtgggccgacctggtaaacccggccaacccggtctaccaggagttcaagggcccccaggactgaagggcgtgcagggagagccagggcctccaggaaggggagtccagggaccccagggggagcctggagccccgggtttgcctggcattcagggacttccgggacctcggggaccacctggccccactggagagaagggtgcccagggatctccaggggtgaaaggagccaccggacccgtgggacctcctggggccagtgtctctgggcctccgggccgtgatgggcagcaaggacagacgggactcagaggaacaccagtgagtacagtgccttggggcagcaggaagggtgagccaggggagtgctcctgcccctctcaaggagacctcatcttctctggcatgccgggtccaccaggtattcccggaccaccaggcccccctggagtacctgggctgcagggagtgcctggaaacaacggtttgccaggacagcctgggctcactgcagaactgggatccttaccaattgaacagcacctccttaagagtatctgcggggactgtgtccaggggcagagggcccacccagggtacctcgtggagaagggagagaagggagaccagggcatccctggtgtgccaggcctcgacaactgcgcccagtgctttttgtcactggagcgcccaagagccgaggaggcccggggtgacaacagtgagggagatcctggctgtgttgggagcccaggcctacctggtcctccgggattgccaggccagagaggagaagagggtccgcctggcatgaggggctccccgggtcctccaggccctatcggccccccaggttttcctggtgctgttggctcccccggattgcctgtaagaacctagcgctgctcgacctcccctcccccccgtcagccagggccttcaaggagagcgaggtctcacgggcctgactggagacaagggggagccgggtcctccagggcaaccaggttacccaggtgccacgggccccccaggactgcctggcatcaagggggagcgtggctacaccgggtcagcgggagagaaaggagagccgggccccccaggatctgaaggcctcccaggccccccaggcccagcgggtcccagaggagagcgaggaccccaaggtaactccggtgagaagggcgaccagggatttcaaggccagccaggctttccgggcccaccgggtccccctggattcccaggcaaagttggatcacctggcccacctggccctcaagcagagaagggccccgccggtctggatggtttggatgggaaggacggcaagcctggcttgaggggggaccctggtcctgctggcccccctggactcatgggaccaccgggctttaaggggaaaacaggacatcctggcctcccaggacctaagggtgactgtggcaaaccaggtccccctggcagcactggccggcctggcgcagagggtgaacctggtgccatgggaccccagggaagacccggtcccccgggacacgttgggccaccagggcctccaggccagccaggaccagctgggatctctgcagtgggtctgaaaggagaccgaggagccaccggagaaaggggccttgcaggcctcccaggccagcccggcccccctggacaccctggccccccaggcgaacctggtacggatggtgcagctggcaaagagggacccctggaaaggcagggatctatggactcctggtccaaggtgatccaggagctgctggcacgaatggccaggccggaagaaggcgaaagcggaatgcttggtggacctggcaaaactggtccatgtggctgttggtcaccgggcctgccggagaaaacgcacctggactacgggctcgggaacccgtgttcctgcggtgcctggctctggagccctggaactcgagcaaacacaaggcagcgaaagcacatcactgtcgacacgcatcaccacgcgagcggcacagcatgggccgaagcacggcctgaagggccgagcagcatcacgctactccaaaccgagacagagaacagtagagacgacaacaccgaaatgatcacaagctatacagca

SEQ ID NO: 377642 - DNA, 3871 bp, Homo sapiens
ccgcctctcttcccccacccggagtggccggcagtccccggcaggcgtgcgccgggcagcagacagccgggagagctcgagcgccaggaagctggggacccgtgaccgtcacggagagatagagaacccctagcggacctgaggaacctgggctctgcttcctccgcctgctgcctggactgctcagtgaggtggggggatccccggccaccggtgctgtggctgtagctgacctctttggaccgggatgtgggtatcctgggctcctggcctgtggctgctcggtctttgggctaccttcggccatggggcaaatacaggtgcacaatgcccaccttcacagcaggaaggactcaaattggaacacagtagtagcctgccagccaacgtgactggcttcaacctcatccaccgactcagcctcatgaagaagtctgccatcaagaagatccgcaaccccaaggggcctctcatcctgcgcctgggggcggcccccgtgacccagcccacgcgacgagtattccctcggggtctcccggaggagtttgccctggtgctgacactactgctgaagaaacacacccaccagaagacgtggtatctgtttcaagtgaccgatgcaaatgggtatccacagatatccctggaagtcaacagccaagagcggagcctggagctcagggcccagggccaggatggcgactttgtgtcctgcatcttcccagtgccccagctcttcgacttgcgttggcacaagctgatgctgagtgtggctggacgtgtggcctctgtgcacgtggactgcagctcagcctcctcccagcctctggggccccgacgacccatgaggcctgtgggccatgtatttctaggcttggatgctgagcagggcaagcctgtctcgtttgaccttcagcaggtgcacatctactgtgacccggagctcgtgctggaggagggctgctgtgagattttaccagcagggtgccccccagagacctccaaggcccgccgggacacccagagcaatgagctcattgagatcaatccacagtctgaaggcaaggtctacacccgctgcttctgcctggaggagcctcaaaacagcgaggtggatgcccagctgacgggaagaatcagccagaaggcagaaaggggagcaaaggtccatcaggagacagcagccgatgagtgtccgccctgtgtccatggtgcccgggacagcaatgtcacacttgctccctctggccccaagggagggaaaggtgagcggggcctgcctggtccaccaggctccaagggagagaagggagcacggggcaatgactgtgttcgaatctccccggatgccccgcttcagtgtgcagaaggcccgaagggagagaagggggagtcaggagctctgggaccctcaggactcccaggctcaacaggcgagaagggccagaaaggcgagaagggcgacggaggcatcaagggcgtgccgggaaagccaggccgggacggccggccaggagagatctgtgtcattgggcccaaagggcagaagggagaccctggctttgttgggcctgaggggctggcaggagagcctgggccccccggcctccctggaccccctgggataggactgcctgggaccccgggggatccaggtggcccaccaggccccaagggagacaagggcagctcggggatcccaggaaaggaaggccctggtgggaaacctgggaagccaggtgtgaagggagagaagggtgacccctgtgaagtgtgcccaacactgcctgaagggttccagaactttgttggacttcctggaaagccagggcccaaaggggagcctggtgatcctgtaccagccaggggagaccctggcatccaaggcatcaaaggagagaagggggagccctgcttgtcctgcagctcggttgtaggggcccagcatcttgtgtcctccacaggggccagtggagatgtgggttcccctggctttggtctgcctggccttccgggtagagctggggttccagggctgaaaggagagaagggtaacttcggggaggcagggccagctggcagtccagggccaccaggaccagtggggccagcaggcatcaaaggggcgaagggggagccctgtgagccgtgcccagccctgtccaaccttcaggatggggatgtccgtgtggtggccttgcctggcccatccggagagaagggggaacctgggcctccaggctttggcttgccaggaaaacagggcaaggctggagagcgtggactgaaggggcagaagggtgatgctgggaatcctggagaccctggaacgccgggcaccacagggcggccaggactgtcaggagagcctggagttcagggccccgcggggccaaaaggagaaaagggtgatggctgcactgcctgccccagcctgcaggggacagtgacagacatggcaggacggcctgggcagcccggccccaaaggagagcagggccccgaaggcgtgggccgacctggtaaacccggccaacccggtctaccaggagttcaagggcccccaggactgaagggcgtgcagggagagccagggcctccaggaaggggagtccagggaccccagggggagcctggagccccgggtttgcctggcattcagggacttccgggacctcggggaccacctggccccactggagagaagggtgcccagggatctccaggggtgaaaggagccaccggacccgtgggacctcctggggccagtgtctctgggcctccgggccgtgatgggcagcaaggacagacgggactcagaggaacaccagtgagtacagtgccttggggcagcaggaagggtgagccaggggagtgctcctgcccctctcaaggagacctcatcttctctggcatgccgggtccaccaggtattcccggaccaccaggcccccctggagtacctgggctgcagggagtgcctggaaacaacggtttgccaggacagcctgggctcactgcagaactgggatccttaccaattgaacagcacctccttaagagtatctgcggggactgtgtccaggggcagagggcccacccagggtacctcgtggagaagggagagaagggagaccagggcatccctggtgtgccaggcctcgacaactgcgcccagtgctttttgtcactggagcgcccaagagccgaggaggcccggggtgacaacagtgagggagatcctggctgtgttgggagcccaggcctacctggtcctccgggattgccaggccagagaggagaagagggtccgcctggcatgaggggctccccgggtcctccaggccctatcgtaagtatcagtggtgccctggtctgcttgagaagctctcaaaggggtcattacactcagacaccatcccgcggccttgtccccaaaaggctgggcaaggcaggaggagggaacttccactgccctccccatccctccgcagagcatctgcagggactgtgctctcccaccaccggatgccctggaaccgccctgctctgcctactgcctgcggtcctgcttaggggaggtcctcagaggcacctctttgcttccctgtccccaccctctgctgcgctttccacagtggccccaggccgccctcggcagggggcctaggcttcaggctcacagcctcccaaccagggaagcatgcggcatgctggccagacctctccatgcccctgtgactccagtccccacaagggctcggggctaagatggagctgtcctccattgctctgtagggccatctctagggtaaatctacaaaaaccagaccagggtatctactctggagtcctgtgtggcgtgacatgg

SEQ ID NO: 377643 - DNA, 150 bp, Homo sapiens
cctccaagaaagtgatttttgcttggggtgggggacttggacaggtaagtgttgggtatctgatgatatgatacactttggtggcagcatccatctggggtacctctcctgacagttgcccctcagaataagcacacatctgatccatca

SEQ ID NO: 377644 - DNA, 231 bp, Homo sapiens
cctttgccttcctccccatcctttatttccataggggaaaatgccaggcttggaagtataattgaggcaggttttcttctctttcttcagggagacatggtgaattatgatgaaatcaagaggttcatcagacaagagatcattaaaatgtttgatggtaactggcagccagctgggtggcagtgggtgctgtctgcccttccttgtgacttctctgccctgccttggcct

SEQ ID NO: 377645 - DNA, 5466 bp, Homo sapiens
ccgcctctcttcccccacccggagtggccggcagtccccggcaggcgtgcgccgggcagcagacagccgggagagctcgagcgccaggaagctggggacccgtgaccgtcacggagagatagagaacccctagcggacctgaggaacctgggctctgcttcctccgcctgctgcctggactgctcagtgaggtggggggatccccggccaccggtgctgtggctgtagctgacctctttggaccgggatgtgggtatcctgggctcctggcctgtggctgctcggtctttgggctaccttcggccatggggcaaatacaggtgcacaatgcccaccttcacagcaggaaggactcaaattggaacacagtagtagcctgccagccaacgtgactggcttcaacctcatccaccgactcagcctcatgaagaagtctgccatcaagaagatccgcaaccccaaggggcctctcatcctgcgcctgggggcggcccccgtgacccagcccacgcgacgagtattccctcggggtctcccggaggagtttgccctggtgctgacactactgctgaagaaacacacccaccagaagacgtggtatctgtttcaagtgaccgatgcaaatgggtatccacagatatccctggaagtcaacagccaagagcggagcctggagctcagggcccagggccaggatggcgactttgtgtcctgcatcttcccagtgccccagctcttcgacttgcgttggcacaagctgatgctgagtgtggctggacgtgtggcctctgtgcacgtggactgcagctcagcctcctcccagcctctggggccccgacgacccatgaggcctgtgggccatgtatttctaggcttggatgctgagcagggcaagcctgtctcgtttgaccttcagcaggtgcacatctactgtgacccggagctcgtgctggaggagggctgctgtgagattttaccagcagggtgccccccagagacctccaaggcccgccgggacacccagagcaatgagctcattgagatcaatccacagtctgaaggcaaggtctacacccgctgcttctgcctggaggagcctcaaaacagcgaggtggatgcccagctgacgggaagaatcagccagaaggcagaaaggggagcaaaggtccatcaggagacagcagccgatgagtgtccgccctgtgtccatggtgcccgggacagcaatgtcacacttgctccctctggccccaagggagggaaaggtgagcggggcctgcctggtccaccaggctccaagggagagaagggagcacggggcaatgactgtgttcgaatctccccggatgccccgcttcagtgtgcagaaggcccgaagggagagaagggggagtcaggagctctgggaccctcaggactcccaggctcaacaggcgagaagggccagaaaggcgagaagggcgacggaggcatcaagggcgtgccgggaaagccaggccgggacggccggccaggagagatctgtgtcattgggcccaaagggcagaagggagaccctggctttgttgggcctgaggggctggcaggagagcctgggccccccggcctccctggaccccctgggataggactgcctgggaccccgggggatccaggtggcccaccaggccccaagggagacaagggcagctcggggatcccaggaaaggaaggccctggtgggaaacctgggaagccaggtgtgaagggagagaagggtgacccctgtgaagtgtgcccaacactgcctgaagggttccagaactttgttggacttcctggaaagccagggcccaaaggggagcctggtgatcctgtaccagccaggggagaccctggcatccaaggcatcaaaggagagaagggggagccctgcttgtcctgcagctcggttgtaggggcccagcatcttgtgtcctccacaggggccagtggagatgtgggttcccctggctttggtctgcctggccttccgggtagagctggggttccagggctgaaaggagagaagggtaacttcggggaggcagggccagctggcagtccagggccaccaggaccagtggggccagcaggcatcaaaggggcgaagggggagccctgtgagccgtgcccagccctgtccaaccttcaggatggggatgtccgtgtggtggccttgcctggcccatccggagagaagggggaacctgggcctccaggctttggcttgccaggaaaacagggcaaggctggagagcgtggactgaaggggcagaagggtgatgctgggaatcctggagaccctggaacgccgggcaccacagggcggccaggactgtcaggagagcctggagttcagggccccgcggggccaaaaggagaaaagggtgatggctgcactgcctgccccagcctgcaggggacagtgacagacatggcaggacggcctgggcagcccggccccaaaggagagcagggccccgaaggcgtgggccgacctggtaaacccggccaacccggtctaccaggagttcaagggcccccaggactgaagggcgtgcagggagagccagggcctccaggaaggggagtccagggaccccagggggagcctggagccccgggtttgcctggcattcagggacttccgggacctcggggaccacctggccccactggagagaagggtgcccagggatctccaggggtgaaaggagccaccggacccgtgggacctcctggggccagtgtctctgggcctccgggccgtgatgggcagcaaggacagacgggactcagaggaacaccaggtgaaaaaggaccacgaggagagaagggtgagccaggggagtgctcctgcccctctcaaggagacctcatcttctctggcatgccgggtgctccgggactttggatgggcagctcctggcagccgggcccgcagggtccaccaggtattcccggaccaccaggcccccctggagtacctgggctgcagggagtgcctggaaacaacggtttgccaggacagcctgggctcactgcagaactgggatccttaccaattgaacagcacctccttaagagtatctgcggggactgtgtccaggggcagagggcccacccagggtacctcgtggagaagggagagaagggagaccagggcatccctggtgtgccaggcctcgacaactgcgcccagtgctttttgtcactggagcgcccaagagccgaggaggcccggggtgacaacagtgagggagatcctggctgtgttgggagcccaggcctacctggtcctccgggattgccaggccagagaggagaagagggtccgcctggcatgaggggctccccgggtcctccaggccctatcggccccccaggttttcctggtgctgttggctcccccggattgcctggccttcaaggagagcgaggtctcacgggcctgactggagacaagggggagccgggtcctccagggcaaccaggttacccaggtgccacgggccccccaggactgcctggcatcaagggggagcgtggctacaccgggtcagcgggagagaaaggagagccgggccccccaggatctgaaggcctcccaggccccccaggcccagcgggtcccagaggagagcgaggaccccaaggtaactccggtgagaagggcgaccagggatttcaaggccagccaggctttccgggcccaccgggtccccctggattcccaggcaaagttggatcacctggcccacctggccctcaagcagagaagggcagcgaagggattcgaggcccatcaggcctgcctggctcccctgggccaccgggacctcctgggattcagggccccgccggtctggatggtttggatgggaaggacggcaagcctggcttgaggggggaccctggtcctgctggcccccctggactcatgggaccaccgggctttaaggggaaaacaggacatcctggcctcccaggacctaagggtgactgtggcaaaccaggtccccctggcagcactggccggcctggcgcagagggtgaacctggtgccatgggaccccagggaagacccggtcccccgggacacgttgggccaccagggcctccaggccagccaggaccagctgggatctctgcagtgggtctgaaaggagaccgaggagccaccggagaaaggggccttgcaggcctcccaggccagcccggcccccctggacaccctggccccccaggcgaacctggtacggatggtgcagctggcaaagagggaccccctggaaagcagggattctatggacctcctggtcccaagggtgatccaggagctgcaggacagaagggccaggcaggagagaaggggagagccggcatgcctggtggacctggcaagagtggttccatggggcctgttgggccaccgggccctgcaggagagagaggccaccctggagctccggggccttcggggagccctggcttgcctggtgtgcctggctccatgggagacatggtgaattatgatgaaatcaagaggttcatcagacaagagatcattaaaatgtttgatgagagaatggcttactacacctccaggatgcagttccccatggagatggcggcagctccgggacgaccagggcctccagggaaggatggtgctccgggcaggccaggtgctccagggtcacctgggctccctggtcagattggcagagaaggacggcagggcttgccaggagtaagaggattgcctggtaccaaaggtgaaaaaggggacattggtattggcattgcaggagaaaatggtcttcccggccccccaggtcctcaaggtcctccaggctatggcaagatgggtgcaacaggaccaatgggccagcaaggcatccctggcatccctgggcccccgggtcccatgggccagccaggcaaggctggccactgtaatccctctgactgctttggggccatgccgatggagcagcagtacccacccatgaaaaccatgaaggggccttttggctgaaattccccacctgcctttggatgaaagactccgttgggaataaatggccaaagcttataggactctgtgacaggttgtgaatgttttttttgttgttgttgttgtttttaattgctgttaatattttttaaataataaagaaacaaaactatctgccctttcccttccagtgggttcctctggtgctgcagccagagctccctgttgccctccttttcccgtttagtcccaggaacaaaaaagggcattttgggtacaggggcatatacctgtaatcctagctattcaaggggctgaggtgggaggatcgcctgagcccaggagtttgagaccagtctaagcaacataatgagactcagtctccgaaaaataaaaattaaaaaataaagggtatttccctcctt

SEQ ID NO: 377646 - DNA, 1245 bp, Homo sapiens
ctctccctcctctcctgcgttctttctctcctcttctctctcttaccccgttctgtcttccttctccatttctcgcaccatcttgcagcactcccccaagtcctcctgagctcgtgaaccttcctcttaagctggtgcctctagggggcccctccattcctgccttctcgctctgcctcctgcttctcaccaccttcggcgttgcctgaagatttgctgaaagtagttcttggggccctgccaggcacctggctcagagcccagcagagatgccaaagctttagggcttcacattgcaggctggcacaggtttgctgccctgctgcttggcagggctgtccagaggcacccagggatttaaaggcagcccttcctgcgccttttccgtcgtcctagaggaaactctcagctgcctcctcttcgcttcctcttccttggctccagtcccagtctgctccaaggcggggcatgtgatatcagccagttgggtttctgggtgtcgtgcggccctgcccctctgtgcccggcaccttggccggctccttctgccaggtgtcgttaattgctctgccttcgtcatcgtcacagggccttcaaggagagcgaggtctcacgggcctgactggagacaagggggagccgggtcctccagggcaaccaggttacccaggtgccacgggccccccaggactgcctggcatcaagggggagcgtggctacaccgggtcagcgggagagaaaggagagccgggccccccaggatctgaaggcctcccaggccccccaggcccagcgggtcccagaggagagcgaggaccccaaggtaactccggtgagaagggcgaccagggatttcaaggccagccaggctttccgggcccaccgggtccccctggattcccaggcaaagttggatcacctggcccacctggccctcaagcagagaagggcagcgaagggattcgaggcccatcaggcctgcctggctcccctgggccaccgggacctcctgggattcagggccccgccggtctggatggtttggatgggaaggacggcaagcctggcttgaggggggaccctggtcctgctggcccccctggactcatgggaccaccgggctttaaggggaaaacaggacatcctggcctcccaggacctaagggtgactgtggcaaaccaggtccccctggcagcactggccggcctggcgcagaggtgagggccagggatccacatggctgc

SEQ ID NO: 377647 - DNA, 3694 bp, Homo sapiens
aactcagggctgggctagagtgccacctccggtctccatggcaacctcccagggctttccaggagactctagggtgccttttgggcaagctgggctggagcccacccttactgagcacctgggagctgtcagacaaaaagggagaccctggcatccaaggcatcaaaggagagaagggggagccctgcttgtcctgcagctcggttgtaggggcccagcatcttgtgtcctccacaggggccagtggagatgtgggttcccctggctttggtctgcctggccttccgggtagagctggggttccagggctgaaaggagagaagggtaacttcggggaggcagggccagctggcagtccagggccaccaggaccagtggggccagcaggcatcaaaggggcgaagggggagccctgtgagccgtgcccagccctgtccaaccttcaggatggggatgtccgtgtggtggccttgcctggcccatccggagagaagggggaacctgggcctccaggctttggcttgccaggaaaacagggcaaggctggagagcgtggactgaaggggcagaagggtgatgctgggaatcctggagaccctggaacgccgggcaccacagggcggccaggactgtcaggagagcctggagttcagggccccgcggggccaaaaggagaaaagggtgatggctgcactgcctgccccagcctgcaggggacagtgacagacatggcaggacggcctgggcagcccggccccaaaggagagcagggccccgaaggcgtgggccgacctggtaaacccggccaacccggtctaccaggagttcaagggcccccaggactgaagggcgtgcagggagagccagggcctccaggaaggggagtccagggaccccagggggagcctggagccccgggtttgcctggcattcagggacttccgggacctcggggaccacctggccccactggagagaagggtgcccagggatctccaggggtgaaaggagccaccggacccgtgggacctcctggggccagtgtctctgggcctccgggccgtgatgggcagcaaggacagacgggactcagaggaacaccagtgagtacagtgccttggggcagcaggaagggtgagccaggggagtgctcctgcccctctcaaggagacctcatcttctctggcatgccgggtccaccaggtattcccggaccaccaggcccccctggagtacctgggctgcagggagtgcctggaaacaacggtttgccaggacagcctgggctcactgcagaactgggatccttaccaattgaacagcacctccttaagagtatctgcggggactgtgtccaggggcagagggcccacccagggtacctcgtggagaagggagagaagggagaccagggcatccctggtgtgccaggcctcgacaactgcgcccagtgctttttgtcactggagcgcccaagagccgaggaggcccggggtgacaacagtgagggagatcctggctgtgttgggagcccaggcctacctggtcctccgggattgccaggccagagaggagaagagggtccgcctggcatgaggggctccccgggtcctccaggccctatcggccccccaggttttcctggtgctgttggctcccccggattgcctggccttcaaggagagcgaggtctcacgggcctgactggagacaagggggagccgggtcctccagggcaaccaggttacccaggtgccacgggccccccaggactgcctggcatcaagggggagcgtggctacaccgggtcagcgggagagaaaggagagccgggccccccaggatctgaaggcctcccaggccccccaggcccagcgggtcccagaggagagcgaggaccccaaggtaactccggtgagaagggcgaccagggatttcaaggccagccaggctttccgggcccaccgggtccccctggattcccaggcaaagttggatcacctggcccacctggccctcaagcagagaagggcagcgaagggattcgaggcccatcaggcctgcctggctcccctgggccaccgggacctcctgggattcagggccccgccggtctggatggtttggatgggaaggacggcaagcctggcttgaggggggaccctggtcctgctggcccccctggactcatgggaccaccgggctttaaggggaaaacaggacatcctggcctcccaggacctaagggtgactgtggcaaaccaggtccccctggcagcactggccggcctggcgcagagggtgaacctggtgccatgggaccccagggaagacccggtcccccgggacacgttgggccaccagggcctccaggccagccaggaccagctgggatctctgcagtgggtctgaaaggagaccgaggagccaccggagaaaggggccttgcaggcctcccaggccagcccggcccccctggacaccctggccccccaggcgaacctggtacggatggtgcagctggcaaagagggaccccctggaaagcagggattctatggacctcctggtcccaagggtgatccaggagctgcaggacagaagggccaggcaggagagaaggggagagccggcatgcctggtggacctggcaagagtggttccatggggcctgttgggccaccgggccctgcaggagagagaggccaccctggagctccggggccttcggggagccctggcttgcctggtgtgcctggctccatgggagacatggtgaattatgatgaaatcaagaggttcatcagacaagagatcattaaaatgtttgatgagagaatggcttactacacctccaggatgcagttccccatggagatggcggcagctccgggacgaccagggcctccagggaaggatggtgctccgggcaggccaggtgctccagggtcacctgggctccctggtcagattggcagagaaggacggcagggcttgccaggagtaagaggattgcctggtaccaaaggtgaaaaaggggacattggtattggcattgcaggagaaaatggtcttcccggccccccaggtcctcaaggtcctccaggctatggcaagatgggtgcaacaggaccaatgggccagcaaggcatccctggcatccctgggcccccgggtcccatgggccagccaggcaaggctggccactgtaatccctctgactgctttggggccatgccgatggagcagcagtacccacccatgaaaaccatgaaggggccttttggctgaaattccccacctgcctttggatgaaagactccgttgggaataaatggccaaagcttataggactctgtgacaggttgtgaatgttttttttgttgttgttgttgtttttaattgctgttaatattttttaaataataaagaaacaaaactatctgccctttcccttccagtgggttcctctggtgctgcagccagagctccctgttgccctccttttcccgtttagtcccaggaacaaaaaagggcattttgggtacaggggcatatacctgtaatcctagctattcaaggggctgaggtgggaggatcgcctgagcccaggagtttgagaccagtctaagcaacataatgagactcagtctccgaaaaataaaaattaaaaaataaagggtatttccctcctt

SEQ ID NO: 377648 - DNA, 2612 bp, Homo sapiens
ctctccctcctctcctgcgttctttctctcctcttctctctcttaccccgttctgtcttccttctccatttctcgcaccatcttgcagcactcccccaagtcctcctgagctcgtgaaccttcctcttaagctggtgcctctagggggcccctccattcctgccttctcgctctgcctcctgcttctcaccaccttcggcgttgcctgaagatttgctgaaagtagttcttggggccctgccaggcacctggctcagagcccagcagagatgccaaagctttagggcttcacattgcaggctggcacaggtttgctgccctgctgcttggcagggctgtccagaggcacccagggatttaaaggcagcccttcctgcgccttttccgtcgtcctagaggaaactctcagctgcctcctcttcgcttcctcttccttggctccagtcccagtctgctccaaggcggggcatgtgatatcagccagttgggtttctgggtgtcgtgcggccctgcccctctgtgcccggcaccttggccggctccttctgccaggtgtcgttaattgctctgccttcgtcatcgtcacagggccttcaaggagagcgaggtctcacgggcctgactggagacaagggggagccgggtcctccagggcaaccaggttacccaggtgccacgggccccccaggactgcctggcatcaagggggagcgtggctacaccgggtcagcgggagagaaaggagagccgggccccccaggatctgaaggcctcccaggccccccaggcccagcgggtcccagaggagagcgaggaccccaaggtaactccggtgagaagggcgaccagggatttcaaggccagccaggctttccgggcccaccgggtccccctggattcccaggcaaagttggatcacctggcccacctggccctcaagcagagaagggcagcgaagggattcgaggcccatcaggcctgcctggctcccctgggccaccgggacctcctgggattcagggccccgccggtctggatggtttggatgggaaggacggcaagcctggcttgaggggggaccctggtcctgctggcccccctggactcatgggaccaccgggctttaaggggaaaacaggacatcctggcctcccaggacctaagggtgactgtggcaaaccaggtccccctggcagcactggccggcctggcgcagagggtgaacctggtgccatgggaccccagggaagacccggtcccccgggacacgttgggccaccagggcctccaggccagccaggaccagctgggatctctgcagtgggtctgaaaggagaccgaggagccaccggagaaaggggccttgcaggcctcccaggccagcccggcccccctggacaccctggccccccaggcgaacctggtacggatggtgcagctggcaaagagggaccccctggaaagcagggattctatggacctcctggtcccaagggtgatccaggagctgcaggacagaagggccaggcaggagagaaggggagagccggcatgcctggtggacctggcaagagtggttccatggggcctgttgggccaccgggccctgcaggagagagaggccaccctggagctccggggccttcggggagccctggcttgcctggtgtgcctggctccatgggagacatggtgaattatgatgaaatcaagaggttcatcagacaagagatcattaaaatgtttgatgagagaatggcttactacacctccaggatgcagttccccatggagatggcggcagctccgggacgaccagggcctccagggaaggatggtgctccgggcaggccaggtgctccagggtcacctgggctccctggtcagattggcagagaaggacggcagggcttgccaggagtaagaggattgcctggtaccaaaggtgaaaaaggggacattggtattggcattgcaggagaaaatggtcttcccggccccccaggtcctcaaggtcctccaggctatggcaagatgggtgcaacaggaccaatgggccagcaaggcatccctggcatccctgggcccccgggtcccatgggccagccaggcaaggctggccactgtaatccctctgactgctttggggccatgccgatggagcagcagtacccacccatgaaaaccatgaaggggccttttggctgaaattccccacctgcctttggatgaaagactccgttgggaataaatggccaaagcttataggactctgtgacaggttgtgaatgttttttttgttgttgttgttgtttttaattgctgttaatattttttaaataataaagaaacaaaactatctgccctttcccttccagtgggttcctctggtgctgcagccagagctccctgttgccctccttttcccgtttagtcccaggaacaaaaaagggcattttgggtacaggggcatatacctgtaatcctagctattcaaggggctgaggtgggaggatcgcctgagcccaggagtttgagaccagtctaagcaacataatgagactcagtctccgaaaaataaaaattaaaaaataaagggtatttccctcctt

SEQ ID NO: 377649 - DNA, 2692 bp, Homo sapiens
gagaagctggcgttcggagccagcctttccagcctcactcctcgtggcttgtcctcgcagtgggtgcaggttgcaggaacagccgggacagatggtccctctgcgggcccctcgcctccacccacatgcctgtctggaaagtggctttggcttagctgtaccagagcttcttcctggaggaaactcaaagccaattgttgggaagtatctgcggggactgtgtccaggggcagagggcccacccagggtacctcgtggagaagggagagaagggagaccagggcatccctggtgtgccaggcctcgacaactgcgcccagtgctttttgtcactggagcgcccaagagccgaggaggcccggggtgacaacagtgagggagatcctggctgtgttgggagcccaggcctacctggtcctccgggattgccaggccagagaggagaagagggtccgcctggcatgaggggctccccgggtcctccaggccctatcggccccccaggttttcctggtgctgttggctcccccggattgcctgtaagaacctagcgctgctcgacctcccctcccccccgtcagccagggccttcaaggagagcgaggtctcacgggcctgactggagacaagggggagccgggtcctccagggcaaccaggttacccaggtgccacgggccccccaggactgcctggcatcaccggcgaacgtaggtaacaccgggtcagcgggcacagaacgggacaggcccggccccccaggatctgaaggcctcccaggccccccaggcccagcgggtcccagaggagagcgaggaccccaaggtaactccggtgagaagggcgaccagggatttcaaggccagccaggctttccgggcccaccggtgagtgaagaagacacaaagccagctctgtctgatgtggtctcatcgggaggggcaggcctgaccaggccaggctgggggtccccctggattcccaggcaaagttggatcacctggcccacctggccctcaagcagagaagggcagcgaagggattcgaggcccatcaggcctgcctggctcccctgggccaccgggacctcctgggattcagggccccgccggtctggatggtttggatgggaaggacggcaagcctggcttgaggggggaccctggtcctgctggcccccctggactcatgggaccaccgggctttaaggggaaaacaggacatcctggcctcccaggacctaagggtgactgtggcaaaccaggtccccctggcagcactggccggcctggcgcagagggtgaacctggtgccatgggaccccagggaagacccggtcccccgggacacgttgggccaccagggcctccaggccagccaggaccagctgggatctctgcagtgggtctgaaaggagaccgaggagccaccggagaaaggggccttgcaggcctcccaggccagcccggcccccctggacaccctggccccccaggcgaacctggtacggatggtgcagctggcaaagagggaccccctggaaagcagggattctatggacctcctggtcccaagggtgatccaggagctgcaggacagaagggccaggcaggagagaaggggagagccggcatgcctggtggacctggcaagagtggttccatggggcctgttgggccaccgggccctgcaggagagagaggccaccctggagctccggggccttcggggagccctggcttgcctggtgtgcctggctccatgggagacatggtgaattatgatgaaatcaagaggttcatcagacaagagatcattaaaatgtttgatgagagaatggcttactacacctccaggatgcagttccccatggagatggcggcagctccgggacgaccagggcctccagggaaggatggtgctccgggcaggccaggtgctccagggtcacctgggctccctggtcagattggcagagaaggacggcagggcttgccaggagtaagaggattgcctggtaccaaaggtgaaaaaggggacattggtattggcattgcaggagaaaatggtcttcccggccccccaggtcctcaaggtcctccaggctatggcaagatgggtgcaacaggaccaatgggccagcaaggcatccctggcatccctgggcccccgggtcccatgggccagccaggcaaggctggccactgtaatccctctgactgctttggggccatgccgatggagcagcagtacccacccatgaaaaccatgaaggggccttttggctgaaattccccacctgcctttggatgaaagactccgttgggaataaatggccaaagcttataggactctgtgacaggttgtgaatgttttttttgttgttgttgttgtttttaattgctgttaatattttttaaataataaagaaacaaaactatctgccctttcccttccagtgggttcctctggtgctgcagccagagctccctgttgccctccttttcccgtttagtcccaggaacaaaaaagggcattttgggtacaggggcatatacctgtaatcctagctattcaaggggctgaggtgggaggatcgcctgagcccaggagtttgagaccagtctaagcaacataatgagactcagtctccgaaaaataaaaattaaaaaataaagggtatttccctcctt

SEQ ID NO: 377650 - DNA, 2166 bp, Homo sapiens
gggagccgcataaggtgtttgagcaagagagtgacataatcagagctatgctggaggagaagagggcagccatttgctggctggcttgcagtgagccaggaggtggcaggacgagttaggaggctggttcagtagctcgggcaagagcagggaagcctgagcagatcaggcagagggggcctgccagcccaggggcctcccagcacatgccacctctgttctgggcagtcccctgtcacatccccctacctcatccttcacctccccaggaggagtgactgattctgttcctttgtatccttagggccccccaggatctgaaggcctcccaggccccccaggcccagcgggtcccagaggagagcgaggaccccaaggtaactccggtgagaagggcgaccagggatttcaaggccagccaggctttccgggcccaccgggtccccctggattcccaggcaaagttggatcacctggcccacctggccctcaagcagagaagggcagcgaagggattcgaggcccatcaggcctgcctggctcccctgggccaccgggacctcctgggattcagggccccgccggtctggatggtttggatgggaaggacggcaagcctggcttgaggggggaccctggtcctgctggcccccctggactcatgggaccaccgggctttaaggggaaaacaggacatcctggcctcccaggacctaagggtgactgtggcaaaccaggtccccctggcagcactggccggcctggcgcagagggtgaacctggtgccatgggaccccagggaagacccggtcccccgggacacgttgggccaccagggcctccaggccagccaggaccagctgggatctctgcagtgggtctgaaaggagaccgaggagccaccggagaaaggggccttgcaggcctcccaggccagcccggcccccctggacaccctggccccccaggcgaacctggtacggatggtgcagctggcaaagagggaccccctggaaagcagggattctatggacctcctggtcccaagggtgatccaggagctgcaggacagaagggccaggcaggagagaaggggagagccggcatgcctggtggacctggcaagagtggttccatggggcctgttgggccaccgggccctgcaggagagagaggccaccctggagctccggggccttcggggagccctggcttgcctggtgtgcctggctccatgggagacatggtgaattatgatgaaatcaagaggttcatcagacaagagatcattaaaatgtttgatgagagaatggcttactacacctccaggatgcagttccccatggagatggcggcagctccgggacgaccagggcctccagggaaggatggtgctccgggcaggccaggtgctccagggtcacctgggctccctggtcagattggcagagaaggacggcagggcttgccaggagtaagaggattgcctggtaccaaaggtgaaaaaggggacattggtattggcattgcaggagaaaatggtcttcccggccccccaggtcctcaaggtcctccaggctatggcaagatgggtgcaacaggaccaatgggccagcaaggcatccctggcatccctgggcccccgggtcccatgggccagccaggcaaggctggccactgtaatccctctgactgctttggggccatgccgatggagcagcagtacccacccatgaaaaccatgaaggggccttttggctgaaattccccacctgcctttggatgaaagactccgttgggaataaatggccaaagcttataggactctgtgacaggttgtgaatgttttttttgttgttgttgttgtttttaattgctgttaatattttttaaataataaagaaacaaaactatctgccctttcccttccagtgggttcctctggtgctgcagccagagctccctgttgccctccttttcccgtttagtcccaggaacaaaaaagggcattttgggtacaggggcatatacctgtaatcctagctattcaaggggctgaggtgggaggatcgcctgagcccaggagtttgagaccagtctaagcaacataatgagactcagtctccgaaaaataaaaattaaaaaataaagggtatttccctcctt

SEQ ID NO: 377651 - DNA, 1685 bp, Homo sapiens
ctcacaatagaccagtcacacttacactagggattggcaagttttccagaagacatgagacatagcgctgtgggatgagagggaggagcacccaacccagcctggggagtcggagaggctgcagagagaacaggaacacttcagctcaggaggggtgcactggatagagagagatgaggggaagggcattcaggaccataacaacatggcagaatcagagaatcatcaccagtgaggtctggtgggaggcagagggtggggagaggaggctgaggaaggaacgatcaggaccacataatgaatggccttgcatgcccggccaacgaatgagtgctttatcctgaggacatttgggagccatcagaatttctaagcagggagtaacaccaggagaactgtcttctagaaggaccactctggggcagtgaggtggagtgacctgtcaggatgctgtggccacagtctagagggagacgctgggggcctggtgggagggtggagagaaaagagcagattggtgagacatcatgatgtaaatttgacagcactaagtatctatctttgtagggtgatccaggagctgcaggacagaagggccaggcaggagagaaggggagagccggcatgcctggtggacctggcaagagtggttccatggggcctgttgggccaccgggccctgcaggagagagaggccaccctggagctccggggccttcggggagccctggcttgcctggtgtgcctggctccatgggagacatggtgaattatgatgaaatcaagaggttcatcagacaagagatcattaaaatgtttgatgagagaatggcttactacacctccaggatgcagttccccatggagatggcggcagctccgggacgaccagggcctccagggaaggatggtgctccgggcaggccaggtgctccagggtcacctgggctccctggtcagattggcagagaaggacggcagggcttgccaggagtaagaggattgcctggtaccaaaggtgaaaaaggggacattggtattggcattgcaggagaaaatggtcttcccggccccccaggtcctcaaggtcctccaggctatggcaagatgggtgcaacaggaccaatgggccagcaaggcatccctggcatccctgggcccccgggtcccatgggccagccaggcaaggctggccactgtaatccctctgactgctttggggccatgccgatggagcagcagtacccacccatgaaaaccatgaaggggccttttggctgaaattccccacctgcctttggatgaaagactccgttgggaataaatggccaaagcttataggactctgtgacaggttgtgaatgttttttttgttgttgttgttgtttttaattgctgttaatattttttaaataataaagaaacaaaactatctgccctttcccttccagtgggttcctctggtgctgcagccagagctccctgttgccctccttttcccgtttagtcccaggaacaaaaaagggcattttgggtacaggggcatatacctgtaatcctagctattcaaggggctgaggtgggaggatcgcctgagcccaggagtttgagaccagtctaagcaacataatgagactcagtctccgaaaaataaaaattaaaaaataaagggtatttccctcctt

SEQ ID NO: 377652 - DNA, 5349 bp, Homo sapiens
ccgcctctcttcccccacccggagtggccggcagtccccggcaggcgtgcgccgggcagcagacagccgggagagctcgagcgccaggaagctggggacccgtgaccgtcacggagagatagagaacccctagcggacctgaggaacctgggctctgcttcctccgcctgctgcctggactgctcagtgaggtggggggatccccggccaccggtgctgtggctgtagctgacctctttggaccgggatgtgggtatcctgggctcctggcctgtggctgctcggtctttgggctaccttcggccatggggcaaatacaggtgcacaatgcccaccttcacagcaggaaggactcaaattggaacacagtagtagcctgccagccaacgtgactggcttcaacctcatccaccgactcagcctcatgaagaagtctgccatcaagaagatccgcaaccccaaggggcctctcatcctgcgcctgggggcggcccccgtgacccagcccacgcgacgagtattccctcggggtctcccggaggagtttgccctggtgctgacactactgctgaagaaacacacccaccagaagacgtggtatctgtttcaagtgaccgatgcaaatgggtatccacagatatccctggaagtcaacagccaagagcggagcctggagctcagggcccagggccaggatggcgactttgtgtcctgcatcttcccagtgccccagctcttcgacttgcgttggcacaagctgatgctgagtgtggctggacgtgtggcctctgtgcacgtggactgcagctcagcctcctcccagcctctggggccccgacgacccatgaggcctgtgggccatgtatttctaggcttggatgctgagcagggcaagcctgtctcgtttgaccttcagcaggtgcacatctactgtgacccggagctcgtgctggaggagggctgctgtgagattttaccagcagggtgccccccagagacctccaaggcccgccgggacacccagagcaatgagctcattgagatcaatccacagtctgaaggcaaggtctacacccgctgcttctgcctggaggagcctcaaaacagcgaggtggatgcccagctgacgggaagaatcagccagaaggcagaaaggggagcaaaggtccatcaggagacagcagccgatgagtgtccgccctgtgtccatggtgcccgggacagcaatgtcacacttgctccctctggccccaagggagggaaaggtgagcggggcctgcctggtccaccaggctccaagggagagaagggagcacggggcaatgactgtgttcgaatctccccggatgccccgcttcagtgtgcagaaggcccgaagggagagaagggggagtcaggagctctgggaccctcaggactcccaggctcaacaggcgagaagggccagaaaggcgagaagggcgacggaggcatcaagggcgtgccgggaaagccaggccgggacggccggccaggagagatctgtgtcattgggcccaaagggcagaagggagaccctggctttgttgggcctgaggggctggcaggagagcctgggccccccggcctccctggaccccctgggataggactgcctgggaccccgggggatccaggtggcccaccaggccccaagggagacaagggcagctcggggatcccaggaaaggaaggccctggtgggaaacctgggaagccaggtgtgaagggagagaagggtgacccctgtgaagtgtgcccaacactgcctgaagggttccagaactttgttggacttcctggaaagccagggcccaaaggggagcctggtgatcctgtaccagccaggggagaccctggcatccaaggcatcaaaggagagaagggggagccctgcttgtcctgcagctcggttgtaggggcccagcatcttgtgtcctccacaggggccagtggagatgtgggttcccctggctttggtctgcctggccttccgggtagagctggggttccagggctgaaaggagagaagggtaacttcggggaggcagggccagctggcagtccagggccaccaggaccagtggggccagcaggcatcaaaggggcgaagggggagccctgtgagccgtgcccagccctgtccaaccttcaggatggggatgtccgtgtggtggccttgcctggcccatccggagagaagggggaacctgggcctccaggctttggcttgccaggaaaacagggcaaggctggagagcgtggactgaaggggcagaagggtgatgctgggaatcctggagaccctggaacgccgggcaccacagggcggccaggactgtcaggagagcctggagttcagggccccgcggggccaaaaggagaaaagggtgatggctgcactgcctgccccagcctgcaggggacagtgacagacatggcaggacggcctgggcagcccggccccaaaggagagcagggccccgaaggcgtgggccgacctggtaaacccggccaacccggtctaccaggagttcaagggcccccaggactgaagggcgtgcagggagagccagggcctccaggaaggggagtccagggaccccagggggagcctggagccccgggtttgcctggcattcagggacttccgggacctcggggaccacctggccccactggagagaagggtgcccagggatctccaggggtgaaaggagccaccggacccgtgggacctcctggggccagtgtctctgggcctccgggccgtgatgggcagcaaggacagacgggactcagaggaacaccagtgagtacagtgccttggggcagcaggaagggtgagccaggggagtgctcctgcccctctcaaggagacctcatcttctctggcatgccgggtccaccaggtattcccggaccaccaggcccccctggagtacctgggctgcagggagtgcctggaaacaacggtttgccaggacagcctgggctcactgcagaactgggatccttaccaattgaacagcacctccttaagagtatctgcggggactgtgtccaggggcagagggcccacccagggtacctcgtggagaagggagagaagggagaccagggcatccctggtgtgccaggcctcgacaactgcgcccagtgctttttgtcactggagcgcccaagagccgaggaggcccggggtgacaacagtgagggagatcctggctgtgttgggagcccaggcctacctggtcctccgggattgccaggccagagaggagaagagggtccgcctggcatgaggggctccccgggtcctccaggccctatcggccccccaggttttcctggtgctgttggctcccccggattgcctggccttcaaggagagcgaggtctcacgggcctgactggagacaagggggagccgggtcctccagggcaaccaggttacccaggtgccacgggccccccaggactgcctggcatcaagggggagcgtggctacaccgggtcagcgggagagaaaggagagccgggccccccaggatctgaaggcctcccaggccccccaggcccagcgggtcccagaggagagcgaggaccccaaggtaactccggtgagaagggcgaccagggatttcaaggccagccaggctttccgggcccaccgggtccccctggattcccaggcaaagttggatcacctggcccacctggccctcaagcagagaagggcagcgaagggattcgaggcccatcaggcctgcctggctcccctgggccaccgggacctcctgggattcagggccccgccggtctggatggtttggatgggaaggacggcaagcctggcttgaggggggaccctggtcctgctggcccccctggactcatgggaccaccgggctttaaggggaaaacaggacatcctggcctcccaggacctaagggtgactgtggcaaaccaggtccccctggcagcactggccggcctggcgcagagggtgaacctggtgccatgggaccccagggaagacccggtcccccgggacacgttgggccaccagggcctccaggccagccaggaccagctgggatctctgcagtgggtctgaaaggagaccgaggagccaccggagaaaggggccttgcaggcctcccaggccagcccggcccccctggacaccctggccccccaggcgaacctggtacggatggtgcagctggcaaagagggaccccctggaaagcagggattctatggacctcctggtcccaagggtgatccaggagctgcaggacagaagggccaggcaggagagaaggggagagccggcatgcctggtggacctggcaagagtggttccatggggcctgttgggccaccgggccctgcaggagagagaggccaccctggagctccggggccttcggggagccctggcttgcctggtgtgcctggctccatgggagacatggtgaattatgatgaaatcaagaggttcatcagacaagagatcattaaaatgtttgatgagagaatggcttactacacctccaggatgcagttccccatggagatggcggcagctccgggacgaccagggcctccagggaaggatggtgctccgggcaggccaggattgcctggtaccaaaggtgaaaaaggggacattggtattggcattgcaggagaaaatggtcttcccggccccccaggtcctcaaggtcctccaggctatggcaagatgggtgcaacaggaccaatgggccagcaaggcatccctggcatccctgggcccccgggtcccatgggccagccaggcaaggctggccactgtaatccctctgactgctttggggccatgccgatggagcagcagtacccacccatgaaaaccatgaaggggccttttggctgaaattccccacctgcctttggatgaaagactccgttgggaataaatggccaaagcttataggactctgtgacaggttgtgaatgttttttttgttgttgttgttgtttttaattgctgttaatattttttaaataataaagaaacaaaactatctgccctttcccttccagtgggttcctctggtgctgcagccagagctccctgttgccctccttttcccgtttagtcccaggaacaaaaaagggcattttgggtacaggggcatatacctgtaatcctagctattcaaggggctgaggtgggaggatcgcctgagcccaggagtttgagaccagtctaagcaacataatgagactcagtctccgaaaaataaaaattaaaaaataaagggtatttccctcctt

SEQ ID NO: 377653 - DNA, 3833 bp, Homo sapiens
ccgcctctcttcccccacccggagtggccggcagtccccggcaggcgtgcgccgggcagcagacagccgggagagctcgagcgccaggaagctggggacccgtgaccgtcacggagagatagagaacccctagcggacctgaggaacctgggctctgcttcctccgcctgctgcctggactgctcagtgaggtggggggatccccggccaccggtgctgtggctgtagctgacctctttggaccgggatgtgggtatcctgggctcctggcctgtggctgctcggtctttgggctaccttcggccatggggcaaatacaggtgcacaatgcccaccttcacagcaggaaggactcaaattggaacacagtagtagcctgccagccaacgtgactggcttcaacctcatccaccgactcagcctcatgaagaagtctgccatcaagaagatccgcaaccccaaggggcctctcatcctgcgcctgggggcggcccccgtgacccagcccacgcgacgagtattccctcggggtctcccggaggagtttgccctggtgctgacactactgctgaagaaacacacccaccagaagacgtggtatctgtttcaagtgaccgatgcaaatgggtatccacagatatccctggaagtcaacagccaagagcggagcctggagctcagggcccagggccaggatggcgactttgtgtcctgcatcttcccagtgccccagctcttcgacttgcgttggcacaagctgatgctgagtgtggctggacgtgtggcctctgtgcacgtggactgcagctcagcctcctcccagcctctggggccccgacgacccatgaggcctgtgggccatgtatttctaggcttggatgctgagcagggcaagcctgtctcgtttgaccttcagcaggtgcacatctactgtgacccggagctcgtgctggaggagggctgctgtgagattttaccagcagggtgccccccagagacctccaaggcccgccgggacacccagagcaatgagctcattgagatcaatccacagtctgaaggcaaggtctacacccgctgcttctgcctggaggagcctcaaaacagcgaggtggatgcccagctgacgggaagaatcagccagaaggcagaaaggggagcaaaggtccatcaggagacagcagccgatgagtgtccgccctgtgtccatggtgcccgggacagcaatgtcacacttgctccctctggccccaagggagggaaaggtgagcggggcctgcctggtccaccaggctccaagggagagaagggagcacggggcaatgactgtgttcgaatctccccggatgccccgcttcagtgtgcagaaggcccgaagggagagaagggggagtcaggagctctgggaccctcaggactcccaggctcaacaggcgagaagggccagaaaggcgagaagggcgacggaggcatcaagggcgtgccgggaaagccaggccgggacggccggccaggagagatctgtgtcattgggcccaaagggcagaagggagaccctggctttgttgggcctgaggggctggcaggagagcctgggccccccggcctccctggaccccctgggataggactgcctgggaccccgggggatccaggtggcccaccaggccccaagggagacaagggcagctcggggatcccaggaaaggaaggccctggtgggaaacctgggaagccaggtgtgaagggagagaagggtgacccctgtgaagtgtgcccaacactgcctgaagggttccagaactttgttggacttcctggaaagccagggcccaaaggggagcctggtgatcctgtaccagccaggggagaccctggcatccaaggcatcaaaggagagaagggggagccctgcttgtcctgcagctcggttgtaggggcccagcatcttgtgtcctccacaggggccagtggagatgtgggttcccctggctttggtctgcctggccttccgggtagagctggggttccagggctgaaaggagagaagggtaacttcggggaggcagggccagctggcagtccagggccaccaggaccagtggggccagcaggcatcaaaggggcgaagggggagccctgtgagccgtgcccagccctgtccaaccttcaggatggggatgtccgtgtggtggccttgcctggcccatccggagagaagggggaacctgggcctccaggctttggcttgccaggaaaacagggcaaggctggagagcgtggactgaaggggcagaagggtgatgctgggaatcctggagaccctggaacgccgggcaccacagggcggccaggactgtcaggagagcctggagttcagggccccgcggggccaaaaggagaaaagggtgatggctgcactgcctgccccagcctgcaggggacagtgacagacatggcaggacggcctgggcagcccggccccaaaggagagcagggccccgaaggcgtgggccgacctggtaaacccggccaacccggtctaccaggagttcaagggcccccaggactgaagggcgtgcagggagagccagggcctccaggaaggggagtccagggaccccagggggagcctggagccccgggtttgcctggcattcagggacttccgggacctcggggaccacctggccccactggagagaagggtgcccagggatctccaggggtgaaaggagccaccggacccgtgggacctcctggggccagtgtctctgggcctccgggccgtgatgggcagcaaggacagacgggactcagaggaacaccagtgagtacagtgccttggggcagcaggaagggtgagccaggggagtgctcctgcccctctcaaggagacctcatcttctctggcatgccgggtccaccaggtattcccggaccaccaggcccccctggagtacctgggctgcagggagtgcctggaaacaacggtttgccaggacagcctgggctcactgcagaactgggatccttaccaattgaacagcacctccttaagagtatctgcggggactgtgtccaggggcagagggcccacccagggtacctcgtggagaagggagagaagggagaccagggcatccctggtgtgccaggcctcgacaactgcgcccagtgctttttgtcactggagcgcccaagagccgaggaggcccggggtgacaacagtgagggagatcctggctgtgttgggagcccaggcctacctggtcctccgggattgccaggccagagaggagaagagggtccgcctggcatgaggggctccccgggtcctccaggccctatcggccccccaggttttcctggtgctgttggctcccccggattgcctggccttcaaggagagcgaggtctcacgggcctgactggagacaagggggagccgggtcctccagggcaaccaggttacccaggtgccacgggccccccaggactgcctggcatcaagggggagcgtggctacaccgggtcagcgggagagaaaggagagccgggccccccaggatctgaaggcctcccaggccccccaggcccagcgggtcccagaggagagcgaggaccccaaggtaactccggtgagaagggcgaccagggatttcaaggcagccaggctttccgggccacgggtcccatggatacccaggcaacagtggatcacctggccacctggctcagcagagagggcaggaagggatcgaagccatcaggctgcgtggtccctggggcacggactctggatagaggcccgcggcgaggtggttggaagt

SEQ ID NO: 377654 - DNA, 641 bp, Homo sapiens
tctgattttccctctgtggcccttccctccctaggtcctcaaggtcctccaggctatggcaagatgggtgcaacaggaccaatgggccagcaaggcatccctggcatccctgggcccccgggtcccatgggccagccaggcaaggctggccactgtaatccctctgactgctttggggccatgccgatggagcagcagtacccacccatgaaaaccatgaaggggccttttggctgaaattccccacctgcctttggatgaaagactccgttgggaataaatggccaaagcttataggactctgtgacaggttgtgaatgttttttttgttgttgttgttgtttttaattgctgttaatattttttaaataataaagaaacaaaactatctgccctttcccttccagtgggttcctctggtgctgcagccagagctccctgttgccctccttttcccgtttagtcccaggaacaaaaaagggcattttgggtacaggggcatatacctgtaatcctagctattcaaggggctgaggtgggaggatcgcctgagcccaggagtttgagaccagtctaagcaacataatgagactcagtctccgaaaaataaaaattaaaaaataaagggtatttccctcctt

SEQ ID NO: 377655 - DNA, 1442 bp, Homo sapiens
  misc_feature (1121)..(1121): n is a, c, g, or t
cctgctgaccagttctagtgaggccttgtccacgttccaaggacccctccgtgtcagtgaaccgataaagggagtgatcgggctctgcatgcgggggtgctgcgtgtgggggtcccagtcgaccgagaaccccacagacttgtcgcgccctcggcgtgctgccatttaatctcttcttgttttctttccacacaggattccgttggtgaacctgtaaaaacaaaacaaacaaaacaaaacaaaaaagacaaaacctaaaactgagctatctaagggggagggtccccgcacctaccacttctgtttgccggtgggaaactcacagagcaggacgctctaggccaaatctatttttgtaaaaatgctcatgcctatgggtgactgccttctcccagagttttctttggagaacagaaagaagaaaggaaagaaaggaaccagaggcagagagacgaggatacccagcgaaagggacgggaggaagcatccgaaacctaggattcgtcctacgattctgaacctgtgccaataataccattatgtgccatgtactgacccgaaaggctcggccgcagagccggggcccagcgaatcacgcagagaaatcttacagaaaacaggggtgggaatctcttccgatagagtcgctatttctggttaatatacatatataaatatataaatacaaacacacacacacactttttttgtactgtagcaatttttgaagatcttaaatgttcctttttaaaaaaaagaattgtgttataggttacaaaatctgatttatttaacatgcttagtatgagcagaataaaccagtgttttctactttggcaactcacgtcacacacatattacacacatgtgcgcatacacacacacaatacacatacatgcatatagacgcatctattggaaatgcagttccacaggtgagcatgttctttctggtgacctggtattccatcaccattcaccccaggggacagcctcgaccgagacaaggaggcccttaaatgacagcctgcatttgctagacggttggtgagtggcatcaaatgtgtgacttactatcttgggccagaactaagaatgccaaggttttatatatgtgtgtntatatatatatatatatatatatatatatatatatatatgtttgtgtgtgtatatatatatatatatatatatgtttgtgtgtgtatatatatgtttgtgtatatatatacacatatgcatacatatgattttttttttttcatttaagtgttggaagatgctacctaacagccacgttcacatttacgtagctggttgcttacaaacgggcctgagcccctggttgggtgggtggtggattcttggacgtgtgtgtcatacaagcatagactggattaaagaagttttccagttccaaaaattaaaggaatatatcctta

SEQ ID NO: 377656 - DNA, 2545 bp, Homo sapiens
  misc_feature (2224)..(2224): n is a, c, g, or t
tttccctgagtacgatccagaggaggccagaactccatgtccatccgctggccgggccgccccctcggaagccatgcctggatactgatagccatgtttcagctcgccgtggacctgcccgcctgtgaggccctgggcccggggccggagttctggctcctgccgcggtcgccgccccggccgccccggctgtggagttttaggagtggacagccagcgcgggtcccggccccggtgtggagcccccggccgccccgagtggagcggatccacgggcagatgcagatgcctcgagccagacgggcccacaggccccgggaccaggcggccgccctcgtgcccaaggcaggactggccaagcccccagctgctgccaaatccagcccttccctcgcctcttcgtcctcgtcctcgtcctccgcggtggccggtggggccccggagcagcaggccctcctgaggaggggcaagaggcacctgcagggggacggtctcagcagcttcgactccagaggcagccggcccaccacagagactgagttcatcgcctgggggcccacgggggacgaggaggccctggagtccaacacatttccgggcgtttacggccccaccacggtctccatcctacaaacacggaagacaactgtggccgccaccaccaccaccaccaccacggccacccccatgacgctgcagactaaggggttcaccgagtccttggatccccggagaaggatcccaggtggggttagcacaacggagccttccaccagtcccagcaacaacggggaagtcacccagcccccaaggattctgggggaggcctcaggtctggctgtccatcagatcatcaccatcaccgtctccctcatcatggtcatagctgctctcatcacaactcttgtcttaaaaaattgctgtgcccaaagcgggaacactcgtcggaacagccaccagcggaagaccaaccagcaggaggagagctgccagaacctcacggacttcccctcggcccgggtgcccagcagcctggacatattcacggcctataacgagaccctgcagtgttctcacgagtgcgtcagggcatctgtgcccgtgtacaccgatgagacgctgcactcgacgacgggggagtacaaatccacatttaatggaaaccgaccctcctcttctgatcggcatcttattcctgtggccttcgtgtctgagaaatggtttgaaatctcctgctgactggccgaagtcttttttacctcctgggggcagggcagacgccgtgtgtctgtttcacggattccgttggtgaacctgtaaaaacaaaacaaacaaaacaaaacaaaaaagacaaaacctaaaactgagctatctaagggggagggtccccgcacctaccacttctgtttgccggtgggaaactcacagagcaggacgctctaggccaaatctatttttgtaaaaatgctcatgcctatgggtgactgccttctcccagagttttctttggagaacagaaagaagaaaggaaagaaaggaaccagaggcagagagacgaggatacccagcgaaagggacgggaggaagcatccgaaacctaggattcgtcctacgattctgaacctgtgccaataataccattatgtgccatgtactgacccgaaaggctcggccgcagagccggggcccagcgaatcacgcagagaaatcttacagaaaacaggggtgggaatctcttccgatagagtcgctatttctggttaatatacatatataaatatataaatacaaacacacacacacactttttttgtactgtagcaatttttgaagatcttaaatgttcctttttaaaaaaaagaattgtgttataggttacaaaatctgatttatttaacatgcttagtatgagcagaataaaccagtgttttctactttggcaactcacgtcacacacatattacacacatgtgcgcatacacacacacaatacacatacatgcatatagacgcatctattggaaatgcagttccacaggtgagcatgttctttctggtgacctggtattccatcaccattcaccccaggggacagcctcgaccgagacaaggaggcccttaaatgacagcctgcatttgctagacggttggtgagtggcatcaaatgtgtgacttactatcttgggccagaactaagaatgccaaggttttatatatgtgtgtntatatatatatatatatatatatatatatatatatatatgtttgtgtgtgtatatatatatatatatatatatgtttgtgtgtgtatatatatgtttgtgtatatatatacacatatgcatacatatgattttttttttttcatttaagtgttggaagatgctacctaacagccacgttcacatttacgtagctggttgcttacaaacgggcctgagcccctggttgggtgggtggtggattcttggacgtgtgtgtcatacaagcatagactggattaaagaagttttccagttccaaaaattaaaggaatatatcctta

SEQ ID NO: 377657 - DNA, 2386 bp, Homo sapiens
cacgccccgcgctccacggcgccctcgccccgcgcgcctctcgtgcccgcctcctgccagtctccgggccgcggccgtctgcagagcgagcgctcagacggagcccccgggcaacttgagtggcgccgatcggcggcggagcctctggcagagccccccgacccggcagcgcggaggggactcgcgtccgtccgcgtcgcgtcaccccaaaccctaagcagcgccgccccatcggcgcggagctccggctggaggcaagagccgcgcgccgggagacacgcaccgtgagcggcagcgccgccggcctccctcctcgccgccccggaggcgaagccgcggctccccagccctttgctgcgccgcgacagcgccggaacacgccccgcctcgctgccgccttcgctgtgccgccggcggagggggccgcgagccccgcgccccggccggaggatgtgcgcccccgcgggccgcccagcctgagccatgcgccccaacggcggcggcgcgccggccggcatggagccccgcgcggccgcgctctgactcgctgtgcgccccgcggccggcgggcggcgggaggcggcggaccgagagccggagaccggcgccgcgggacggaagcgagcgggcgcgggcgccgcgcagatggcctgggcgagccaggtctgaggccccgctccccgaaacgtgaccatgtggattcaacagcttttaggactcagctccatgtccatccgctggccgggccgccccctcggaagccatgcctggatactgatagccatgtttcagctcgccgtggacctgcccgcctgtgaggccctgggcccggggccggagttctggctcctgccgcggtcgccgccccggccgccccggctgtggagttttaggagtggacagccagcgcgggtcccggccccggtgtggagcccccggccgccccgagtggagcggatccacgggcagatgcagatgcctcgagccagacgggcccacaggccccgggaccaggcggccgccctcgtgcccaaggcaggactggccaagcccccagctgctgccaaatccagcccttccctcgcctcttcgtcctcgtcctcgtcctccgcggtggccggtggggccccggagcagcaggccctcctgaggaggggcaagaggcacctgcagggggacggtctcagcagcttcgactccagaggcagccggcccaccacagagactgagttcatcgcctgggggcccacgggggacgaggaggccctggagtccaacacatttccgggcgtttacggccccaccacggtctccatcctacaaacacggaagacaactgtggccgccaccaccaccaccaccaccacggccacccccatgacgctgcagactaaggggttcaccgagtccttggatccccggagaaggatcccaggtggggttagcacaacggagccttccaccagtcccagcaacaacggggaagtcacccagcccccaaggattctgggggaggcctcaggtctggctgtccatcagatcatcaccatcaccgtctccctcatcatggtcatagctgctctcatcacaactcttgtcttaaaaaattgctgtgcccaaagcgggaacactcgtcggaacagccaccagcggaagaccaaccagcaggaggagagctgccagaacctcacggacttcccctcggcccgggtgcccagcagcctggacatattcacggcctataacgagaccctgcagtgttctcacgagtgcgtcagggcatctgtgcccgtgtacaccgatgagacgctgcactcgacgacgggggagtacaaatccacatttaatggaaaccgaccctcctcttctgatcggcatcttattcctgtggccttcgtgtctgagaaatggtttgaaatctcctgctgactggccgaagtcttttttacctcctgggggcagggcagacgccgtgtgtctgtttcacggcggttgtccggaatgccagtggctcctgggcagatgtgcaccccagattcagcctttgtgatagattccaacacgttctggcctcagaccacctttgtggtggggccagactgctctgggcaaagtgaagctggcctttatgctccaaggaagggggcctcgagagcaggcctgcattggctctcggactaattcgcgatcatctttcatacagcaggtacacttcagcaaacctcgttaatgttgatctctttccctttgccaaggccgcttcgttctgaacggagcctgcaaagtcataaaagctcttgaatccgaagcaagtgagaaataaatcatgcactattattattttcaaaaacacattgatcactaataaaaaataagaagtgtacct

SEQ ID NO: 377658 - DNA, 3235 bp, Homo sapiens
  misc_feature (2914)..(2914): n is a, c, g, or t
cacgccccgcgctccacggcgccctcgccccgcgcgcctctcgtgcccgcctcctgccagtctccgggccgcggccgtctgcagagcgagcgctcagacggagcccccgggcaacttgagtggcgccgatcggcggcggagcctctggcagagccccccgacccggcagcgcggaggggactcgcgtccgtccgcgtcgcgtcaccccaaaccctaagcagcgccgccccatcggcgcggagctccggctggaggcaagagccgcgcgccgggagacacgcaccgtgagcggcagcgccgccggcctccctcctcgccgccccggaggcgaagccgcggctccccagccctttgctgcgccgcgacagcgccggaacacgccccgcctcgctgccgccttcgctgtgccgccggcggagggggccgcgagccccgcgccccggccggaggatgtgcgcccccgcgggccgcccagcctgagccatgcgccccaacggcggcggcgcgccggccggcatggagccccgcgcggccgcgctctgactcgctgtgcgccccgcggccggcgggcggcgggaggcggcggaccgagagccggagaccggcgccgcgggacggaagcgagcgggcgcgggcgccgcgcagatggcctgggcgagccaggtctgaggccccgctccccgaaacgtgaccatgtggattcaacagcttttaggactcagctccatgtccatccgctggccgggccgccccctcggaagccatgcctggatactgatagccatgtttcagctcgccgtggacctgcccgcctgtgaggccctgggcccggggccggagttctggctcctgccgcggtcgccgccccggccgccccggctgtggagttttaggagtggacagccagcgcgggtcccggccccggtgtggagcccccggccgccccgagtggagcggatccacgggcagatgcagatgcctcgagccagacgggcccacaggccccgggaccaggcggccgccctcgtgcccaaggcaggactggccaagcccccagctgctgccaaatccagcccttccctcgcctcttcgtcctcgtcctcgtcctccgcggtggccggtggggccccggagcagcaggccctcctgaggaggggcaagaggcacctgcagggggacggtctcagcagcttcgactccagaggcagccggcccaccacagagactgagttcatcgcctgggggcccacgggggacgaggaggccctggagtccaacacatttccgggcgtttacggccccaccacggtctccatcctacaaacacggaagacaactgtggccgccaccaccaccaccaccaccacggccacccccatgacgctgcagactaaggggttcaccgagtccttggatccccggagaaggatcccaggtggggttagcacaacggagccttccaccagtcccagcaacaacggggaagtcacccagcccccaaggattctgggggaggcctcaggtctggctgtccatcagatcatcaccatcaccgtctccctcatcatggtcatagctgctctcatcacaactcttgtcttaaaaaattgctgtgcccaaagcgggaacactcgtcggaacagccaccagcggaagaccaaccagcaggaggagagctgccagaacctcacggacttcccctcggcccgggtgcccagcagcctggacatattcacggcctataacgagaccctgcagtgttctcacgagtgcgtcagggcatctgtgcccgtgtacaccgatgagacgctgcactcgacgacgggggagtacaaatccacatttaatggaaaccgaccctcctcttctgatcggcatcttattcctgtggccttcgtgtctgagaaatggtttgaaatctcctgctgactggccgaagtcttttttacctcctgggggcagggcagacgccgtgtgtctgtttcacggattccgttggtgaacctgtaaaaacaaaacaaacaaaacaaaacaaaaaagacaaaacctaaaactgagctatctaagggggagggtccccgcacctaccacttctgtttgccggtgggaaactcacagagcaggacgctctaggccaaatctatttttgtaaaaatgctcatgcctatgggtgactgccttctcccagagttttctttggagaacagaaagaagaaaggaaagaaaggaaccagaggcagagagacgaggatacccagcgaaagggacgggaggaagcatccgaaacctaggattcgtcctacgattctgaacctgtgccaataataccattatgtgccatgtactgacccgaaaggctcggccgcagagccggggcccagcgaatcacgcagagaaatcttacagaaaacaggggtgggaatctcttccgatagagtcgctatttctggttaatatacatatataaatatataaatacaaacacacacacacactttttttgtactgtagcaatttttgaagatcttaaatgttcctttttaaaaaaaagaattgtgttataggttacaaaatctgatttatttaacatgcttagtatgagcagaataaaccagtgttttctactttggcaactcacgtcacacacatattacacacatgtgcgcatacacacacacaatacacatacatgcatatagacgcatctattggaaatgcagttccacaggtgagcatgttctttctggtgacctggtattccatcaccattcaccccaggggacagcctcgaccgagacaaggaggcccttaaatgacagcctgcatttgctagacggttggtgagtggcatcaaatgtgtgacttactatcttgggccagaactaagaatgccaaggttttatatatgtgtgtntatatatatatatatatatatatatatatatatatatatgtttgtgtgtgtatatatatatatatatatatatgtttgtgtgtgtatatatatgtttgtgtatatatatacacatatgcatacatatgattttttttttttcatttaagtgttggaagatgctacctaacagccacgttcacatttacgtagctggttgcttacaaacgggcctgagcccctggttgggtgggtggtggattcttggacgtgtgtgtcatacaagcatagactggattaaagaagttttccagttccaaaaattaaaggaatatatcctta

SEQ ID NO: 377659 - DNA, 545 bp, Homo sapiens
aagcatgaagtgcctaacccagcttagcggtgtagaggtggggtcagcaaataagggagatcttcctggagaaggcatatacctaagctgatttaggagagaccacttttggctaggtttattgtactacttgattttcaagtaattgggcttatttattctagagaaaaagtcttcagtctcttgcttctgcctgcaaagcaaggcagagtcagcaacatgggcagtctccccactggagaacgctgagtcatgcatgggcttctccaagtttccatcagatgggatccagtgttgaatccagtgcaggactggagtctagctggcaaagggtaaatgcccccaaagccttcctgccatatggtttccacgaaggcctgagagtcagctgtacaactgtcttgtcttggccatgtccctgtttggtccctgccttgttctcttccctttctcaatttccaagctccacccactcctaaaaacaccagtcattctgaagtaaaaaatggacaataaacatgaatattcaagattcaaaaacactt

SEQ ID NO: 377660 - DNA, 1412 bp, Homo sapiens
  misc_feature (21)..(21): n is a, c, g, or t
  misc_feature (411)..(411): n is a, c, g, or t
tcaacgctttatacttcaaantataaatataggtaggttaaaataaaaagaatagaaaaagataaattatgcaaagataaaagaaagcaagggtgttttacttcaaataaagcatatttcagagcaaataaaattatcagagatagagtaggacgtgacataataattaaagcatcaatccactaagacacagcaatcctaaatgtccatgtaccagacaacggaactacaaaatacatgaagcacaaaccaatagaactaaagacaaacccacaatgagataccatttcacaccagttagaatggcgatcattaaaaagtcaggaaacgaaagatgctggggaggatgtggagaaacaggaacgctttcacactgctggtgagtatgtaaattaggaagtataaagcgtngagctcaacgctttatacttcgaagaagtgacaggtagaatttgtagattttagtacaaactccattctgaaccattaaaacttagaaactttggaggaaacattaggaagcttgactgtcccataatttctgtggttgttttgctcatacagatatattagcatctagaattcttatgtcctgttgttcactcttagatatttaatacaagatgcatttcatttgaaattttactgtttggatgcttggatgggtcatttaactttgttctgtttcttatgagtgggactgggagagaaggttgggtggctagctcagaatactaaagattacttggagtgcagatgctatcatgtggatcatttgttcaattcagtggagtattggtcatatctgtgtgtcccagtgcaagatcaatcagacatggaacctgttcttagagaccttgcagtctgctagataagacatgtatatatgtatatgtgttggaatgggtgggttgggcagagtaggagacttgagaaagtgatgactaggaacaaggtgagccaacgttgtgcctaacacagtaagcctgggaagtatttattgtgattcagtgggtaacattaaattgataacatttggatatgcaaaaatgaagtgaaggagaggctggaatttttagttgaaggaaggaaaagcacagaggcagaagaatttgagggccatatagtccagaaatgataacggagatgcaggttggaggtatatcctaaagtgctctgaattccaggctgagaagtttcttcaaaagttttcaagctgggaagtaatataattagagaaatgttttaggaaaatgaacctttcagaagtttttaagctctggacttggccagagggtggggaaagtcaatggagaaaaggatgagttaacacaatgaagatcaacatgtctttcacaggggaagaccacaaaacccctctgtagttgcatagtgtgctgacattttttatt

SEQ ID NO: 377661 - DNA, 393 bp, Homo sapiens
gtgtgcttgtgattgccccgcccttctaggatctgagtgatgagacgtgtccccactgaggtgccccacagcagcaggtgttgagcatgggctgagaagctggaccggcaccctgtttggagctactgcaggaccagaagcacaaagtgcggtttcccaagcctttgtccatctcagcccccagagtatatctgtgcttggggaatctcacacagaaactcaggagcaccccctgcctgagctaagggaggtcttatctctcagggggggtttaagtgccgtttgcaataatgtcgtcttatttatttagcggggtgaatattttatactgtaagtgagcaatcagagtataatgtttatggtgacaaaattaaaggctttcttatatgttta

SEQ ID NO: 377662 - DNA, 224 bp, Homo sapiens
tgagatggagtttcgcactgtcatggggctggagtgcagtggcacaatctcggctcactgcaacctccgcctcccaggttcaagcaattctcctccttcagcctcccgagtagctgggattatgtcgtcttatttatttagcggggtgaatattttatactgtaagtgagcaatcagagtataatgtttatggtgacaaaattaaaggctttcttatatgttta

SEQ ID NO: 377663 - DNA, 3386 bp, Homo sapiens
gcaaggaagggggggcggaaccagcctgcacgcgctggctccgggtgacagccgcgcgcctcggccaggatctgagtgatgagacgtgtccccactgaggtgccccacagcagcaggtgttgagcatgggctgagaagctggaccggcaccaaagggctggcagaaatgggcgcctggctgattcctaggcagttggcggcagcaaggaggagaggccgcagcttctggagcagagccgagacgaagcagttctggagtgcctgaacggccccctgagccctacccgcctggcccactatggtccagaggctgtgggtgagccgcctgctgcggcaccggaaagcccagctcttgctggtcaacctgctaacctttggcctggaggtgtgtttggccgcaggcatcacctatgtgccgcctctgctgctggaagtgggggtagaggagaagttcatgaccatggtgctgggcattggtccagtgctgggcctggtctgtgtcccgctcctaggctcagccagtgaccactggcgtggacgctatggccgccgccggcccttcatctgggcactgtccttgggcatcctgctgagcctctttctcatcccaagggccggctggctagcagggctgctgtgcccggatcccaggcccctggagctggcactgctcatcctgggcgtggggctgctggacttctgtggccaggtgtgcttcactccactggaggccctgctctctgacctcttccgggacccggaccactgtcgccaggcctactctgtctatgccttcatgatcagtcttgggggctgcctgggctacctcctgcctgccattgactgggacaccagtgccctggccccctacctgggcacccaggaggagtgcctctttggcctgctcaccctcatcttcctcacctgcgtagcagccacactgctggtggctgaggaggcagcgctgggccccaccgagccagcagaagggctgtcggccccctccttgtcgccccactgctgtccatgccgggcccgcttggctttccggaacctgggcgccctgcttccccggctgcaccagctgtgctgccgcatgccccgcaccctgcgccggctcttcgtggctgagctgtgcagctggatggcactcatgaccttcacgctgttttacacggatttcgtgggcgaggggctgtaccagggcgtgcccagagctgagccgggcaccgaggcccggagacactatgatgaaggcgttcggatgggcagcctggggctgttcctgcagtgcgccatctccctggtcttctctctggtcatggaccggctggtgcagcgattcggcactcgagcagtctatttggccagtgtggcagctttccctgtggctgccggtgccacatgcctgtcccacagtgtggccgtggtgacagcttcagccgccctcaccgggttcaccttctcagccctgcagatcctgccctacacactggcctccctctaccaccgggagaagcaggtgttcctgcccaaataccgaggggacactggaggtgctagcagtgaggacagcctgatgaccagcttcctgccaggccctaagcctggagctcccttccctaatggacacgtgggtgctggaggcagtggcctgctcccacctccacccgcgctctgcggggcctctgcctgtgatgtctccgtacgtgtggtggtgggtgagcccaccgaggccagggtggttccgggccggggcatctgcctggacctcgccatcctggatagtgccttcctgctgtcccaggtggccccatccctgtttatgggctccattgtccagctcagccagtctgtcactgcctatatggtgtctgccgcaggcctgggtctggtcgccatttactttgctacacaggtagtatttgacaagagcgacttggccaaatactcagcgtagaaaacttccagcacattggggtggagggcctgcctcactgggtcccagctccccgctcctgttagccccatggggctgccgggctggccgccagtttctgttgctgccaaagtaatgtggctctctgctgccaccctgtgctgctgaggtgcgtagctgcacagctgggggctggggcgtccctctcctctctccccagtctctagggctgcctgactggaggccttccaagggggtttcagtctggacttatacagggaggccagaagggctccatgcactggaatgcggggactctgcaggtggattacccaggctcagggttaacagctagcctcctagttgagacacacctagagaagggtttttgggagctgaataaactcagtcacctggtttcccatctctaagccccttaacctgcagcttcgtttaatgtagctcttgcatgggagtttctaggatgaaacactcctccatgggatttgaacatatgaaagttatttgtaggggaagagtcctgaggggcaacacacaagaaccaggtcccctcagcccacagcactgtctttttgctgatccacccccctcttaccttttatcaggatgtggcctgttggtccttctgttgccatcacagagacacaggcatttaaatatttaacttatttatttaacaaagtagaagggaatccattgctagcttttctgtgttggtgtctaatatttgggtagggtgggggatccccaacaatcaggtcccctgagatagctggtcattgggctgatcattgccagaatcttcttctcctggggtctggccccccaaaatgcctaacccaggaccttggaaattctactcatcccaaatgataattccaaatgctgttacccaaggttagggtgttgaaggaaggtagagggtggggcttcaggtctcaacggcttccctaaccacccctcttctcttggcccagcctggttccccccacttccactcccctctactctctctaggactgggctgatgaaggcactgcccaaaatttcccctacccccaactttcccctacccccaactttccccaccagctccacaaccctgtttggagctactgcaggaccagaagcacaaagtgcggtttcccaagcctttgtccatctcagcccccagagtatatctgtgcttggggaatctcacacagaaactcaggagcaccccctgcctgagctaagggaggtcttatctctcagggggggtttaagtgccgtttgcaataatgtcgtcttatttatttagcggggtgaatattttatactgtaagtgagcaatcagagtataatgtttatggtgacaaaattaaaggctttcttatatgtttaaaaaaaaagtcgagcggccgctaatttagtagtagtagtaggc

SEQ ID NO: 377664 - DNA, 3918 bp, Homo sapiens
gcaaggaagggggggcggaaccagcctgcacgcgctggctccgggtgacagccgcgcgcctcggccaggatctgagtgatgagacgtgtccccactgaggtgccccacagcagcaggtgttgagcatgggctgagaagctggaccggcaccaaagggctggcagaaatgggcgcctggctgattcctaggcagttggcggcagcaaggaggagaggccgcagcttctggagcagagccgagacgaagcagttctggagtgcctgaacggccccctgagccctacccgcctggcccactatggtccagaggctgtgggtgagccgcctgctgcggcaccggaaagcccagctcttgctggtcaacctgctaacctttggcctggaggtgtgtttggccgcaggcatcacctatgtgccgcctctgctgctggaagtgggggtagaggagaagttcatgaccatggtgctgggcattggtccagtgctgggcctggtctgtgtcccgctcctaggctcagccagtgaccactggcgtggacgctatggccgccgccggcccttcatctgggcactgtccttgggcatcctgctgagcctctttctcatcccaagggccggctggctagcagggctgctgtgcccggatcccaggcccctggagctggcactgctcatcctgggcgtggggctgctggacttctgtggccaggtgtgcttcactccactggaggccctgctctctgacctcttccgggacccggaccactgtcgccaggcctactctgtctatgccttcatgatcagtcttgggggctgcctgggctacctcctgcctgccattgactgggacaccagtgccctggccccctacctgggcacccaggaggagtgcctctttggcctgctcaccctcatcttcctcacctgcgtagcagccacactgctggtggctgaggaggcagcgctgggccccaccgagccagcagaagggctgtcggccccctccttgtcgccccactgctgtccatgccgggcccgcttggctttccggaacctgggcgccctgcttccccggctgcaccagctgtgctgccgcatgccccgcaccctgcgccggctcttcgtggctgagctgtgcagctggatggcactcatgaccttcacgctgttttacacggatttcgtgggcgaggggctgtaccagggcgtgcccagagctgagccgggcaccgaggcccggagacactatgatgaaggcgttcggatgggcagcctggggctgttcctgcagtgcgccatctccctggtcttctctctggtcatggaccggctggtgcagcgattcggcactcgagcagtctatttggccagtgtggcagctttccctgtggctgccggtgccacatgcctgtcccacagtgtggccgtggtgacagcttcagccgccctcaccgggttcaccttctcagccctgcagatcctgccctacacactggcctccctctaccaccgggagaagcaggtgttcctgcccaaataccgaggggacactggaggtgctagcagtgaggacagcctgatgaccagcttcctgccaggccctaagcctggagctcccttccctaatggacacgtgggtgctggaggcagtggcctgctcccacctccacccgcgctctgcggggcctctgcctgtgatgtctccgtacgtgtggtggtgggtgagcccaccgaggccagggtggttccgggccggggcatctgcctggacctcgccatcctggatagtgccttcctgctgtcccaggtggccccatccctgtttatgggctccattgtccagctcagccagtctgtcactgcctatatggtgtctgccgcaggcctgggtctggtcgccatttactttgctacacaggtagtatttgacaagagcgacttggccaaatactcagcgtagaaaacttccagcacattggggtggagggcctgcctcactgggtcccagctccccgctcctgttagccccatggggctgccgggctggccgccagtttctgttgctgccaaagtaatgtggctctctgctgccaccctgtgctgctgaggtgcgtagctgcacagctgggggctggggcgtccctctcctctctccccagtctctagggctgcctgactggaggccttccaagggggtttcagtctggacttatacagggaggccagaagggctccatgcactggaatgcggggactctgcaggtggattacccaggctcagggttaacagctagcctcctagttgagacacacctagagaagggtttttgggagctgaataaactcagtcacctggtttcccatctctaagccccttaacctgcagcttcgtttaatgtagctcttgcatgggagtttctaggatgaaacactcctccatgggatttgaacatatgaaagttatttgtaggggaagagtcctgaggggcaacacacaagaaccaggtcccctcagcccacagcactgtctttttgctgatccacccccctcttaccttttatcaggatgtggcctgttggtccttctgttgccatcacagagacacaggcatttaaatatttaacttatttatttaacaaagtagaagggaatccattgctagcttttctgtgttggtgtctaatatttgggtagggtgggggatccccaacaatcaggtcccctgagatagctggtcattgggctgatcattgccagaatcttcttctcctggggtctggccccccaaaatgcctaacccaggaccttggaaattctactcatcccaaatgataattccaaatgctgttacccaaggttagggtgttgaaggaaggtagagggtggggcttcaggtctcaacggcttccctaaccacccctcttctcttggcccagcctggttccccccacttccactcccctctactctctctaggactgggctgatgaaggcactgcccaaaatttcccctacccccaactttcccctacccccaactttccccaccagctccacaaccctgtttggagctactgcaggaccagaagcacaaagtgcggtttcccaagcctttgtccatctcagcccccagagtatatctgtgcttggggaatctcacacagaaactcaggagcaccccctgcctgagctaagggaggtcttatctctcagggggggtttaagtgccgtttgcaataatgtcgtcttatttatttagcggggtgaatattttatactgtaagtgagcaatcagagtataatgtttatggtgacaaaattaaaggctttcttatatgtttattggcatgtgtttcttttaggagggggaaagacctgatctttctacaacattcttaactctcagttcagggagccctttggcttttgacagcttcacttcccagtggccaccagcaggtggaggcatagaccagcactctttgtgtcaattgccaattgtggggggttgtgctgcaccttggactggggggtttcggagttggggagagggggtcagaaagagtctgaagtgtggggcaatggtggcattttccttctaaaagacccctgagtagggatgggcatgatgactcacgcctgtaatcccagcactttgggaggctgaggcaggtggatcacttgaggtcaggagttccgagaccagcctggccaacatgatgaaaccctgtctctactaaaaatataaaaaattagccaggtgtggtggtgcgtgcctgtaatcccagctactcgggaggctgaggcaggagaatcgcttgaatccaggaggtggaggttgcagtgagccgagatcgtgccattgcactccatcctgggtgacaagagtgaaactccatctcaaaaaatgaaaaaaa

SEQ ID NO: 377665 - DNA, 3343 bp, Homo sapiens
gcaaggaagggggggcggaaccagcctgcacgcgctggctccgggtgacagccgcgcgcctcggccaggatctgagtgatgagacgtgtccccactgaggtgccccacagcagcaggtgttgagcatgggctgagaagctggaccggcaccaaagggctggcagaaatgggcgcctggctgattcctaggcagttggcggcagcaaggaggagaggccgcagcttctggagcagagccgagacgaagcagttctggagtgcctgaacggccccctgagccctacccgcctggcccactatggtccagaggctgtgggtgagccgcctgctgcggcaccggaaagcccagctcttgctggtcaacctgctaacctttggcctggaggtgtgtttggccgcaggcatcacctatgtgccgcctctgctgctggaagtgggggtagaggagaagttcatgaccatggtgctgggcattggtccagtgctgggcctggtctgtgtcccgctcctaggctcagccagtgaccactggcgtggacgctatggccgccgccggcccttcatctgggcactgtccttgggcatcctgctgagcctctttctcatcccaagggccggctggctagcagggctgctgtgcccggatcccaggcccctggagctggcactgctcatcctgggcgtggggctgctggacttctgtggccaggtgtgcttcactccactggaggccctgctctctgacctcttccgggacccggaccactgtcgccaggcctactctgtctatgccttcatgatcagtcttgggggctgcctgggctacctcctgcctgccattgactgggacaccagtgccctggccccctacctgggcacccaggaggagtgcctctttggcctgctcaccctcatcttcctcacctgcgtagcagccacactgctggtggctgaggaggcagcgctgggccccaccgagccagcagaagggctgtcggccccctccttgtcgccccactgctgtccatgccgggcccgcttggctttccggaacctgggcgccctgcttccccggctgcaccagctgtgctgccgcatgccccgcaccctgcgccggctcttcgtggctgagctgtgcagctggatggcactcatgaccttcacgctgttttacacggatttcgtgggcgaggggctgtaccagggcgtgcccagagctgagccgggcaccgaggcccggagacactatgatgaaggcgttcggatgggcagcctggggctgttcctgcagtgcgccatctccctggtcttctctctggtcatggaccggctggtgcagcgattcggcactcgagcagtctatttggccagtgtggcagctttccctgtggctgccggtgccacatgcctgtcccacagtgtggccgtggtgacagcttcagccgccctcaccgggttcaccttctcagccctgcagatcctgccctacacactggcctccctctaccaccgggagaagcaggtgttcctgcccaaataccgaggggacactggaggtgctagcagtgaggacagcctgatgaccagcttcctgccaggccctaagcctggagctcccttccctaatggacacgtgggtgctggaggcagtggcctgctcccacctccacccgcgctctgcggggcctctgcctgtgatgtctccgtacgtgtggtggtgggtgagcccaccgaggccagggtggttccgggccggggcatctgcctggacctcgccatcctggatagtgccttcctgctgtcccaggtggccccatccctgtttatgggctccattgtccagctcagccagtctgtcactgcctatatggtgtctgccgcaggcctgggtctggtcgccatttactttgctacacaggtagtatttgacaagagcgacttggccaaatactcagcgtagaaaacttccagcacattggggtggagggcctgcctcactgggtcccagctccccgctcctgttagccccatggggctgccgggctggccgccagtttctgttgctgccaaagtaatgtggctctctgctgccaccctgtgctgctgaggtgcgtagctgcacagctgggggctggggcgtccctctcctctctccccagtctctagggctgcctgactggaggccttccaagggggtttcagtctggacttatacagggaggccagaagggctccatgcactggaatgcggggactctgcaggtggattacccaggctcagggttaacagctagcctcctagttgagacacacctagagaagggtttttgggagctgaataaactcagtcacctggtttcccatctctaagccccttaacctgcagcttcgtttaatgtagctcttgcatgggagtttctaggatgaaacactcctccatgggatttgaacatatgaaagttatttgtaggggaagagtcctgaggggcaacacacaagaaccaggtcccctcagcccacagcactgtctttttgctgatccacccccctcttaccttttatcaggatgtggcctgttggtccttctgttgccatcacagagacacaggcatttaaatatttaacttatttatttaacaaagtagaagggaatccattgctagcttttctgtgttggtgtctaatatttgggtagggtgggggatccccaacaatcaggtcccctgagatagctggtcattgggctgatcattgccagaatcttcttctcctggggtctggccccccaaaatgcctaacccaggaccttggaaattctactcatcccaaatgataattccaaatgctgttacccaaggttagggtgttgaaggaaggtagagggtggggcttcaggtctcaacggcttccctaaccacccctcttctcttggcccagcctggttccccccacttccactcccctctactctctctaggactgggctgatgaaggcactgcccaaaatttcccctacccccaactttcccctacccccaactttccccaccagctccacaaccctgtttggagctactgcaggaccagaagcacaaagtgcggtttcccaagcctttgtccatctcagcccccagagtatatctgtgcttggggaatctcacacagaaactcaggagcaccccctgcctgagctaagggaggtcttatctctcagggggggtttaagtgccgtttgcaataatgtcgtcttatttatttagcggggtgaatattttatactgtaagtgagcaatcagagtataatgtttatggtgacaaaattaaaggctttcttatatgttta

SEQ ID NO: 377666 - DNA, 3166 bp, Homo sapiens
caggctctggagtcacactgcttgttgaaacgctgcctcttaccctccctaggtctgcgcctttgaataagtatcacttcttagttgatctccatgcctcatgtttgtccatctgaaaatgggggcatctgtaatgcctgtgttatgaggagtaaattacagcatccctgtgaagacgtagcacagtgtcgagtacggaatgttatttccatccttctcacggagcttggttccccttccccttgccctttacttgtcccagccattgactcatactacttcccttcttgcaggcattggtccagtgctgggcctggtctgtgtcccgctcctaggctcagccagtgaccactggcgtggacgctatggccgccgccggcccttcatctgggcactgtccttgggcatcctgctgagcctctttctcatcccaagggccggctggctagcagggctgctgtgcccggatcccaggcccctggagctggcactgctcatcctgggcgtggggctgctggacttctgtggccaggtgtgcttcactccactggaggccctgctctctgacctcttccgggacccggaccactgtcgccaggcctactctgtctatgccttcatgatcagtcttgggggctgcctgggctacctcctgcctgccattgactgggacaccagtgccctggccccctacctgggcacccaggaggagtgcctctttggcctgctcaccctcatcttcctcacctgcgtagcagccacactgctggtggctgaggaggcagcgctgggccccaccgagccagcagaagggctgtcggccccctccttgtcgccccactgctgtccatgccgggcccgcttggctttccggaacctgggcgccctgcttccccggctgcaccagctgtgctgccgcatgccccgcaccctgcgccggctcttcgtggctgagctgtgcagctggatggcactcatgaccttcacgctgttttacacggatttcgtgggcgaggggctgtaccagggcgtgcccagagctgagccgggcaccgaggcccggagacactatgatgaaggcgttcggatgggcagcctggggctgttcctgcagtgcgccatctccctggtcttctctctggtcatggaccggctggtgcagcgattcggcactcgagcagtctatttggccagtgtggcagctttccctgtggctgccggtgccacatgcctgtcccacagtgtggccgtggtgacagcttcagccgccctcaccgggttcaccttctcagccctgcagatcctgccctacacactggcctccctctaccaccgggagaagcaggtgttcctgcccaaataccgaggggacactggaggtgctagcagtgaggacagcctgatgaccagcttcctgccaggccctaagcctggagctcccttccctaatggacacgtgggtgctggaggcagtggcctgctcccacctccacccgcgctctgcggggcctctgcctgtgatgtctccgtacgtgtggtggtgggtgagcccaccgaggccagggtggttccgggccggggcatctgcctggacctcgccatcctggatagtgccttcctgctgtcccaggtggccccatccctgtttatgggctccattgtccagctcagccagtctgtcactgcctatatggtgtctgccgcaggcctgggtctggtcgccatttactttgctacacaggtagtatttgacaagagcgacttggccaaatactcagcgtagaaaacttccagcacattggggtggagggcctgcctcactgggtcccagctccccgctcctgttagccccatggggctgccgggctggccgccagtttctgttgctgccaaagtaatgtggctctctgctgccaccctgtgctgctgaggtgcgtagctgcacagctgggggctggggcgtccctctcctctctccccagtctctagggctgcctgactggaggccttccaagggggtttcagtctggacttatacagggaggccagaagggctccatgcactggaatgcggggactctgcaggtggattacccaggctcagggttaacagctagcctcctagttgagacacacctagagaagggtttttgggagctgaataaactcagtcacctggtttcccatctctaagccccttaacctgcagcttcgtttaatgtagctcttgcatgggagtttctaggatgaaacactcctccatgggatttgaacatatgaaagttatttgtaggggaagagtcctgaggggcaacacacaagaaccaggtcccctcagcccacagcactgtctttttgctgatccacccccctcttaccttttatcaggatgtggcctgttggtccttctgttgccatcacagagacacaggcatttaaatatttaacttatttatttaacaaagtagaagggaatccattgctagcttttctgtgttggtgtctaatatttgggtagggtgggggatccccaacaatcaggtcccctgagatagctggtcattgggctgatcattgccagaatcttcttctcctggggtctggccccccaaaatgcctaacccaggaccttggaaattctactcatcccaaatgataattccaaatgctgttacccaaggttagggtgttgaaggaaggtagagggtggggcttcaggtctcaacggcttccctaaccacccctcttctcttggcccagcctggttccccccacttccactcccctctactctctctaggactgggctgatgaaggcactgcccaaaatttcccctacccccaactttcccctacccccaactttccccaccagctccacaaccctgtttggagctactgcaggaccagaagcacaaagtgcggtttcccaagcctttgtccatctcagcccccagagtatatctgtgcttggggaatctcacacagaaactcaggagcaccccctgcctgagctaagggaggtcttatctctcagggggggtttaagtgccgtttgcaataatgtcgtcttatttatttagcggggtgaatattttatactgtaagtgagcaatcagagtataatgtttatggtgacaaaattaaaggctttcttatatgttta

SEQ ID NO: 377667 - DNA, 337 bp, Homo sapiens
gggcactggttagctgtgttgcttggagaccccatcagccctgggtgcccctcacatgactcgtcactgtgcagtggccgtgtaattgcctctccatctcctctagacagtgaactccatgaagaagggacacagtctgtcttagtgctattgccccagtgcccaggctggccctggcacatagtagagcctcagggaactttgttggatggttgaaggatggacagataacatgttggagtccttcaagaatcctgaggattacctgggcttgttggcatgtgcctgtagtcccagccactcaggaggctgaggcaggaggatcatcagagcctgg

SEQ ID NO: 377668 - DNA, 5036 bp, Homo sapiens
  misc_feature (2124)..(2124): n is a, c, g, or t
agctcggtacctacttttcacagggggggacccacaccacccgcaatgccgctgtctctcttcacccctttgacctgccttttttctcttctcctcttcctggctgtgttttctcctatctttctttctcttcttcctttcttttctgtgctcctttgtttttttctctcgctttttctttccctgtcttctttcagattatctcatttcttctggatctgtctctgtattcctcactcccttccccatcccaaccccttctttctctagattgtttacatatgaagggcttttctctctcagagttgctgtcttctctgagacacacaaatctaagtcagaccattgctccacgccctcccaccttttctttagacctcaacttcgctgcgggtgggggtttggtgtcctaaggagactcctggaagctgaatggagaggaggaagaaaatgaagaaggagtgattgaatgtcgggcaaggcactggctgagctgctgtggctccctagcctaaggggcctgctgtccctctgaggcctagtgaaaaagctgcaggaggtgcatcctccacctctaatcttggaggctattatcttacctccaagcactgagctgggttactgcccaattccatccttccctgaaggagagaagggaagtgaaaagtagagtaactccccagcatttccctctttttctcctcatcggccagcccctcctccagccccctctggtggcatgccatgccaagagcaacgtgtaaaggaacagagaatatccaatgcagtcaagtccaccctgcccagactttgccactgacttctcccacccttctgtctcccccataatagtttatttggttggtctggactcacttgtggcctttgattaaattcctaaggggcctgaagaagacatttctactgcagagggttagaggcacttgagcaaggcccccacatcccaactctgggagttgtggtgggaggaggcacttctgggggataggaccagacaagataacaggagctcacatggaagcagaagctgtgacaagtttagtagtcccaaaatgggttatatcccttccccctttacatcagaatcttgtgaaatgggaaaacaacagaaggaggggatcaaagatagctgatctcacatgcttcccaggcagggcagaggtgggagtcaaacccgggtgacaggtgggtggagagccctgtttgaggttgtggctgatccctctctggtattagtttttcccctgggagcaggaagccctaggaagaggggactgcagggtccccaggggatctttcctccctcccctgcatgaggcagaggcaagctgcctgccaaccccctccctcaaggaatggccttgcccaggaatgcccaccacacataccctcttctttttttctagtcaaactcttgtttattccttggcttgcctccctccttcctcccctctcaacctttacttctgatttctatttcatggaatttgggattgaagttaaactacaacagtgccgccaacaccaagtcttgcaggaaaaaaatacaaagaaatttaacaaaaaaaatatattaataaaaaagttcaaaaaaggggggggattgtcatctcctttggggtgcgatggcttcaaatccaaactgaggctctccgggtggtaaggatgtgcgaggaggcctcttgaagaactccaggcctatcatgctgtctctccgctaaagcctgaggcccgaggtcagaggattcaggaaggctctgcagtcggcccaggagggcggggtcccgtggtggaggcggggagagggaaggaccgcacggagcaccaacccctgctcggccccgtaccaggaagcgctggggggcagaggagcggagttgaggcagaagccaggtgaggctggagtcctggggtaggcaggctgtcgctgccgctgccgctgcctgagatggaaatcgggggaggaagctcgcggaagaaacagcggagggtcgtggaaaaaaaagcaatggctgagctagggatggggtaccaggtagggggaggaaacggtagagagaaataggtggggctcccgcgcatgctcaataggaaggggcgccngtggggtgcggacgcatgcgtagtgggcttctcgggcggtggggtgggcgcggaatttggagacccacttcgggaaaggtaaaatgcgggcgcaattttagggtacctgtgggacccgggctcttagggtcttgacacaggacgggcctgggccgaaagcccaggcacgcccgaccagagagtgtttctccactcccggactctgccagtcaggatggtggtgccttcgctgaagcttcaggacctcatcgaagagattcgcggggccaagactcaggcccaggagcgggaggtgatccaaaaggagtgtgcccacatccgggcctccttccgcgacggggacccagtgcacaggcaccggcagctggccaaactgctctacgtccacatgttgggctaccccgcccactttggacagatggagtgcctgaaactgatcgcctcctccagattcacagacaagagggtgggctacctgggggccatgcttctattggatgagaggcacgatgcccacctgctcattaccaacagcatcaagaagtgagagggttctggcaatcacttggaatcagggagatgggagagtagggaccttggaaatcccaggggactgcctgttgtgggtattgaaaaggactgattttctcagaggtttgactgaccgtcctcccaaaccctgcagtgacctgagccaggggattcagccagtacaaggcctggccttgtgcactttgagcaccatgggctctgctgagatgtgccgagacctggccccagaggtggagaaactgctcctgcagcccagtccctacgtgcgcaagaaggctattctgactgcagtgcacatgatccggaaggtccctgaactctccagtgtcttcctcccaccctgtgcccaactgcttcatgagcgtcaccatggcatcctgctgggcaccatcacgctgatcacggagctctgcgaacgaagccctgcagccctcaggcacttccgaaaggtggtaccccagctggtacacatcctccggactctggtgacaatgggatactccacagaacacagcatatctggagtcagcgaccccttcctgcaggtccagatacttcgtctgcttcggatcctgggccggaaccacgaggagagcagtgagaccatgaatgacttgctggcccaggtggccactaacacggacaccagccgaaatgccggaaatgcggtcctgtttgagacagtactcaccatcatggatatccgctctgcagctggcctacgggttctagctgtcaacattcttggtcgcttcctactcaacagtgacaggaacattaggtatgtagccctgacatcactgcttcgactggtgcagtctgatcacagtgctgtgcagcggcatcggcccactgtggtggaatgtctacgggaaactgatgcctccctcagccggagagccctggaactaagcctggctctggtaaatagctccaatgtgcgagccatgatgcaagagctgcaggcctttctggagtcctgccctcctgacctacgggctgactgtgcctcaggcatcctgctggctgcagagaggtttgctccaaccaaacgctggcacatagacaccatcctgcatgtgctgacaacggcgggcacccatgtgcgggatgatgcagtggccaacctgacccagctgattgggggggcccaggagctacatgcctactctgtgcgccgcctctacaatgccctggcagaagacatttcccagcaaccactggtgcaggtggcagcctggtgcattggggagtatggggacctcctgctggcagggaactgcgaggagattgagccccttcaggtggacgaagaggaagtgctggcattgctggaaaaggtgctgcagtcccacatgtccctgccagccactcgaggatatgccctcacagccctcatgaagctcagcactcgcctctgtggggacaacaaccgcatccgccaggtggtgtccatctacgggagctgcttggacgtggagctgcagcagcgggctgtggagtatgacacactcttccggaaatacgaccacatgagggctgccatcctggaaaaaatgcctcttgtggagcgagatggccctcaggctgatgaggaagcaaaggaaagcaaagaagcagcccagctttcagaagcagccccagtgcccacagagccccaggcctcacagctcctggatctgctagatctcctggatggggcttctggggatgtccagcatcctccccatctggacccctccccaggaggtgccctggtacacctgcttgaccttccctgtgtacctccacccccagctcccatcccagatctcaaagtgtttgagcgtgagggagtacagctgaatctgtctttcattcgaccccctgaaaaccctgctttgctgttaatcaccatcactgccaccaacttctcagagggtgatgtcacccatttcatctgccaggctgctgtgcccaagagtctccagctgcagctgcaggcccccagtgggaacacagttccagctcggggtggccttcctatcacccagctcttcagaatcctcaatcctaacaaggcccccctgcggctaaagctgcgcctcacctacgaccactttcaccagtcggtgcaggagatctttgaggtgaacaacttgcctgtggaatcgtggcagtaactgtctccactcacagcctgaaattctcctgtgtcccaaaccccagggggccccagcagcttcgaacctacacctgagggctaccagcaggtggcgctctggctttgcactgcaaaaactggggaccagcccccttctcccacaaataaagcccaataaagcctgagaagtgaggaaagccaaaaaaaaaaatatttg

SEQ ID NO: 377669 - DNA, 5236 bp, Homo sapiens
  misc_feature (2124)..(2124): n is a, c, g, or t
agctcggtacctacttttcacagggggggacccacaccacccgcaatgccgctgtctctcttcacccctttgacctgccttttttctcttctcctcttcctggctgtgttttctcctatctttctttctcttcttcctttcttttctgtgctcctttgtttttttctctcgctttttctttccctgtcttctttcagattatctcatttcttctggatctgtctctgtattcctcactcccttccccatcccaaccccttctttctctagattgtttacatatgaagggcttttctctctcagagttgctgtcttctctgagacacacaaatctaagtcagaccattgctccacgccctcccaccttttctttagacctcaacttcgctgcgggtgggggtttggtgtcctaaggagactcctggaagctgaatggagaggaggaagaaaatgaagaaggagtgattgaatgtcgggcaaggcactggctgagctgctgtggctccctagcctaaggggcctgctgtccctctgaggcctagtgaaaaagctgcaggaggtgcatcctccacctctaatcttggaggctattatcttacctccaagcactgagctgggttactgcccaattccatccttccctgaaggagagaagggaagtgaaaagtagagtaactccccagcatttccctctttttctcctcatcggccagcccctcctccagccccctctggtggcatgccatgccaagagcaacgtgtaaaggaacagagaatatccaatgcagtcaagtccaccctgcccagactttgccactgacttctcccacccttctgtctcccccataatagtttatttggttggtctggactcacttgtggcctttgattaaattcctaaggggcctgaagaagacatttctactgcagagggttagaggcacttgagcaaggcccccacatcccaactctgggagttgtggtgggaggaggcacttctgggggataggaccagacaagataacaggagctcacatggaagcagaagctgtgacaagtttagtagtcccaaaatgggttatatcccttccccctttacatcagaatcttgtgaaatgggaaaacaacagaaggaggggatcaaagatagctgatctcacatgcttcccaggcagggcagaggtgggagtcaaacccgggtgacaggtgggtggagagccctgtttgaggttgtggctgatccctctctggtattagtttttcccctgggagcaggaagccctaggaagaggggactgcagggtccccaggggatctttcctccctcccctgcatgaggcagaggcaagctgcctgccaaccccctccctcaaggaatggccttgcccaggaatgcccaccacacataccctcttctttttttctagtcaaactcttgtttattccttggcttgcctccctccttcctcccctctcaacctttacttctgatttctatttcatggaatttgggattgaagttaaactacaacagtgccgccaacaccaagtcttgcaggaaaaaaatacaaagaaatttaacaaaaaaaatatattaataaaaaagttcaaaaaaggggggggattgtcatctcctttggggtgcgatggcttcaaatccaaactgaggctctccgggtggtaaggatgtgcgaggaggcctcttgaagaactccaggcctatcatgctgtctctccgctaaagcctgaggcccgaggtcagaggattcaggaaggctctgcagtcggcccaggagggcggggtcccgtggtggaggcggggagagggaaggaccgcacggagcaccaacccctgctcggccccgtaccaggaagcgctggggggcagaggagcggagttgaggcagaagccaggtgaggctggagtcctggggtaggcaggctgtcgctgccgctgccgctgcctgagatggaaatcgggggaggaagctcgcggaagaaacagcggagggtcgtggaaaaaaaagcaatggctgagctagggatggggtaccaggtagggggaggaaacggtagagagaaataggtggggctcccgcgcatgctcaataggaaggggcgccngtggggtgcggacgcatgcgtagtgggcttctcgggcggtggggtgggcgcggaatttggagacccacttcgggaaaggtaaaatgcgggcgcaattttagggtacctgtgggacccgggctcttagggtcttgacacaggacgggcctgggccgaaagcccaggcacgcccgaccagagagtgtttctccactcccggactctgccagtcaggatggtggtgccttcgctgaagcttcaggacctcatcgaagagattcgcggggccaagactcaggcccaggagcgggaggtgatccaaaaggagtgtgcccacatccgggcctccttccgcgacggggacccagtgcacaggcaccggcagctggccaaactgctctacgtccacatgttgggctaccccgcccactttggacagatggagtgcctgaaactgatcgcctcctccagattcacagacaagagggtgggctacctgggggccatgcttctattggatgagaggcacgatgcccacctgctcattaccaacagcatcaagaagtgagagggttctggcaatcacttggaatcagggagatgggagagtagggaccttggaaatcccaggggactgcctgttgtgggtattgaaaaggactgattttctcagaggtttgactgaccgtcctcccaaaccctgcagtgacctgagccaggggattcagccagtacaaggcctggccttgtgcactttgagcaccatgggctctgctgagatgtgccgagacctggccccagaggtggagaaactgctcctgcagcccagtccctacgtgcgcaagaaggctattctgactgcagtgcacatgatccggaaggtccctgaactctccagtgtcttcctcccaccctgtgcccaactgcttcatgagcgtcaccatggtaaggctgtggggccccccatcctttgcttcaggtctatggacagaagaattgaaaatcggatgggaaccccagctcacaggagaagggtagtgcacacacacaggcacacacgcaatagactctcttgcccctggcccccaccattcacttccccgacgctgaccccaggcatcctgctgggcaccatcacgctgatcacggagctctgcgaacgaagccctgcagccctcaggcacttccgaaaggtgggctggtgaaggggcaggccctgggcgtggtaccccagctggtacacatcctccggactctggtgacaatgggatactccacagaacacagcatatctggagtcagcgaccccttcctgcaggtccagatacttcgtctgcttcggatcctgggccggaaccacgaggagagcagtgagaccatgaatgacttgctggcccaggtggccactaacacggacaccagccgaaatgccggaaatgcggtcctgtttgagacagtactcaccatcatggatatccgctctgcagctggcctacgggttctagctgtcaacattcttggtcgcttcctactcaacagtgacaggaacattaggtatgtagccctgacatcactgcttcgactggtgcagtctgatcacagtgctgtgcagcggcatcggcccactgtggtggaatgtctacgggaaactgatgcctccctcagccggagagccctggaactaagcctggctctggtaaatagctccaatgtgcgagccatgatgcaagagctgcaggcctttctggagtcctgccctcctgacctacgggctgactgtgcctcaggcatcctgctggctgcagagaggtttgctccaaccaaacgctggcacatagacaccatcctgcatgtgctgacaacggcgggcacccatgtgcgggatgatgcagtggccaacctgacccagctgattgggggggcccaggagctacatgcctactctgtgcgccgcctctacaatgccctggcagaagacatttcccagcaaccactggtgcaggtggcagcctggtgcattggggagtatggggacctcctgctggcagggaactgcgaggagattgagccccttcaggtggacgaagaggaagtgctggcattgctggaaaaggtgctgcagtcccacatgtccctgccagccactcgaggatatgccctcacagccctcatgaagctcagcactcgcctctgtggggacaacaaccgcatccgccaggtggtgtccatctacgggagctgcttggacgtggagctgcagcagcgggctgtggagtatgacacactcttccggaaatacgaccacatgagggctgccatcctggaaaaaatgcctcttgtggagcgagatggccctcaggctgatgaggaagcaaaggaaagcaaagaagcagcccagctttcagaagcagccccagtgcccacagagccccaggcctcacagctcctggatctgctagatctcctggatggggcttctggggatgtccagcatcctccccatctggacccctccccaggaggtgccctggtacacctgcttgaccttccctgtgtacctccacccccagctcccatcccagatctcaaagtgtttgagcgtgagggagtacagctgaatctgtctttcattcgaccccctgaaaaccctgctttgctgttaatcaccatcactgccaccaacttctcagagggtgatgtcacccatttcatctgccaggctgctgtgcccaagagtctccagctgcagctgcaggcccccagtgggaacacagttccagctcggggtggccttcctatcacccagctcttcagaatcctcaatcctaacaaggcccccctgcggctaaagctgcgcctcacctacgaccactttcaccagtcggtgcaggagatctttgaggtgaacaacttgcctgtggaatcgtggcagtaactgtctccactcacagcctgaaattctcctgtgtcccaaaccccagggggccccagcagcttcgaacctacacctgagggctaccagcaggtggcgctctggctttgcactgcaaaaactggggaccagcccccttctcccacaaataaagcccaataaagcctgagaagtgaggaaagccaaaaaaaaaaatatttg

SEQ ID NO: 377670 - DNA, 5487 bp, Homo sapiens
  misc_feature (2124)..(2124): n is a, c, g, or t
agctcggtacctacttttcacagggggggacccacaccacccgcaatgccgctgtctctcttcacccctttgacctgccttttttctcttctcctcttcctggctgtgttttctcctatctttctttctcttcttcctttcttttctgtgctcctttgtttttttctctcgctttttctttccctgtcttctttcagattatctcatttcttctggatctgtctctgtattcctcactcccttccccatcccaaccccttctttctctagattgtttacatatgaagggcttttctctctcagagttgctgtcttctctgagacacacaaatctaagtcagaccattgctccacgccctcccaccttttctttagacctcaacttcgctgcgggtgggggtttggtgtcctaaggagactcctggaagctgaatggagaggaggaagaaaatgaagaaggagtgattgaatgtcgggcaaggcactggctgagctgctgtggctccctagcctaaggggcctgctgtccctctgaggcctagtgaaaaagctgcaggaggtgcatcctccacctctaatcttggaggctattatcttacctccaagcactgagctgggttactgcccaattccatccttccctgaaggagagaagggaagtgaaaagtagagtaactccccagcatttccctctttttctcctcatcggccagcccctcctccagccccctctggtggcatgccatgccaagagcaacgtgtaaaggaacagagaatatccaatgcagtcaagtccaccctgcccagactttgccactgacttctcccacccttctgtctcccccataatagtttatttggttggtctggactcacttgtggcctttgattaaattcctaaggggcctgaagaagacatttctactgcagagggttagaggcacttgagcaaggcccccacatcccaactctgggagttgtggtgggaggaggcacttctgggggataggaccagacaagataacaggagctcacatggaagcagaagctgtgacaagtttagtagtcccaaaatgggttatatcccttccccctttacatcagaatcttgtgaaatgggaaaacaacagaaggaggggatcaaagatagctgatctcacatgcttcccaggcagggcagaggtgggagtcaaacccgggtgacaggtgggtggagagccctgtttgaggttgtggctgatccctctctggtattagtttttcccctgggagcaggaagccctaggaagaggggactgcagggtccccaggggatctttcctccctcccctgcatgaggcagaggcaagctgcctgccaaccccctccctcaaggaatggccttgcccaggaatgcccaccacacataccctcttctttttttctagtcaaactcttgtttattccttggcttgcctccctccttcctcccctctcaacctttacttctgatttctatttcatggaatttgggattgaagttaaactacaacagtgccgccaacaccaagtcttgcaggaaaaaaatacaaagaaatttaacaaaaaaaatatattaataaaaaagttcaaaaaaggggggggattgtcatctcctttggggtgcgatggcttcaaatccaaactgaggctctccgggtggtaaggatgtgcgaggaggcctcttgaagaactccaggcctatcatgctgtctctccgctaaagcctgaggcccgaggtcagaggattcaggaaggctctgcagtcggcccaggagggcggggtcccgtggtggaggcggggagagggaaggaccgcacggagcaccaacccctgctcggccccgtaccaggaagcgctggggggcagaggagcggagttgaggcagaagccaggtgaggctggagtcctggggtaggcaggctgtcgctgccgctgccgctgcctgagatggaaatcgggggaggaagctcgcggaagaaacagcggagggtcgtggaaaaaaaagcaatggctgagctagggatggggtaccaggtagggggaggaaacggtagagagaaataggtggggctcccgcgcatgctcaataggaaggggcgccngtggggtgcggacgcatgcgtagtgggcttctcgggcggtggggtgggcgcggaatttggagacccacttcgggaaaggtaaaatgcgggcgcaattttagggtacctgtgggacccgggctcttagggtcttgacacaggacgggcctgggccgaaagcccaggcacgcccgaccagagagtgtttctccactcccggactctgccagtcaggatggtggtgccttcgctgaagcttcaggacctcatcgaagagattcgcggggccaagactcaggcccaggagcgggaggtgatccaaaaggagtgtgcccacatccgggcctccttccgcgacggggacccagtgcacaggcaccggcagctggccaaactgctctacgtccacatgttgggctaccccgcccactttggacagatggagtgcctgaaactgatcgcctcctccagattcacagacaagagggtgggctacctgggggccatgcttctattggatgagaggcacgatgcccacctgctcattaccaacagcatcaagaagtgagagggttctggcaatcacttggaatcagggagatgggagagtagggaccttggaaatcccaggggactgcctgttgtgggtattgaaaaggactgattttctcagaggtttgactgaccgtcctcccaaaccctgcagtgacctgagccaggggattcagccagtacaaggcctggccttgtgcactttgagcaccatgggctctgctgagatgtgccgagacctggccccagaggtggagaaactgctcctgcagcccagtccctacgtgcgcaagaaggctattctgactgcagtgcacatgatccggaaggtccctgaactctccagtgtcttcctcccaccctgtgcccaactgcttcatgagcgtcaccatggtaaggctgtggggccccccatcctttgcttcaggtctatggacagaagaattgaaaatcggatgggaaccccagctcacaggagaagggtagtgcacacacacaggcacacacgcaatagactctcttgcccctggcccccaccattcacttccccgacgctgaccccaggcatcctgctgggcaccatcacgctgatcacggagctctgcgaacgaagccctgcagccctcaggcacttccgaaaggtgggctggtgaaggggcaggccctgggcgtggtaccccagctggtacacatcctccggactctggtgacaatgggatactccacagaacacagcatatctggagtcagcgaccccttcctgcaggtccagatacttcgtctgcttcggatcctgggccggaaccacgaggagagcagtgagaccatgaatgacttgctggcccaggtggccactaacacggacaccagccgaaatgccggaaatgcggtcctgtttgagacagtactcaccatcatggatatccgctctgcagctggcctacgggttctagctgtcaacattcttggtcgcttcctactcaacagtgacaggaacattaggacaggacggggagtgggggctgatggccatggtatgatagaacctcccccatcctgaccaggtatgtagccctgacatcactgcttcgactggtgcagtctgatcacagtgctgtgcagcggcatcggcccactgtggtggaatgtctacgggaaactgatgcctccctcagccggtgagcagtgatagaggggacaggagggcagggcagaggttcccagtgccctgtggccaagactcgagccagtttagagcagctggagtaaggggactaagggggacaggtccctggggaagcagagggcctgaggcatggaccaggatgacctgggctacctgcatggaaacctctttctcctgccaggagagccctggaactaagcctggctctggtaaatagctccaatgtgcgagccatgatgcaagagctgcaggcctttctggagtcctgccctcctgacctacgggctgactgtgcctcaggcatcctgctggctgcagagaggtttgctccaaccaaacgctggcacatagacaccatcctgcatgtgctgacaacggcgggcacccatgtgcgggatgatgcagtggccaacctgacccagctgattgggggggcccaggagctacatgcctactctgtgcgccgcctctacaatgccctggcagaagacatttcccagcaaccactggtgcaggtggcagcctggtgcattggggagtatggggacctcctgctggcagggaactgcgaggagattgagccccttcaggtggacgaagaggaagtgctggcattgctggaaaaggtgctgcagtcccacatgtccctgccagccactcgaggatatgccctcacagccctcatgaagctcagcactcgcctctgtggggacaacaaccgcatccgccaggtggtgtccatctacgggagctgcttggacgtggagctgcagcagcgggctgtggagtatgacacactcttccggaaatacgaccacatgagggctgccatcctggaaaaaatgcctcttgtggagcgagatggccctcaggctgatgaggaagcaaaggaaagcaaagaagcagcccagctttcagaagcagccccagtgcccacagagccccaggcctcacagctcctggatctgctagatctcctggatggggcttctggggatgtccagcatcctccccatctggacccctccccaggaggtgccctggtacacctgcttgaccttccctgtgtacctccacccccagctcccatcccagatctcaaagtgtttgagcgtgagggagtacagctgaatctgtctttcattcgaccccctgaaaaccctgctttgctgttaatcaccatcactgccaccaacttctcagagggtgatgtcacccatttcatctgccaggctgctgtgcccaagagtctccagctgcagctgcaggcccccagtgggaacacagttccagctcggggtggccttcctatcacccagctcttcagaatcctcaatcctaacaaggcccccctgcggctaaagctgcgcctcacctacgaccactttcaccagtcggtgcaggagatctttgaggtgaacaacttgcctgtggaatcgtggcagtaactgtctccactcacagcctgaaattctcctgtgtcccaaaccccagggggccccagcagcttcgaacctacacctgagggctaccagcaggtggcgctctggctttgcactgcaaaaactggggaccagcccccttctcccacaaataaagcccaataaagcctgagaagtgaggaaagccaaaaaaaaaaatatttg

SEQ ID NO: 377671 - DNA, 5117 bp, Homo sapiens
  misc_feature (2124)..(2124): n is a, c, g, or t
agctcggtacctacttttcacagggggggacccacaccacccgcaatgccgctgtctctcttcacccctttgacctgccttttttctcttctcctcttcctggctgtgttttctcctatctttctttctcttcttcctttcttttctgtgctcctttgtttttttctctcgctttttctttccctgtcttctttcagattatctcatttcttctggatctgtctctgtattcctcactcccttccccatcccaaccccttctttctctagattgtttacatatgaagggcttttctctctcagagttgctgtcttctctgagacacacaaatctaagtcagaccattgctccacgccctcccaccttttctttagacctcaacttcgctgcgggtgggggtttggtgtcctaaggagactcctggaagctgaatggagaggaggaagaaaatgaagaaggagtgattgaatgtcgggcaaggcactggctgagctgctgtggctccctagcctaaggggcctgctgtccctctgaggcctagtgaaaaagctgcaggaggtgcatcctccacctctaatcttggaggctattatcttacctccaagcactgagctgggttactgcccaattccatccttccctgaaggagagaagggaagtgaaaagtagagtaactccccagcatttccctctttttctcctcatcggccagcccctcctccagccccctctggtggcatgccatgccaagagcaacgtgtaaaggaacagagaatatccaatgcagtcaagtccaccctgcccagactttgccactgacttctcccacccttctgtctcccccataatagtttatttggttggtctggactcacttgtggcctttgattaaattcctaaggggcctgaagaagacatttctactgcagagggttagaggcacttgagcaaggcccccacatcccaactctgggagttgtggtgggaggaggcacttctgggggataggaccagacaagataacaggagctcacatggaagcagaagctgtgacaagtttagtagtcccaaaatgggttatatcccttccccctttacatcagaatcttgtgaaatgggaaaacaacagaaggaggggatcaaagatagctgatctcacatgcttcccaggcagggcagaggtgggagtcaaacccgggtgacaggtgggtggagagccctgtttgaggttgtggctgatccctctctggtattagtttttcccctgggagcaggaagccctaggaagaggggactgcagggtccccaggggatctttcctccctcccctgcatgaggcagaggcaagctgcctgccaaccccctccctcaaggaatggccttgcccaggaatgcccaccacacataccctcttctttttttctagtcaaactcttgtttattccttggcttgcctccctccttcctcccctctcaacctttacttctgatttctatttcatggaatttgggattgaagttaaactacaacagtgccgccaacaccaagtcttgcaggaaaaaaatacaaagaaatttaacaaaaaaaatatattaataaaaaagttcaaaaaaggggggggattgtcatctcctttggggtgcgatggcttcaaatccaaactgaggctctccgggtggtaaggatgtgcgaggaggcctcttgaagaactccaggcctatcatgctgtctctccgctaaagcctgaggcccgaggtcagaggattcaggaaggctctgcagtcggcccaggagggcggggtcccgtggtggaggcggggagagggaaggaccgcacggagcaccaacccctgctcggccccgtaccaggaagcgctggggggcagaggagcggagttgaggcagaagccaggtgaggctggagtcctggggtaggcaggctgtcgctgccgctgccgctgcctgagatggaaatcgggggaggaagctcgcggaagaaacagcggagggtcgtggaaaaaaaagcaatggctgagctagggatggggtaccaggtagggggaggaaacggtagagagaaataggtggggctcccgcgcatgctcaataggaaggggcgccngtggggtgcggacgcatgcgtagtgggcttctcgggcggtggggtgggcgcggaatttggagacccacttcgggaaaggtaaaatgcgggcgcaattttagggtacctgtgggacccgggctcttagggtcttgacacaggacgggcctgggccgaaagcccaggcacgcccgaccagagagtgtttctccactcccggactctgccagtcaggatggtggtgccttcgctgaagcttcaggacctcatcgaagagattcgcggggccaagactcaggcccaggagcgggaggtgatccaaaaggagtgtgcccacatccgggcctccttccgcgacggggacccagtgcacaggcaccggcagctggccaaactgctctacgtccacatgttgggctaccccgcccactttggacagatggagtgcctgaaactgatcgcctcctccagattcacagacaagagggtgggctacctgggggccatgcttctattggatgagaggcacgatgcccacctgctcattaccaacagcatcaagaagtgagagggttctggcaatcacttggaatcagggagatgggagagtagggaccttggaaatcccaggggactgcctgttgtgggtattgaaaaggactgattttctcagaggtttgactgaccgtcctcccaaaccctgcagtgacctgagccaggggattcagccagtacaaggcctggccttgtgcactttgagcaccatgggctctgctgagatgtgccgagacctggccccagaggtggagaaactgctcctgcagcccagtccctacgtgcgcaagaaggctattctgactgcagtgcacatgatccggaaggtccctgaactctccagtgtcttcctcccaccctgtgcccaactgcttcatgagcgtcaccatggcatcctgctgggcaccatcacgctgatcacggagctctgcgaacgaagccctgcagccctcaggcacttccgaaaggtggtaccccagctggtacacatcctccggactctggtgacaatgggatactccacagaacacagcatatctggagtcagcgaccccttcctgcaggtccagatacttcgtctgcttcggatcctgggccggaaccacgaggagagcagtgagaccatgaatgacttgctggcccaggtggccactaacacggacaccagccgaaatgccggaaatgcggtcctgtttgagacagtactcaccatcatggatatccgctctgcagctggcctacgggttctagctgtcaacattcttggtcgcttcctactcaacagtgacaggaacattaggtatgtagccctgacatcactgcttcgactggtgcagtctgatcacagtgctgtgcagcggcatcggcccactgtggtggaatgtctacgggaaactgatgcctccctcagccggagagccctggaactaagcctggctctggtaaatagctccaatgtgcgagccatgatgcaagagctgcaggcctttctggagtcctgccctcctgacctacgggctgactgtgcctcaggcatcctgctggctgcagagaggtttgctccaaccaaacgctggcacatagacaccatcctgcatgtgctgacaacggtgaggcaggggccagtcagagagctgggcagaagtggtcaagattcaccacactgacttggccatgcccacaccttccaggcgggcacccatgtgcgggatgatgcagtggccaacctgacccagctgattgggggggcccaggagctacatgcctactctgtgcgccgcctctacaatgccctggcagaagacatttcccagcaaccactggtgcaggtggcagcctggtgcattggggagtatggggacctcctgctggcagggaactgcgaggagattgagccccttcaggtggacgaagaggaagtgctggcattgctggaaaaggtgctgcagtcccacatgtccctgccagccactcgaggatatgccctcacagccctcatgaagctcagcactcgcctctgtggggacaacaaccgcatccgccaggtggtgtccatctacgggagctgcttggacgtggagctgcagcagcgggctgtggagtatgacacactcttccggaaatacgaccacatgagggctgccatcctggaaaaaatgcctcttgtggagcgagatggccctcaggctgatgaggaagcaaaggaaagcaaagaagcagcccagctttcagaagcagccccagtgcccacagagccccaggcctcacagctcctggatctgctagatctcctggatggggcttctggggatgtccagcatcctccccatctggacccctccccaggaggtgccctggtacacctgcttgaccttccctgtgtacctccacccccagctcccatcccagatctcaaagtgtttgagcgtgagggagtacagctgaatctgtctttcattcgaccccctgaaaaccctgctttgctgttaatcaccatcactgccaccaacttctcagagggtgatgtcacccatttcatctgccaggctgctgtgcccaagagtctccagctgcagctgcaggcccccagtgggaacacagttccagctcggggtggccttcctatcacccagctcttcagaatcctcaatcctaacaaggcccccctgcggctaaagctgcgcctcacctacgaccactttcaccagtcggtgcaggagatctttgaggtgaacaacttgcctgtggaatcgtggcagtaactgtctccactcacagcctgaaattctcctgtgtcccaaaccccagggggccccagcagcttcgaacctacacctgagggctaccagcaggtggcgctctggctttgcactgcaaaaactggggaccagcccccttctcccacaaataaagcccaataaagcctgagaagtgaggaaagccaaaaaaaaaaatatttg

SEQ ID NO: 377672 - DNA, 4931 bp, Homo sapiens
  misc_feature (2124)..(2124): n is a, c, g, or t
agctcggtacctacttttcacagggggggacccacaccacccgcaatgccgctgtctctcttcacccctttgacctgccttttttctcttctcctcttcctggctgtgttttctcctatctttctttctcttcttcctttcttttctgtgctcctttgtttttttctctcgctttttctttccctgtcttctttcagattatctcatttcttctggatctgtctctgtattcctcactcccttccccatcccaaccccttctttctctagattgtttacatatgaagggcttttctctctcagagttgctgtcttctctgagacacacaaatctaagtcagaccattgctccacgccctcccaccttttctttagacctcaacttcgctgcgggtgggggtttggtgtcctaaggagactcctggaagctgaatggagaggaggaagaaaatgaagaaggagtgattgaatgtcgggcaaggcactggctgagctgctgtggctccctagcctaaggggcctgctgtccctctgaggcctagtgaaaaagctgcaggaggtgcatcctccacctctaatcttggaggctattatcttacctccaagcactgagctgggttactgcccaattccatccttccctgaaggagagaagggaagtgaaaagtagagtaactccccagcatttccctctttttctcctcatcggccagcccctcctccagccccctctggtggcatgccatgccaagagcaacgtgtaaaggaacagagaatatccaatgcagtcaagtccaccctgcccagactttgccactgacttctcccacccttctgtctcccccataatagtttatttggttggtctggactcacttgtggcctttgattaaattcctaaggggcctgaagaagacatttctactgcagagggttagaggcacttgagcaaggcccccacatcccaactctgggagttgtggtgggaggaggcacttctgggggataggaccagacaagataacaggagctcacatggaagcagaagctgtgacaagtttagtagtcccaaaatgggttatatcccttccccctttacatcagaatcttgtgaaatgggaaaacaacagaaggaggggatcaaagatagctgatctcacatgcttcccaggcagggcagaggtgggagtcaaacccgggtgacaggtgggtggagagccctgtttgaggttgtggctgatccctctctggtattagtttttcccctgggagcaggaagccctaggaagaggggactgcagggtccccaggggatctttcctccctcccctgcatgaggcagaggcaagctgcctgccaaccccctccctcaaggaatggccttgcccaggaatgcccaccacacataccctcttctttttttctagtcaaactcttgtttattccttggcttgcctccctccttcctcccctctcaacctttacttctgatttctatttcatggaatttgggattgaagttaaactacaacagtgccgccaacaccaagtcttgcaggaaaaaaatacaaagaaatttaacaaaaaaaatatattaataaaaaagttcaaaaaaggggggggattgtcatctcctttggggtgcgatggcttcaaatccaaactgaggctctccgggtggtaaggatgtgcgaggaggcctcttgaagaactccaggcctatcatgctgtctctccgctaaagcctgaggcccgaggtcagaggattcaggaaggctctgcagtcggcccaggagggcggggtcccgtggtggaggcggggagagggaaggaccgcacggagcaccaacccctgctcggccccgtaccaggaagcgctggggggcagaggagcggagttgaggcagaagccaggtgaggctggagtcctggggtaggcaggctgtcgctgccgctgccgctgcctgagatggaaatcgggggaggaagctcgcggaagaaacagcggagggtcgtggaaaaaaaagcaatggctgagctagggatggggtaccaggtagggggaggaaacggtagagagaaataggtggggctcccgcgcatgctcaataggaaggggcgccngtggggtgcggacgcatgcgtagtgggcttctcgggcggtggggtgggcgcggaatttggagacccacttcgggaaaggtaaaatgcgggcgcaattttagggtacctgtgggacccgggctcttagggtcttgacacaggacgggcctgggccgaaagcccaggcacgcccgaccagagagtgtttctccactcccggactctgccagtcaggatggtggtgccttcgctgaagcttcaggacctcatcgaagagattcgcggggccaagactcaggcccaggagcgggaggtgatccaaaaggagtgtgcccacatccgggcctccttccgcgacggggacccagtgcacaggcaccggcagctggccaaactgctctacgtccacatgttgggctaccccgcccactttggacagatggagtgcctgaaactgatcgcctcctccagattcacagacaagagggtgggctacctgggggccatgcttctattggatgagaggcacgatgcccacctgctcattaccaacagcatcaagaagtgagagggttctggcaatcacttggaatcagggagatgggagagtagggaccttggaaatcccaggggactgcctgttgtgggtattgaaaaggactgattttctcagaggtttgactgaccgtcctcccaaaccctgcagtgacctgagccaggggattcagccagtacaaggcctggccttgtgcactttgagcaccatgggctctgctgagatgtgccgagacctggccccagaggtggagaaactgctcctgcagcccagtccctacgtgcgcaagaaggctattctgactgcagtgcacatgatccggaaggtccctgaactctccagtgtcttcctcccaccctgtgcccaactgcttcatgagcgtcaccatggcatcctgctgggcaccatcacgctgatcacggagctctgcgaacgaagccctgcagccctcaggcacttccgaaaggtggtaccccagctggtacacatcctccggactctggtgacaatgggatactccacagaacacagcatatctggagtcagcgaccccttcctgcaggtccagatacttcgtctgcttcggatcctgggccggaaccacgaggagagcagtgagaccatgaatgacttgctggcccaggtggccactaacacggacaccagccgaaatgccggaaatgcggtcctgtttgagacagtactcaccatcatggatatccgctctgcagctggcctacgggttctagctgtcaacattcttggtcgcttcctactcaacagtgacaggaacattaggtatgtagccctgacatcactgcttcgactggtgcagtctgatcacagtgctgtgcagcggcatcggcccactgtggtggaatgtctacgggaaactgatgcctccctcagccggagagccctggaactaagcctggctctggtaaatagctccaatgtgcgagccatgatgcaagagctgcaggcctttctggagtcctgccctcctgacctacgggctgactgtgcctcaggcatcctgctggctgcagagaggtttgctccaaccaaacgctggcacatagacaccatcctgcatgtgctgacaacggcgggcacccatgtgcgggatgatgcagtggccaacctgacccagctgattgggggggcccaggagctacatgcctactctgtgcgccgcctctacaatgccctggcagaagacatttcccagcaaccactggtgcaggtggcagcctggtgcattggggagtatggggacctcctgctggcagggaactgcgaggagattgagccccttcaggtggacgaagaggaagtgctggcattgctggaaaaggtgctgcagtcccacatgtccctgccagccactcgaggatatgccctcacagccctcatgaagctcagcactcgcctctgtggggacaacaaggctgccatcctggaaaaaatgcctcttgtggagcgagatggccctcaggctgatgaggaagcaaaggaaagcaaagaagcagcccagctttcagaagcagccccagtgcccacagagccccaggcctcacagctcctggatctgctagatctcctggatggggcttctggggatgtccagcatcctccccatctggacccctccccaggaggtgccctggtacacctgcttgaccttccctgtgtacctccacccccagctcccatcccagatctcaaagtgtttgagcgtgagggagtacagctgaatctgtctttcattcgaccccctgaaaaccctgctttgctgttaatcaccatcactgccaccaacttctcagagggtgatgtcacccatttcatctgccaggctgctgtgcccaagagtctccagctgcagctgcaggcccccagtgggaacacagttccagctcggggtggccttcctatcacccagctcttcagaatcctcaatcctaacaaggcccccctgcggctaaagctgcgcctcacctacgaccactttcaccagtcggtgcaggagatctttgaggtgaacaacttgcctgtggaatcgtggcagtaactgtctccactcacagcctgaaattctcctgtgtcccaaaccccagggggccccagcagcttcgaacctacacctgagggctaccagcaggtggcgctctggctttgcactgcaaaaactggggaccagcccccttctcccacaaataaagcccaataaagcctgagaagtgaggaaagccaaaaaaaaaaatatttg

SEQ ID NO: 377673 - DNA, 5396 bp, Homo sapiens
  misc_feature (2124)..(2124): n is a, c, g, or t
agctcggtacctacttttcacagggggggacccacaccacccgcaatgccgctgtctctcttcacccctttgacctgccttttttctcttctcctcttcctggctgtgttttctcctatctttctttctcttcttcctttcttttctgtgctcctttgtttttttctctcgctttttctttccctgtcttctttcagattatctcatttcttctggatctgtctctgtattcctcactcccttccccatcccaaccccttctttctctagattgtttacatatgaagggcttttctctctcagagttgctgtcttctctgagacacacaaatctaagtcagaccattgctccacgccctcccaccttttctttagacctcaacttcgctgcgggtgggggtttggtgtcctaaggagactcctggaagctgaatggagaggaggaagaaaatgaagaaggagtgattgaatgtcgggcaaggcactggctgagctgctgtggctccctagcctaaggggcctgctgtccctctgaggcctagtgaaaaagctgcaggaggtgcatcctccacctctaatcttggaggctattatcttacctccaagcactgagctgggttactgcccaattccatccttccctgaaggagagaagggaagtgaaaagtagagtaactccccagcatttccctctttttctcctcatcggccagcccctcctccagccccctctggtggcatgccatgccaagagcaacgtgtaaaggaacagagaatatccaatgcagtcaagtccaccctgcccagactttgccactgacttctcccacccttctgtctcccccataatagtttatttggttggtctggactcacttgtggcctttgattaaattcctaaggggcctgaagaagacatttctactgcagagggttagaggcacttgagcaaggcccccacatcccaactctgggagttgtggtgggaggaggcacttctgggggataggaccagacaagataacaggagctcacatggaagcagaagctgtgacaagtttagtagtcccaaaatgggttatatcccttccccctttacatcagaatcttgtgaaatgggaaaacaacagaaggaggggatcaaagatagctgatctcacatgcttcccaggcagggcagaggtgggagtcaaacccgggtgacaggtgggtggagagccctgtttgaggttgtggctgatccctctctggtattagtttttcccctgggagcaggaagccctaggaagaggggactgcagggtccccaggggatctttcctccctcccctgcatgaggcagaggcaagctgcctgccaaccccctccctcaaggaatggccttgcccaggaatgcccaccacacataccctcttctttttttctagtcaaactcttgtttattccttggcttgcctccctccttcctcccctctcaacctttacttctgatttctatttcatggaatttgggattgaagttaaactacaacagtgccgccaacaccaagtcttgcaggaaaaaaatacaaagaaatttaacaaaaaaaatatattaataaaaaagttcaaaaaaggggggggattgtcatctcctttggggtgcgatggcttcaaatccaaactgaggctctccgggtggtaaggatgtgcgaggaggcctcttgaagaactccaggcctatcatgctgtctctccgctaaagcctgaggcccgaggtcagaggattcaggaaggctctgcagtcggcccaggagggcggggtcccgtggtggaggcggggagagggaaggaccgcacggagcaccaacccctgctcggccccgtaccaggaagcgctggggggcagaggagcggagttgaggcagaagccaggtgaggctggagtcctggggtaggcaggctgtcgctgccgctgccgctgcctgagatggaaatcgggggaggaagctcgcggaagaaacagcggagggtcgtggaaaaaaaagcaatggctgagctagggatggggtaccaggtagggggaggaaacggtagagagaaataggtggggctcccgcgcatgctcaataggaaggggcgccngtggggtgcggacgcatgcgtagtgggcttctcgggcggtggggtgggcgcggaatttggagacccacttcgggaaaggtaaaatgcgggcgcaattttagggtacctgtgggacccgggctcttagggtcttgacacaggacgggcctgggccgaaagcccaggcacgcccgaccagagagtgtttctccactcccggactctgccagtcaggatggtggtgccttcgctgaagcttcaggacctcatcgaagagattcgcggggccaagactcaggcccaggagcgggaggtgatccaaaaggagtgtgcccacatccgggcctccttccgcgacggggacccagtgcacaggcaccggcagctggccaaactgctctacgtccacatgttgggctaccccgcccactttggacagatggagtgcctgaaactgatcgcctcctccagattcacagacaagagggtgggctacctgggggccatgcttctattggatgagaggcacgatgcccacctgctcattaccaacagcatcaagaagtgagagggttctggcaatcacttggaatcagggagatgggagagtagggaccttggaaatcccaggggactgcctgttgtgggtattgaaaaggactgattttctcagaggtttgactgaccgtcctcccaaaccctgcagtgacctgagccaggggattcagccagtacaaggcctggccttgtgcactttgagcaccatgggctctgctgagatgtgccgagacctggccccagaggtggagaaactgctcctgcagcccagtccctacgtgcgcaagaaggctattctgactgcagtgcacatgatccggaaggtccctgaactctccagtgtcttcctcccaccctgtgcccaactgcttcatgagcgtcaccatggtaaggctgtggggccccccatcctttgcttcaggtctatggacagaagaattgaaaatcggatgggaaccccagctcacaggagaagggtagtgcacacacacaggcacacacgcaatagactctcttgcccctggcccccaccattcacttccccgacgctgaccccaggcatcctgctgggcaccatcacgctgatcacggagctctgcgaacgaagccctgcagccctcaggcacttccgaaaggtgggctggtgaaggggcaggccctgggcgtggtaccccagctggtacacatcctccggactctggtgacaatgggatactccacagaacacagcatatctggagtcagcgaccccttcctgcaggtccagatacttcgtctgcttcggatcctgggccggaaccacgaggagagcagtgagaccatgaatgacttgctggcccaggtggccactaacacggacaccagccgaaatgccggaaatgcggtcctgtttgagacagtactcaccatcatggatatccgctctgcagctggcctacgggttctagctgtcaacattcttggtcgcttcctactcaacagtgacaggaacattaggtatgtagccctgacatcactgcttcgactggtgcagtctgatcacagtgctgtgcagcggcatcggcccactgtggtggaatgtctacgggaaactgatgcctccctcagccggtgagcagtgatagaggggacaggagggcagggcagaggttcccagtgccctgtggccaagactcgagccagtttagagcagctggagtaaggggactaagggggacaggtccctggggaagcagagggcctgaggcatggaccaggatgacctgggctacctgcatggaaacctctttctcctgccaggagagccctggaactaagcctggctctggtaaatagctccaatgtgcgagccatgatgcaagagctgcaggcctttctggagtcctgccctcctgacctacgggctgactgtgcctcaggcatcctgctggctgcagagagacaccatcctgcatgtgctgacaacggcgggcacccatgtgcgggatgatgcagtggccaacctgacccagctgattgggggggcccaggagctacatgcctactctgtgcgccgcctctacaatgccctggcagaagacatttcccagcaaccactggtgcaggtggcagcctggtgcattggggagtatggggacctcctgctggcagggaactgcgaggagattgagccccttcaggtggacgaagaggaagtgctggcattgctggaaaaggtgctgcagtcccacatgtccctgccagccactcgaggatatgccctcacagccctcatgaagctcagcactcgcctctgtggggacaacaaccgcatccgccaggtggtgtccatctacgggagctgcttggacgtggagctgcagcagcgggctgtggagtatgacacactcttccggaaatacgaccacatgagggctgccatcctggaaaaaatgcctcttgtggagcgagatggccctcaggctgatgaggaagcaaaggaaagcaaagaagcagcccagctttcagaagcagccccagtgcccacagagccccaggcctcacagctcctggatctgctagatctcctggatggggcttctggggatgtccagcatcctccccatctggacccctccccaggaggtgccctggtacacctgcttgaccttccctgtgtacctccacccccagctcccatcccagatctcaaagtgtttgagcgtgagggagtacagctgaatctgtctttcattcgaccccctgaaaaccctgctttgctgttaatcaccatcactgccaccaacttctcagagggtgatgtcacccatttcatctgccaggctgctgtgcccaagagtctccagctgcagctgcaggcccccagtgggaacacagttccagctcggggtggccttcctatcacccagctcttcagaatcctcaatcctaacaaggcccccctgcggctaaagctgcgcctcacctacgaccactttcaccagtcggtgcaggagatctttgaggtgaacaacttgcctgtggaatcgtggcagtaactgtctccactcacagcctgaaattctcctgtgtcccaaaccccagggggccccagcagcttcgaacctacacctgagggctaccagcaggtggcgctctggctttgcactgcaaaaactggggaccagcccccttctcccacaaataaagcccaataaagcctgagaagtgaggaaagccaaaaaaaaaaatatttg

SEQ ID NO: 377674 - DNA, 5288 bp, Homo sapiens
  misc_feature (2124)..(2124): n is a, c, g, or t
agctcggtacctacttttcacagggggggacccacaccacccgcaatgccgctgtctctcttcacccctttgacctgccttttttctcttctcctcttcctggctgtgttttctcctatctttctttctcttcttcctttcttttctgtgctcctttgtttttttctctcgctttttctttccctgtcttctttcagattatctcatttcttctggatctgtctctgtattcctcactcccttccccatcccaaccccttctttctctagattgtttacatatgaagggcttttctctctcagagttgctgtcttctctgagacacacaaatctaagtcagaccattgctccacgccctcccaccttttctttagacctcaacttcgctgcgggtgggggtttggtgtcctaaggagactcctggaagctgaatggagaggaggaagaaaatgaagaaggagtgattgaatgtcgggcaaggcactggctgagctgctgtggctccctagcctaaggggcctgctgtccctctgaggcctagtgaaaaagctgcaggaggtgcatcctccacctctaatcttggaggctattatcttacctccaagcactgagctgggttactgcccaattccatccttccctgaaggagagaagggaagtgaaaagtagagtaactccccagcatttccctctttttctcctcatcggccagcccctcctccagccccctctggtggcatgccatgccaagagcaacgtgtaaaggaacagagaatatccaatgcagtcaagtccaccctgcccagactttgccactgacttctcccacccttctgtctcccccataatagtttatttggttggtctggactcacttgtggcctttgattaaattcctaaggggcctgaagaagacatttctactgcagagggttagaggcacttgagcaaggcccccacatcccaactctgggagttgtggtgggaggaggcacttctgggggataggaccagacaagataacaggagctcacatggaagcagaagctgtgacaagtttagtagtcccaaaatgggttatatcccttccccctttacatcagaatcttgtgaaatgggaaaacaacagaaggaggggatcaaagatagctgatctcacatgcttcccaggcagggcagaggtgggagtcaaacccgggtgacaggtgggtggagagccctgtttgaggttgtggctgatccctctctggtattagtttttcccctgggagcaggaagccctaggaagaggggactgcagggtccccaggggatctttcctccctcccctgcatgaggcagaggcaagctgcctgccaaccccctccctcaaggaatggccttgcccaggaatgcccaccacacataccctcttctttttttctagtcaaactcttgtttattccttggcttgcctccctccttcctcccctctcaacctttacttctgatttctatttcatggaatttgggattgaagttaaactacaacagtgccgccaacaccaagtcttgcaggaaaaaaatacaaagaaatttaacaaaaaaaatatattaataaaaaagttcaaaaaaggggggggattgtcatctcctttggggtgcgatggcttcaaatccaaactgaggctctccgggtggtaaggatgtgcgaggaggcctcttgaagaactccaggcctatcatgctgtctctccgctaaagcctgaggcccgaggtcagaggattcaggaaggctctgcagtcggcccaggagggcggggtcccgtggtggaggcggggagagggaaggaccgcacggagcaccaacccctgctcggccccgtaccaggaagcgctggggggcagaggagcggagttgaggcagaagccaggtgaggctggagtcctggggtaggcaggctgtcgctgccgctgccgctgcctgagatggaaatcgggggaggaagctcgcggaagaaacagcggagggtcgtggaaaaaaaagcaatggctgagctagggatggggtaccaggtagggggaggaaacggtagagagaaataggtggggctcccgcgcatgctcaataggaaggggcgccngtggggtgcggacgcatgcgtagtgggcttctcgggcggtggggtgggcgcggaatttggagacccacttcgggaaaggtaaaatgcgggcgcaattttagggtacctgtgggacccgggctcttagggtcttgacacaggacgggcctgggccgaaagcccaggcacgcccgaccagagagtgtttctccactcccggactctgccagtcaggatggtggtgccttcgctgaagcttcaggacctcatcgaagagattcgcggggccaagactcaggcccaggagcgggaggtgatccaaaaggagtgtgcccacatccgggcctccttccgcgacggggacccagtgcacaggcaccggcagctggccaaactgctctacgtccacatgttgggctaccccgcccactttggacagatggagtgcctgaaactgatcgcctcctccagattcacagacaagagggtgggctacctgggggccatgcttctattggatgagaggcacgatgcccacctgctcattaccaacagcatcaagaagtgagagggttctggcaatcacttggaatcagggagatgggagagtagggaccttggaaatcccaggggactgcctgttgtgggtattgaaaaggactgattttctcagaggtttgactgaccgtcctcccaaaccctgcagtgacctgagccaggggattcagccagtacaaggcctggccttgtgcactttgagcaccatgggctctgctgagatgtgccgagacctggccccagaggtggagaaactgctcctgcagcccagtccctacgtgcgcaagaaggctattctgactgcagtgcacatgatccggaaggtccctgaactctccagtgtcttcctcccaccctgtgcccaactgcttcatgagcgtcaccatggtaaggctgtggggccccccatcctttgcttcaggtctatggacagaagaattgaaaatcggatgggaaccccagctcacaggagaagggtagtgcacacacacaggcacacacgcaatagactctcttgcccctggcccccaccattcacttccccgacgctgaccccaggcatcctgctgggcaccatcacgctgatcacggagctctgcgaacgaagccctgcagccctcaggcacttccgaaaggtgggctggtgaaggggcaggccctgggcgtggtaccccagctggtacacatcctccggactctggtgacaatgggatactccacagaacacagcatatctggagtcagcgaccccttcctgcaggtccagatacttcgtctgcttcggatcctgggccggaaccacgaggagagcagtgagaccatgaatgacttgctggcccaggtggccactaacacggacaccagccgaaatgccggaaatgcggtcctgtttgagacagtactcaccatcatggatatccgctctgcagctggcctacgggttctagctgtcaacattcttggtcgcttcctactcaacagtgacaggaacattaggtatgtagccctgacatcactgcttcgactggtgcagtctgatcacagtgctgtgcagcggcatcggcccactgtggtggaatgtctacgggaaactgatgcctccctcagccggagagccctggaactaagcctggctctggtaaatagctccaatgtgcgagccatgatgcaagagctgcaggcctttctggagtcctgccctcctgacctacgggctgactgtgcctcaggcatcctgctggctgcagagagacaccatcctgcatgtgctgacaacggtgaggcaggggccagtcagagagctgggcagaagtggtcaagattcaccacactgacttggccatgcccacaccttccaggcgggcacccatgtgcgggatgatgcagtggccaacctgacccagctgattgggggggcccaggagctacatgcctactctgtgcgccgcctctacaatgccctggcagaagacatttcccagcaaccactggtgcaggtggcagcctggtgcattggggagtatggggacctcctgctggcagggaactgcgaggagattgagccccttcaggtggacgaagaggaagtgctggcattgctggaaaaggtgctgcagtcccacatgtccctgccagccactcgaggatatgccctcacagccctcatgaagctcagcactcgcctctgtggggacaacaaccgcatccgccaggtggtgtccatctacgggagctgcttggacgtggagctgcagcagcgggctgtggagtatgacacactcttccggaaatacgaccacatgagggctgccatcctggaaaaaatgcctcttgtggagcgagatggccctcaggctgatgaggaagcaaaggaaagcaaagaagcagcccagctttcagaagcagccccagtgcccacagagccccaggcctcacagctcctggatctgctagatctcctggatggggcttctggggatgtccagcatcctccccatctggacccctccccaggaggtgccctggtacacctgcttgaccttccctgtgtacctccacccccagctcccatcccagatctcaaagtgtttgagcgtgagggagtacagctgaatctgtctttcattcgaccccctgaaaaccctgctttgctgttaatcaccatcactgccaccaacttctcagagggtgatgtcacccatttcatctgccaggctgctgtgcccaagagtctccagctgcagctgcaggcccccagtgggaacacagttccagctcggggtggccttcctatcacccagctcttcagaatcctcaatcctaacaaggcccccctgcggctaaagctgcgcctcacctacgaccactttcaccagtcggtgcaggagatctttgaggtgaacaacttgcctgtggaatcgtggcagtaactgtctccactcacagcctgaaattctcctgtgtcccaaaccccagggggccccagcagcttcgaacctacacctgagggctaccagcaggtggcgctctggctttgcactgcaaaaactggggaccagcccccttctcccacaaataaagcccaataaagcctgagaagtgaggaaagccaaaaaaaaaaatatttg

SEQ ID NO: 377675 - DNA, 4546 bp, Homo sapiens
  misc_feature (2124)..(2124): n is a, c, g, or t
agctcggtacctacttttcacagggggggacccacaccacccgcaatgccgctgtctctcttcacccctttgacctgccttttttctcttctcctcttcctggctgtgttttctcctatctttctttctcttcttcctttcttttctgtgctcctttgtttttttctctcgctttttctttccctgtcttctttcagattatctcatttcttctggatctgtctctgtattcctcactcccttccccatcccaaccccttctttctctagattgtttacatatgaagggcttttctctctcagagttgctgtcttctctgagacacacaaatctaagtcagaccattgctccacgccctcccaccttttctttagacctcaacttcgctgcgggtgggggtttggtgtcctaaggagactcctggaagctgaatggagaggaggaagaaaatgaagaaggagtgattgaatgtcgggcaaggcactggctgagctgctgtggctccctagcctaaggggcctgctgtccctctgaggcctagtgaaaaagctgcaggaggtgcatcctccacctctaatcttggaggctattatcttacctccaagcactgagctgggttactgcccaattccatccttccctgaaggagagaagggaagtgaaaagtagagtaactccccagcatttccctctttttctcctcatcggccagcccctcctccagccccctctggtggcatgccatgccaagagcaacgtgtaaaggaacagagaatatccaatgcagtcaagtccaccctgcccagactttgccactgacttctcccacccttctgtctcccccataatagtttatttggttggtctggactcacttgtggcctttgattaaattcctaaggggcctgaagaagacatttctactgcagagggttagaggcacttgagcaaggcccccacatcccaactctgggagttgtggtgggaggaggcacttctgggggataggaccagacaagataacaggagctcacatggaagcagaagctgtgacaagtttagtagtcccaaaatgggttatatcccttccccctttacatcagaatcttgtgaaatgggaaaacaacagaaggaggggatcaaagatagctgatctcacatgcttcccaggcagggcagaggtgggagtcaaacccgggtgacaggtgggtggagagccctgtttgaggttgtggctgatccctctctggtattagtttttcccctgggagcaggaagccctaggaagaggggactgcagggtccccaggggatctttcctccctcccctgcatgaggcagaggcaagctgcctgccaaccccctccctcaaggaatggccttgcccaggaatgcccaccacacataccctcttctttttttctagtcaaactcttgtttattccttggcttgcctccctccttcctcccctctcaacctttacttctgatttctatttcatggaatttgggattgaagttaaactacaacagtgccgccaacaccaagtcttgcaggaaaaaaatacaaagaaatttaacaaaaaaaatatattaataaaaaagttcaaaaaaggggggggattgtcatctcctttggggtgcgatggcttcaaatccaaactgaggctctccgggtggtaaggatgtgcgaggaggcctcttgaagaactccaggcctatcatgctgtctctccgctaaagcctgaggcccgaggtcagaggattcaggaaggctctgcagtcggcccaggagggcggggtcccgtggtggaggcggggagagggaaggaccgcacggagcaccaacccctgctcggccccgtaccaggaagcgctggggggcagaggagcggagttgaggcagaagccaggtgaggctggagtcctggggtaggcaggctgtcgctgccgctgccgctgcctgagatggaaatcgggggaggaagctcgcggaagaaacagcggagggtcgtggaaaaaaaagcaatggctgagctagggatggggtaccaggtagggggaggaaacggtagagagaaataggtggggctcccgcgcatgctcaataggaaggggcgccngtggggtgcggacgcatgcgtagtgggcttctcgggcggtggggtgggcgcggaatttggagacccacttcgggaaaggtaaaatgcgggcgcaattttagggtacctgtgggacccgggctcttagggtcttgacacaggacgggcctgggccgaaagcccaggcacgcccgaccagagagtgtttctccactcccggactctgccagtcaggatggtggtgccttcgctgaagcttcaggacctcatcgaagagattcgcggggccaagactcaggcccaggagcgggaggtgatccaaaaggagtgtgcccacatccgggcctccttccgcgacggggacccagtgcacaggcaccggcagctggccaaactgctctacgtccacatgttgggctaccccgcccactttggacagatggagtgcctgaaactgatcgcctcctccagattcacagacaagagggtgggctacctgggggccatgcttctattggatgagaggcacgatgcccacctgctcattaccaacagcatcaagaagtgagagggttctggcaatcacttggaatcagggagatgggagagtagggaccttggaaatcccaggggactgcctgttgtgggtattgaaaaggactgattttctcagaggtttgactgaccgtcctcccaaaccctgcagtgacctgagccaggggattcagccagtacaaggcctggccttgtgcactttgagcaccatgggctctgctgagatgtgccgagacctggccccagaggtggagaaactgctcctgcagcccagtccctacgtgcgcaagaaggctattctgactgcagtgcacatgatccggaaggtccctgaactctccagtgtcttcctcccaccctgtgcccaactgcttcatgagcgtcaccatggtaaggctgtggggccccccatcctttgcttcaggtctatggacagaagaattgaaaatcggatgggaaccccagctcacaggagaagggtagtgcacacacacaggcacacacgcaatagactctcttgcccctggcccccaccattcacttccccgacgctgaccccaggcatcctgctgggcaccatcacgctgatcacggagctctgcgaacgaagccctgcagccctcaggcacttccgaaaggtgggctggtgaaggggcaggccctgggcgtggtaccccagctggtacacatcctccggactctggtgacaatgggatactccacagaacacagcatatctggagtcagcgaccccttcctgcaggtccagatacttcgtctgcttcggatcctgggccggaaccacgaggagagcagtgagaccatgaatgacttgctggcccaggtggccactaacacggacaccagccgaaatgccggaaatgcggtcctgtttgagacagtactcaccatcatggatatccgctctgcagctggcctacgggttctagctgtcaacattcttggtcgcttcctactcaacagtgacaggaacattaggtatgtagccctgacatcactgcttcgactggtgcagtctgatcacagtgctgtgcagcggcatcggcccactgtggtggaatgtctacgggaaactgatgcctccctcagccggtgagcagtgatagaggggacaggagggcagggcagaggttcccagtgccctgtggccaagactcgagccagtttagagcagctggagtaaggggactaagggggacaggtccctggggaagcagagggcctgaggcatggaccaggatgacctgggctacctgcatggaaacctctttctcctgccaggagagccctggaactaagcctggctctggtaaatagctccaatgtgcgagccatgatgcaagagctgcaggcctttctggagtcctgcccccctgaaaaccctgctttgctgttaatcaccatcactgccaccaacttctcagagggtgatgtcacccatttcatctgccaggctgctgtgcccaagagtctccagctgcagctgcaggcccccagtgggaacacagttccagctcggggtggccttcctatcacccagctcttcagaatcctcaatcctaacaaggcccccctgcggctaaagctgcgcctcacctacgaccactttcaccagtcggtgcaggagatctttgaggtgaacaacttgcctgtggaatcgtggcagtaactgtctccactcacagcctgaaattctcctgtgtcccaaaccccagggggccccagcagcttcgaacctacacctgagggctaccagcaggtggcgctctggctttgcactgcaaaaactggggaccagcccccttctcccacaaataaagcccaataaagcctgagaagtgaggaaagccaaaaaaaaaaatatttg

SEQ ID NO: 377676 - DNA, 4996 bp, Homo sapiens
  misc_feature (2124)..(2124): n is a, c, g, or t
agctcggtacctacttttcacagggggggacccacaccacccgcaatgccgctgtctctcttcacccctttgacctgccttttttctcttctcctcttcctggctgtgttttctcctatctttctttctcttcttcctttcttttctgtgctcctttgtttttttctctcgctttttctttccctgtcttctttcagattatctcatttcttctggatctgtctctgtattcctcactcccttccccatcccaaccccttctttctctagattgtttacatatgaagggcttttctctctcagagttgctgtcttctctgagacacacaaatctaagtcagaccattgctccacgccctcccaccttttctttagacctcaacttcgctgcgggtgggggtttggtgtcctaaggagactcctggaagctgaatggagaggaggaagaaaatgaagaaggagtgattgaatgtcgggcaaggcactggctgagctgctgtggctccctagcctaaggggcctgctgtccctctgaggcctagtgaaaaagctgcaggaggtgcatcctccacctctaatcttggaggctattatcttacctccaagcactgagctgggttactgcccaattccatccttccctgaaggagagaagggaagtgaaaagtagagtaactccccagcatttccctctttttctcctcatcggccagcccctcctccagccccctctggtggcatgccatgccaagagcaacgtgtaaaggaacagagaatatccaatgcagtcaagtccaccctgcccagactttgccactgacttctcccacccttctgtctcccccataatagtttatttggttggtctggactcacttgtggcctttgattaaattcctaaggggcctgaagaagacatttctactgcagagggttagaggcacttgagcaaggcccccacatcccaactctgggagttgtggtgggaggaggcacttctgggggataggaccagacaagataacaggagctcacatggaagcagaagctgtgacaagtttagtagtcccaaaatgggttatatcccttccccctttacatcagaatcttgtgaaatgggaaaacaacagaaggaggggatcaaagatagctgatctcacatgcttcccaggcagggcagaggtgggagtcaaacccgggtgacaggtgggtggagagccctgtttgaggttgtggctgatccctctctggtattagtttttcccctgggagcaggaagccctaggaagaggggactgcagggtccccaggggatctttcctccctcccctgcatgaggcagaggcaagctgcctgccaaccccctccctcaaggaatggccttgcccaggaatgcccaccacacataccctcttctttttttctagtcaaactcttgtttattccttggcttgcctccctccttcctcccctctcaacctttacttctgatttctatttcatggaatttgggattgaagttaaactacaacagtgccgccaacaccaagtcttgcaggaaaaaaatacaaagaaatttaacaaaaaaaatatattaataaaaaagttcaaaaaaggggggggattgtcatctcctttggggtgcgatggcttcaaatccaaactgaggctctccgggtggtaaggatgtgcgaggaggcctcttgaagaactccaggcctatcatgctgtctctccgctaaagcctgaggcccgaggtcagaggattcaggaaggctctgcagtcggcccaggagggcggggtcccgtggtggaggcggggagagggaaggaccgcacggagcaccaacccctgctcggccccgtaccaggaagcgctggggggcagaggagcggagttgaggcagaagccaggtgaggctggagtcctggggtaggcaggctgtcgctgccgctgccgctgcctgagatggaaatcgggggaggaagctcgcggaagaaacagcggagggtcgtggaaaaaaaagcaatggctgagctagggatggggtaccaggtagggggaggaaacggtagagagaaataggtggggctcccgcgcatgctcaataggaaggggcgccngtggggtgcggacgcatgcgtagtgggcttctcgggcggtggggtgggcgcggaatttggagacccacttcgggaaaggtaaaatgcgggcgcaattttagggtacctgtgggacccgggctcttagggtcttgacacaggacgggcctgggccgaaagcccaggcacgcccgaccagagagtgtttctccactcccggactctgccagtcaggatggtggtgccttcgctgaagcttcaggacctcatcgaagagattcgcggggccaagactcaggcccaggagcgggaggtgatccaaaaggagtgtgcccacatccgggcctccttccgcgacggggacccagtgcacaggcaccggcagctggccaaactgctctacgtccacatgttgggctaccccgcccactttggacagatggagtgcctgaaactgatcgcctcctccagattcacagacaagagggtgggctacctgggggccatgcttctattggatgagaggcacgatgcccacctgctcattaccaacagcatcaagaagtgagagggttctggcaatcacttggaatcagggagatgggagagtagggaccttggaaatcccaggggactgcctgttgtgggtattgaaaaggactgattttctcagaggtttgactgaccgtcctcccaaaccctgcagtgacctgagccaggggattcagccagtacaaggcctggccttgtgcactttgagcaccatgggctctgctgagatgtgccgagacctggccccagaggtggagaaactgctcctgcagcccagtccctacgtgcgcaagaaggctattctgactgcagtgcacatgatccggaaggtccctgaactctccagtgtcttcctcccaccctgtgcccaactgcttcatgagcgtcaccatggcatcctgctgggcaccatcacgctgatcacggagctctgcgaacgaagccctgcagccctcaggcacttccgaaaggtggtaccccagctggtacacatcctccggactctggtgacaatgggatactccacagaacacagcatatctggagtcagcgaccccttcctgcaggtccagatacttcgtctgcttcggatcctgggccggaaccacgaggagagcagtgagaccatgaatgacttgctggcccaggtggccactaacacggacaccagccgaaatgccggaaatgcggtcctgtttgagacagtactcaccatcatggatatccgctctgcagctggcctacgggttctagctgtcaacattcttggtcgcttcctactcaacagtgacaggaacattaggtatgtagccctgacatcactgcttcgactggtgcagtctgatcacagtgctgtgcagcggcatcggcccactgtggtggaatgtctacgggaaactgatgcctccctcagccggagagccctggaactaagcctggctctggtaaatagctccaatgtgcgagccatgatgcaagagctgcaggcctttctggagtcctgccctcctgacctacgggctgactgtgcctcaggcatcctgctggctgcagagaggtttgctccaaccaaacgctggcacatagacaccatcctgcatgtgctgacaacggcgggcacccatgtgcgggatgatgcagtggccaacctgacccagctgattgggggggcccaggagctacatgcctactctgtgcgccgcctctacaatgccctggcagaagacatttcccagcaaccactggtgcaggtggcagcctggtgcattggggagtatggggacctcctgctggcagggaactgcgaggagattgagccccttcaggtggacgaagaggaagtgctggcattgctggaaaaggtgctgcagtcccacatgtccctgccagccactcgaggatatgccctcacagccctcatgaagctcagcactcgcctctgtggggacaacaaccgcatccgccaggtggtgtccatctacgggagctgcttggacgtggagctgcagcagcgggctgtggagtatgacacactcttccggaaatacgaccacatgagggctgccatcctggaaaaaatgcctcttgtggagcgagatggccctcaggctgatgaggaagcaaaggaaagcaaagaagcagcccagctttcagaagcagccccagtgcccacagagccccaggcctcacagctcctggatctgctagatctcctggatggggcttctggggatgtccagcatcctccccatctggacccctccccaggaggtgccctggtacacctgcttgaccttccctgtgtacctccacccccagctcccatcccagatctcaaagtgtttgagcgtgagggagtacagctgaatctgtctttcattcgaccccctgaaaaccctgctttgctgttaatcaccatcactgccaccaacttctcagagggtgatgtcacccatttcatctgccaggctgctgtgcccaagagtctccagctgcagctgcaggcccccagtgggaacacagttccagctcggggtggccttcctatcacccagctcttcagaatcctcaatcctaacaaggcccccctgcggctaaagctgcgcctcacctacgaccactttcaccagtcggtgcaggagatctttgaggtgaacaacttgcctgtggaatcgtggcagtaactgtctccactcacagcctgaaattctcctgtgtcccaaaccccagggggccccagcagcttcgaacctacacctgagggctaccagcaggtggcgctctggctttgcactgcaaactccgcctcccggattcaagcgattctcctgcctcagcctcc

SEQ ID NO: 377677 - DNA, 783 bp, Homo sapiens
ggcaacgtgtgcctttggaggatctgcgcgctgtagcgtctccttcccattctccaagtatctgcggagcaactccaggcactcgcctcacagctcctggatctgctagatctcctggatggggcttctggggatgtccagcatcctccccatctggacccctccccaggaggtgccctggtacacctgcttgaccttccctgtgtacctccacccccagctcccatcccagatctcaaagtgtttgagcgtgagggagtacagctgaatctgtctttcattcgaccccctgaaaaccctgctttgctgttaatcaccatcactgccaccaacttctcagagggtgatgtcacccatttcatctgccaggctgctgtgcccaagagtctccagctgcagctgcaggcccccagtgggaacacagttccagctcggggtggccttcctatcacccagctcttcagaatcctcaatcctaacaaggcccccctgcggctaaagctgcgcctcacctacgaccactttcaccagtcggtgcaggagatctttgaggtgaacaacttgcctgtggaatcgtggcagtaactgtctccactcacagcctgaaattctcctgtgtcccaaaccccagggggccccagcagcttcgaacctacacctgagggctaccagcaggtggcgctctggctttgcactgcaaaaactggggaccagcccccttctcccacaaataaagcccaataaagcctgagaagtgaggaaagccaaaaaaaaaaatatttg

SEQ ID NO: 377678 - DNA, 4934 bp, Homo sapiens
  misc_feature (2124)..(2124): n is a, c, g, or t
agctcggtacctacttttcacagggggggacccacaccacccgcaatgccgctgtctctcttcacccctttgacctgccttttttctcttctcctcttcctggctgtgttttctcctatctttctttctcttcttcctttcttttctgtgctcctttgtttttttctctcgctttttctttccctgtcttctttcagattatctcatttcttctggatctgtctctgtattcctcactcccttccccatcccaaccccttctttctctagattgtttacatatgaagggcttttctctctcagagttgctgtcttctctgagacacacaaatctaagtcagaccattgctccacgccctcccaccttttctttagacctcaacttcgctgcgggtgggggtttggtgtcctaaggagactcctggaagctgaatggagaggaggaagaaaatgaagaaggagtgattgaatgtcgggcaaggcactggctgagctgctgtggctccctagcctaaggggcctgctgtccctctgaggcctagtgaaaaagctgcaggaggtgcatcctccacctctaatcttggaggctattatcttacctccaagcactgagctgggttactgcccaattccatccttccctgaaggagagaagggaagtgaaaagtagagtaactccccagcatttccctctttttctcctcatcggccagcccctcctccagccccctctggtggcatgccatgccaagagcaacgtgtaaaggaacagagaatatccaatgcagtcaagtccaccctgcccagactttgccactgacttctcccacccttctgtctcccccataatagtttatttggttggtctggactcacttgtggcctttgattaaattcctaaggggcctgaagaagacatttctactgcagagggttagaggcacttgagcaaggcccccacatcccaactctgggagttgtggtgggaggaggcacttctgggggataggaccagacaagataacaggagctcacatggaagcagaagctgtgacaagtttagtagtcccaaaatgggttatatcccttccccctttacatcagaatcttgtgaaatgggaaaacaacagaaggaggggatcaaagatagctgatctcacatgcttcccaggcagggcagaggtgggagtcaaacccgggtgacaggtgggtggagagccctgtttgaggttgtggctgatccctctctggtattagtttttcccctgggagcaggaagccctaggaagaggggactgcagggtccccaggggatctttcctccctcccctgcatgaggcagaggcaagctgcctgccaaccccctccctcaaggaatggccttgcccaggaatgcccaccacacataccctcttctttttttctagtcaaactcttgtttattccttggcttgcctccctccttcctcccctctcaacctttacttctgatttctatttcatggaatttgggattgaagttaaactacaacagtgccgccaacaccaagtcttgcaggaaaaaaatacaaagaaatttaacaaaaaaaatatattaataaaaaagttcaaaaaaggggggggattgtcatctcctttggggtgcgatggcttcaaatccaaactgaggctctccgggtggtaaggatgtgcgaggaggcctcttgaagaactccaggcctatcatgctgtctctccgctaaagcctgaggcccgaggtcagaggattcaggaaggctctgcagtcggcccaggagggcggggtcccgtggtggaggcggggagagggaaggaccgcacggagcaccaacccctgctcggccccgtaccaggaagcgctggggggcagaggagcggagttgaggcagaagccaggtgaggctggagtcctggggtaggcaggctgtcgctgccgctgccgctgcctgagatggaaatcgggggaggaagctcgcggaagaaacagcggagggtcgtggaaaaaaaagcaatggctgagctagggatggggtaccaggtagggggaggaaacggtagagagaaataggtggggctcccgcgcatgctcaataggaaggggcgccngtggggtgcggacgcatgcgtagtgggcttctcgggcggtggggtgggcgcggaatttggagacccacttcgggaaaggtaaaatgcgggcgcaattttagggtacctgtgggacccgggctcttagggtcttgacacaggacgggcctgggccgaaagcccaggcacgcccgaccagagagtgtttctccactcccggactctgccagtcaggatggtggtgccttcgctgaagcttcaggacctcatcgaagagattcgcggggccaagactcaggcccaggagcgggaggtgatccaaaaggagtgtgcccacatccgggcctccttccgcgacggggacccagtgcacaggcaccggcagctggccaaactgctctacgtccacatgttgggctaccccgcccactttggacagatggagtgcctgaaactgatcgcctcctccagattcacagacaagagggtgggctacctgggggccatgcttctattggatgagaggcacgatgcccacctgctcattaccaacagcatcaagaagtgagagggttctggcaatcacttggaatcagggagatgggagagtagggaccttggaaatcccaggggactgcctgttgtgggtattgaaaaggactgattttctcagaggtttgactgaccgtcctcccaaaccctgcagtgacctgagccaggggattcagccagtacaaggcctggccttgtgcactttgagcaccatgggctctgctgagatgtgccgagacctggccccagaggtggagaaactgctcctgcagcccagtccctacgtgcgcaagaaggctattctgactgcagtgcacatgatccggaaggtccctgaactctccagtgtcttcctcccaccctgtgcccaactgcttcatgagcgtcaccatggcatcctgctgggcaccatcacgctgatcacggagctctgcgaacgaagccctgcagccctcaggcacttccgaaaggtggtaccccagctggtacacatcctccggactctggtgacaatgggatactccacagaacacagcatatctggagtcagcgaccccttcctgcaggtccagatacttcgtctgcttcggatcctgggccggaaccacgaggagagcagtgagaccatgaatgacttgctggcccaggtggccactaacacggacaccagccgaaatgccggaaatgcggtcctgtttgagacagtactcaccatcatggatatccgctctgcagctggcctacgggttctagctgtcaacattcttggtcgcttcctactcaacagtgacaggaacattaggtatgtagccctgacatcactgcttcgactggtgcagtctgatcacagtgctgtgcagcggcatcggcccactgtggtggaatgtctacgggaaactgatgcctccctcagccggagagccctggaactaagcctggctctggtaaatagctccaatgtgcgagccatgatgcaagagctgcaggcctttctggagtcctgccctcctgacctacgggctgactgtgcctcaggcatcctgctggctgcagagaggtttgctccaaccaaacgctggcacatagacaccatcctgcatgtgctgacaacggcgggcacccatgtgcgggatgatgcagtggccaacctgacccagctgattgggggggcccaggagctacatgcctactctgtgcgccgcctctacaatgccctggcagaagacatttcccagcaaccactggtgcaggtggcagcctggtgcattggggagtatggggacctcctgctggcagggaactgcgaggagattgagccccttcaggtggacgaagaggaagtgctggcattgctggaaaaggtgctgcagtcccacatgtccctgccagccactcgaggatatgccctcacagccctcatgaagctcagcactcgcctctgtggggacaacaaccgcatccgccaggtggtgtccatctacgggagctgcttggacgtggagctgcagcagcgggctgtggagtatgacacactcttccggaaatacgaccacatgagggctgccatcctggaaaaaatgcctcttgtggagcgagatggccctcaggctgatgaggaagcaaaggaaagcaaagaagcagcccagctttcagaagcagccccagtgcccacagagccccaggcctcacagctcctggatctgctagatctcctggatggggcttctggggatgtccagcatcctccccatctggacccctccccaggaggtgccctggtacacctgcttgaccttccctgtgtacctccacccccagctcccatcccagatctcaaagtgtttgagcgtgagggagtacagctgaatctgtctttcattcgaccccctgaaaaccctgctttgctgttaatcaccatcactgccaccaacttctcagagggtgatgtcacccatttcatctgccaggctgctgtgcccaagagtctccagctgcagctgcaggcccccagtgggaacacagttccagctcggggtggccttcctatcacccagctcttcagaatcctcaatcctaacaaggcccccctgcggctaaagctgcgcctcacctacgaccactttcaccagtcggtgcaggagatctttgaggtgaacaacttgcctgtggaatcgtggcagtaactgtctccactcacaactggggaccagcccccttctcccacaaataaagcccaataaagcctgagaagtgaggaaagccaaaaaaaaaaatatttg

SEQ ID NO: 377679 - DNA, 4398 bp, Homo sapiens
  misc_feature (2124)..(2124): n is a, c, g, or t
agctcggtacctacttttcacagggggggacccacaccacccgcaatgccgctgtctctcttcacccctttgacctgccttttttctcttctcctcttcctggctgtgttttctcctatctttctttctcttcttcctttcttttctgtgctcctttgtttttttctctcgctttttctttccctgtcttctttcagattatctcatttcttctggatctgtctctgtattcctcactcccttccccatcccaaccccttctttctctagattgtttacatatgaagggcttttctctctcagagttgctgtcttctctgagacacacaaatctaagtcagaccattgctccacgccctcccaccttttctttagacctcaacttcgctgcgggtgggggtttggtgtcctaaggagactcctggaagctgaatggagaggaggaagaaaatgaagaaggagtgattgaatgtcgggcaaggcactggctgagctgctgtggctccctagcctaaggggcctgctgtccctctgaggcctagtgaaaaagctgcaggaggtgcatcctccacctctaatcttggaggctattatcttacctccaagcactgagctgggttactgcccaattccatccttccctgaaggagagaagggaagtgaaaagtagagtaactccccagcatttccctctttttctcctcatcggccagcccctcctccagccccctctggtggcatgccatgccaagagcaacgtgtaaaggaacagagaatatccaatgcagtcaagtccaccctgcccagactttgccactgacttctcccacccttctgtctcccccataatagtttatttggttggtctggactcacttgtggcctttgattaaattcctaaggggcctgaagaagacatttctactgcagagggttagaggcacttgagcaaggcccccacatcccaactctgggagttgtggtgggaggaggcacttctgggggataggaccagacaagataacaggagctcacatggaagcagaagctgtgacaagtttagtagtcccaaaatgggttatatcccttccccctttacatcagaatcttgtgaaatgggaaaacaacagaaggaggggatcaaagatagctgatctcacatgcttcccaggcagggcagaggtgggagtcaaacccgggtgacaggtgggtggagagccctgtttgaggttgtggctgatccctctctggtattagtttttcccctgggagcaggaagccctaggaagaggggactgcagggtccccaggggatctttcctccctcccctgcatgaggcagaggcaagctgcctgccaaccccctccctcaaggaatggccttgcccaggaatgcccaccacacataccctcttctttttttctagtcaaactcttgtttattccttggcttgcctccctccttcctcccctctcaacctttacttctgatttctatttcatggaatttgggattgaagttaaactacaacagtgccgccaacaccaagtcttgcaggaaaaaaatacaaagaaatttaacaaaaaaaatatattaataaaaaagttcaaaaaaggggggggattgtcatctcctttggggtgcgatggcttcaaatccaaactgaggctctccgggtggtaaggatgtgcgaggaggcctcttgaagaactccaggcctatcatgctgtctctccgctaaagcctgaggcccgaggtcagaggattcaggaaggctctgcagtcggcccaggagggcggggtcccgtggtggaggcggggagagggaaggaccgcacggagcaccaacccctgctcggccccgtaccaggaagcgctggggggcagaggagcggagttgaggcagaagccaggtgaggctggagtcctggggtaggcaggctgtcgctgccgctgccgctgcctgagatggaaatcgggggaggaagctcgcggaagaaacagcggagggtcgtggaaaaaaaagcaatggctgagctagggatggggtaccaggtagggggaggaaacggtagagagaaataggtggggctcccgcgcatgctcaataggaaggggcgccngtggggtgcggacgcatgcgtagtgggcttctcgggcggtggggtgggcgcggaatttggagacccacttcgggaaaggtaaaatgcgggcgcaattttagggtacctgtgggacccgggctcttagggtcttgacacaggacgggcctgggccgaaagcccaggcacgcccgaccagagagtgtttctccactcccggactctgccagtcaggatggtggtgccttcgctgaagcttcaggacctcatcgaagagattcgcggggccaagactcaggcccaggagcgggaggtgatccaaaaggagtgtgcccacatccgggcctccttccgcgacggggacccagtgcacaggcaccggcagctggccaaactgctctacgtccacatgttgggctaccccgcccactttggacagatggagtgcctgaaactgatcgcctcctccagattcacagacaagagggtgggctacctgggggccatgcttctattggatgagaggcacgatgcccacctgctcattaccaacagcatcaagaagtgagagggttctggcaatcacttggaatcagggagatgggagagtagggaccttggaaatcccaggggactgcctgttgtgggtattgaaaaggactgattttctcagaggtttgactgaccgtcctcccaaaccctgcagtgacctgagccaggggattcagccagtacaaggcctggccttgtgcactttgagcaccatgggctctgctgagatgtgccgagacctggccccagaggtggagaaactgctcctgcagcccagtccctacgtgcgcaagaaggctattctgactgcagtgcacatgatccggaaggtccctgaactctccagtgtcttcctcccaccctgtgcccaactgcttcatgagcgtcaccatggtaaggctgtggggccccccatcctttgcttcaggtctatggacagaagaattgaaaatcggatgggaaccccagctcacaggagaagggtagtgcacacacacaggcacacacgcaatagactctcttgcccctggcccccaccattcacttccccgacgctgaccccaggcatcctgctgggcaccatcacgctgatcacggagctctgcgaacgaagccctgcagccctcaggcacttccgaaaggtgggctggtgaaggggcaggccctgggcgtggtaccccagctggtacacatcctccggactctggtgacaatgggatactccacagaacacagcatatctggagtcagcgaccccttcctgcaggtccagatacttcgtctgcttcggatcctgggccggaaccacgaggagagcagtgagaccatgaatgacttgctggcccaggtggccactaacacggacaccagccgaaatgccggaaatgcggtcctgtttgagacagtactcaccatcatggatatccgctctgcagctggcctacgggttctagctgtcaacattcttggtcgcttcctactcaacagtgacaggaacattaggtatgtagccctgacatcactgcttcgactggtgcagtctgatcacagtgctgtgcagcggcatcggcccactgtggtggaatgtctacgggaaactgatgcctccctcagccggtgagcagtgatagaggggacaggagggcagggcagaggttcccagtgccctgtggccaagactcgagccagtttagagcagctggagtaaggggactaagggggacaggtccctggggaagcagagggcctgaggcatggaccaggatgacctgggctacctgcatggaaacctctttctcctgccaggagagccctggaactaagcctggctctggtaaatagctccaatgtgcgagccatgatgcaagagctgcaggcctttctggagtcctgccctcctgacctacgggctgactgtgcctcaggcatcctgctggctgcagagaggtttgctccaaccaaacgctggcacatagacaccatcctgcatgtgctgacaacggtgaggcaggggccagtcagagagctgggcagaagtggtcaagattcaccacactgacttggccatgcccacaccttccaggcgggcacccatgtgcgggatgatgcagtggccaacctgacccagctgattgggggggcccaggagctacatgcctactctgtgcgccgcctctacaatgccctggcagaagacatttcccagggtaccattcccacctacctaggcccagggctgcccaa

SEQ ID NO: 377680 - DNA, 2920 bp, Homo sapiens
  misc_feature (2124)..(2124): n is a, c, g, or t
agctcggtacctacttttcacagggggggacccacaccacccgcaatgccgctgtctctcttcacccctttgacctgccttttttctcttctcctcttcctggctgtgttttctcctatctttctttctcttcttcctttcttttctgtgctcctttgtttttttctctcgctttttctttccctgtcttctttcagattatctcatttcttctggatctgtctctgtattcctcactcccttccccatcccaaccccttctttctctagattgtttacatatgaagggcttttctctctcagagttgctgtcttctctgagacacacaaatctaagtcagaccattgctccacgccctcccaccttttctttagacctcaacttcgctgcgggtgggggtttggtgtcctaaggagactcctggaagctgaatggagaggaggaagaaaatgaagaaggagtgattgaatgtcgggcaaggcactggctgagctgctgtggctccctagcctaaggggcctgctgtccctctgaggcctagtgaaaaagctgcaggaggtgcatcctccacctctaatcttggaggctattatcttacctccaagcactgagctgggttactgcccaattccatccttccctgaaggagagaagggaagtgaaaagtagagtaactccccagcatttccctctttttctcctcatcggccagcccctcctccagccccctctggtggcatgccatgccaagagcaacgtgtaaaggaacagagaatatccaatgcagtcaagtccaccctgcccagactttgccactgacttctcccacccttctgtctcccccataatagtttatttggttggtctggactcacttgtggcctttgattaaattcctaaggggcctgaagaagacatttctactgcagagggttagaggcacttgagcaaggcccccacatcccaactctgggagttgtggtgggaggaggcacttctgggggataggaccagacaagataacaggagctcacatggaagcagaagctgtgacaagtttagtagtcccaaaatgggttatatcccttccccctttacatcagaatcttgtgaaatgggaaaacaacagaaggaggggatcaaagatagctgatctcacatgcttcccaggcagggcagaggtgggagtcaaacccgggtgacaggtgggtggagagccctgtttgaggttgtggctgatccctctctggtattagtttttcccctgggagcaggaagccctaggaagaggggactgcagggtccccaggggatctttcctccctcccctgcatgaggcagaggcaagctgcctgccaaccccctccctcaaggaatggccttgcccaggaatgcccaccacacataccctcttctttttttctagtcaaactcttgtttattccttggcttgcctccctccttcctcccctctcaacctttacttctgatttctatttcatggaatttgggattgaagttaaactacaacagtgccgccaacaccaagtcttgcaggaaaaaaatacaaagaaatttaacaaaaaaaatatattaataaaaaagttcaaaaaaggggggggattgtcatctcctttggggtgcgatggcttcaaatccaaactgaggctctccgggtggtaaggatgtgcgaggaggcctcttgaagaactccaggcctatcatgctgtctctccgctaaagcctgaggcccgaggtcagaggattcaggaaggctctgcagtcggcccaggagggcggggtcccgtggtggaggcggggagagggaaggaccgcacggagcaccaacccctgctcggccccgtaccaggaagcgctggggggcagaggagcggagttgaggcagaagccaggtgaggctggagtcctggggtaggcaggctgtcgctgccgctgccgctgcctgagatggaaatcgggggaggaagctcgcggaagaaacagcggagggtcgtggaaaaaaaagcaatggctgagctagggatggggtaccaggtagggggaggaaacggtagagagaaataggtggggctcccgcgcatgctcaataggaaggggcgccngtggggtgcggacgcatgcgtagtgggcttctcgggcggtggggtgggcgcggaatttggagacccacttcgggaaaggtaaaatgcgggcgcaattttagggtacctgtgggacccgggctcttagggtcttgacacaggacgggcctgggccgaaagcccaggcacgcccgaccagagagtgtttctccactcccggactctgccagtcaggatggtggtgccttcgctgaagcttcaggacctcatcgaagagattcgcggggccaagactcaggcccaggagcgggaggtgatccaaaaggagtgtgcccacatccgggcctccttccgcgacggggacccagtgcacaggcaccggcagctggccaaactgctctacgtccacatgttgggctaccccgcccactttggacaggtactggccaggaatacctccctcctgagcttgatgaaggctagtggggcagagtcccagactctctcacctgtttatgccctggttttttaaattctacaatttcagagtcttcacagcctgcactgcaaacctctttccccattgctacccctactggtcatcagctggcctgaacccttcattctctggccagcctcctttagggcaggcatctcctcctctccgctcccatcctcctcaactcctagttcctcctacccactaacgcctgaatttcctaagcttctcctcttgttgaagggagagtgatgagatatgatgccccacaggttaatctggttttaaagaggaagatggaacagggatgtgagtgtc

SEQ ID NO: 377681 - DNA, 3375 bp, Homo sapiens
  misc_feature (2124)..(2124): n is a, c, g, or t
agctcggtacctacttttcacagggggggacccacaccacccgcaatgccgctgtctctcttcacccctttgacctgccttttttctcttctcctcttcctggctgtgttttctcctatctttctttctcttcttcctttcttttctgtgctcctttgtttttttctctcgctttttctttccctgtcttctttcagattatctcatttcttctggatctgtctctgtattcctcactcccttccccatcccaaccccttctttctctagattgtttacatatgaagggcttttctctctcagagttgctgtcttctctgagacacacaaatctaagtcagaccattgctccacgccctcccaccttttctttagacctcaacttcgctgcgggtgggggtttggtgtcctaaggagactcctggaagctgaatggagaggaggaagaaaatgaagaaggagtgattgaatgtcgggcaaggcactggctgagctgctgtggctccctagcctaaggggcctgctgtccctctgaggcctagtgaaaaagctgcaggaggtgcatcctccacctctaatcttggaggctattatcttacctccaagcactgagctgggttactgcccaattccatccttccctgaaggagagaagggaagtgaaaagtagagtaactccccagcatttccctctttttctcctcatcggccagcccctcctccagccccctctggtggcatgccatgccaagagcaacgtgtaaaggaacagagaatatccaatgcagtcaagtccaccctgcccagactttgccactgacttctcccacccttctgtctcccccataatagtttatttggttggtctggactcacttgtggcctttgattaaattcctaaggggcctgaagaagacatttctactgcagagggttagaggcacttgagcaaggcccccacatcccaactctgggagttgtggtgggaggaggcacttctgggggataggaccagacaagataacaggagctcacatggaagcagaagctgtgacaagtttagtagtcccaaaatgggttatatcccttccccctttacatcagaatcttgtgaaatgggaaaacaacagaaggaggggatcaaagatagctgatctcacatgcttcccaggcagggcagaggtgggagtcaaacccgggtgacaggtgggtggagagccctgtttgaggttgtggctgatccctctctggtattagtttttcccctgggagcaggaagccctaggaagaggggactgcagggtccccaggggatctttcctccctcccctgcatgaggcagaggcaagctgcctgccaaccccctccctcaaggaatggccttgcccaggaatgcccaccacacataccctcttctttttttctagtcaaactcttgtttattccttggcttgcctccctccttcctcccctctcaacctttacttctgatttctatttcatggaatttgggattgaagttaaactacaacagtgccgccaacaccaagtcttgcaggaaaaaaatacaaagaaatttaacaaaaaaaatatattaataaaaaagttcaaaaaaggggggggattgtcatctcctttggggtgcgatggcttcaaatccaaactgaggctctccgggtggtaaggatgtgcgaggaggcctcttgaagaactccaggcctatcatgctgtctctccgctaaagcctgaggcccgaggtcagaggattcaggaaggctctgcagtcggcccaggagggcggggtcccgtggtggaggcggggagagggaaggaccgcacggagcaccaacccctgctcggccccgtaccaggaagcgctggggggcagaggagcggagttgaggcagaagccaggtgaggctggagtcctggggtaggcaggctgtcgctgccgctgccgctgcctgagatggaaatcgggggaggaagctcgcggaagaaacagcggagggtcgtggaaaaaaaagcaatggctgagctagggatggggtaccaggtagggggaggaaacggtagagagaaataggtggggctcccgcgcatgctcaataggaaggggcgccngtggggtgcggacgcatgcgtagtgggcttctcgggcggtggggtgggcgcggaatttggagacccacttcgggaaaggtaaaatgcgggcgcaattttagggtacctgtgggacccgggctcttagggtcttgacacaggacgggcctgggccgaaagcccaggcacgcccgaccagagagtgtttctccactcccggactctgccagtcaggatggtggtgccttcgctgaagcttcaggacctcatcgaagagattcgcggggccaagactcaggcccaggagcgggaggtgatccaaaaggagtgtgcccacatccgggcctccttccgcgacggggacccagtgcacaggcaccggcagctggccaaactgctctacgtccacatgttgggctaccccgcccactttggacagatggagtgcctgaaactgatcgcctcctccagattcacagacaagagggtgggctacctgggggccatgcttctattggatgagaggcacgatgcccacctgctcattaccaacagcatcaagaagtgagagggttctggcaatcacttggaatcagggagatgggagagtagggaccttggaaatcccaggggactgcctgttgtgggtattgaaaaggactgattttctcagaggtttgactgaccgtcctcccaaaccctgcagtgacctgagccaggggattcagccagtacaaggcctggccttgtgcactttgagcaccatgggctctgctgagatgtgccgagacctggccccagaggtggagaaactgctcctgcagcccagtccctacgtgcgcaagaaggctattctgactgcagtgcacatgatccggaaggtccctgaactctccagtgtcttcctcccaccctgtgcccaactgcttcatgagcgtcaccatggtaaggctgtggggccccccatcctttgcttcaggtctatggacagaagaattgaaaatcggatgggaaccccagctcacaggagaagggtagtgcacacacacaggcacacacgcaatagactctcttgcccctggcccccaccattcacttccccgacgctgaccccaggcatcctgctgggcaccatcacgctgatcacggagctctgcgaacgaagccctgcagccctcaggcacttccgaaaggtgggctggtgaaggggcaggccctgggcctggaagacagggtcagtggggaaggaatggggctttagctggagaggat

SEQ ID NO: 377682 - DNA, 370 bp, Homo sapiens
gcttgttggcatgtgcctgtagtcccagccactcaggaggctgaggcaggaggatcatcagagcctgggaggtcaaggctgcagtgagctttgggcgacagagtgagaccctgtatcaaaaaaaggagacctgaggagggccttgagcagatacatctcctctctcatccactcaggtggccactaacacggacaccagccgaaatgccggaaatgcggtcctgtttgagacagtactcaccatcatggatatccgctctgcagctggcctacgggtatcaccccttatgcctctcccactacggccccgcccaccacctcacccacacaggtcctgcttgctggtttctccctcctagccccatcatct

SEQ ID NO: 377683 - DNA, 2490 bp, Homo sapiens
ggcacgaggaactcaggcgccgggcgcactgtcctagctgctggttttccacgctggttttagctcccggcgtctgcaaaatgaagattgaggaggtgaagagcactacgaagacgcagcgcatcgcctcccacagccacgtgaaagggctggggctggacgagagcggcttggccaagcaggcggcctcagggcttgtgggccaggagaacgcgcgagaggcatgtggcgtcatagtagaattaatcaaaagcaagaaaatggctggaagagctgtcttgttggcaggacctcctggaactggcaagacagctctggctctggctattgctcaggagctgggtagtaaggtccccttctgcccaatggtggggagtgaagtttactcaactgagatcaagaagacagaggtgctgatggagaacttccgcagggccattgggctgcgaataaaggagaccaaggaagtttatgaaggtgaagtcacagagctaactccgtgtgagacagagaatcccatgggaggatatggcaaaaccattagccatgtgatcataggactcaaaacagccaaaggaaccaaacagttgaaactggaccccagcatttttgaaagtttgcagaaagagcgagtagaagctggagatgtgatttacattgaagccaacagtggggccgtgaagaggcagggcaggtgtgatacctatgccacagaattcgaccttgaagctgaagagtatgtccccttgccaaaaggggatgtgcacaaaaagaaagaaatcatccaagatgtgaccttgcatgacttggatgtggctaatgcgcggccccaggggggacaagatatcctgtccatgatgggccagctaatgaagccaaagaagacagaaatcacagacaaacttcgaggggagattaataaggtggtgaacaagtacatcgaccagggcattgctgagctggtcccgggtgtgctgtttgttgatgaggtccacatgctggacattgagtgcttcacctacctgcaccgcgccctggagtcttctatcgctcccatcgtcatctttgcatccaaccgaggcaactgtgtcatcagaggcactgaggacatcacatcccctcacggcatccctcttgaccttctggaccgagtgatgataatccggaccatgctgtatactccacaggaaatgaaacagatcattaaaatccgtgcccagacggaaggaatcaacatcagtgaggaggcactgaaccacctgggggagattggcaccaagaccacactgaggtactcagtgcagctgctgaccccggccaacttgcttgctaaaatcaacgggaaggacagcattgagaaagagcatgtcgaagagatcagtgaacttttctatgatgccaagtcctccgccaaaatcctggctgaccagcaggataagtacatgaagtgagatggctgaggttttcagcagtaagagactccccaggtgtgcctggcctgggtccagcctgtgggcgcttgcccctgggcttggggctgccgtccccactcaggcgtggtctgcagcgctgtcagttcagtgtggaaagcatttctttttaagttatcgtaactgttcctgtggttgctttgaaagaacccttccttacctggtgtgttttctataaatcttcataggttattttgattctctctctctctctctctaagttttttaaaaataaacttttcagaacagttaaaaaaaaaaaaaaaaaaaaactcagactagttctctctccctcgtgccgaattcggcacgacgagatggccctcaggctgatgaggaagcaaaggaaagcaaagaagcagcccagctttcagaagcagccccagtgcccacagagccccaggcctcacagctcctggatctgctagatctcctggatggggcttctggggatgtccagcatcctccccatctggacccctccccaggaggtgccctggtacacctgcttgaccttccctgtgtacctccacccccagctcccatcccagatctcaaagtgtttgagcgtgagggagtacagctgaatctgtctttcattcgaccccctgaaaaccctgctttgctgttaatcaccatcactgccaccaacttctcagagggtgatgtcacccatttcatctgccaggctgctgtgcccaagagtctccagctgcagctgcaggcccccagtgggaacacagttccagctcggggtggccttcctatcacccagctcttcagaatcctcaatcctaacaaggcccccctgcggctaaagctgcgcctcacctacgaccactttcaccagtcggtgcaggagatctttgaggtgaacaacttgcctgtggaatcgtggcagtaactgtctccactcacaactggggaccagcccccttctcccacaaataaagcccaataaagcctgagaagtgaggaaagccaaaaaaaaaaatatttg

SEQ ID NO: 377684 - DNA, 5425 bp, Homo sapiens
  misc_feature (2124)..(2124): n is a, c, g, or t
agctcggtacctacttttcacagggggggacccacaccacccgcaatgccgctgtctctcttcacccctttgacctgccttttttctcttctcctcttcctggctgtgttttctcctatctttctttctcttcttcctttcttttctgtgctcctttgtttttttctctcgctttttctttccctgtcttctttcagattatctcatttcttctggatctgtctctgtattcctcactcccttccccatcccaaccccttctttctctagattgtttacatatgaagggcttttctctctcagagttgctgtcttctctgagacacacaaatctaagtcagaccattgctccacgccctcccaccttttctttagacctcaacttcgctgcgggtgggggtttggtgtcctaaggagactcctggaagctgaatggagaggaggaagaaaatgaagaaggagtgattgaatgtcgggcaaggcactggctgagctgctgtggctccctagcctaaggggcctgctgtccctctgaggcctagtgaaaaagctgcaggaggtgcatcctccacctctaatcttggaggctattatcttacctccaagcactgagctgggttactgcccaattccatccttccctgaaggagagaagggaagtgaaaagtagagtaactccccagcatttccctctttttctcctcatcggccagcccctcctccagccccctctggtggcatgccatgccaagagcaacgtgtaaaggaacagagaatatccaatgcagtcaagtccaccctgcccagactttgccactgacttctcccacccttctgtctcccccataatagtttatttggttggtctggactcacttgtggcctttgattaaattcctaaggggcctgaagaagacatttctactgcagagggttagaggcacttgagcaaggcccccacatcccaactctgggagttgtggtgggaggaggcacttctgggggataggaccagacaagataacaggagctcacatggaagcagaagctgtgacaagtttagtagtcccaaaatgggttatatcccttccccctttacatcagaatcttgtgaaatgggaaaacaacagaaggaggggatcaaagatagctgatctcacatgcttcccaggcagggcagaggtgggagtcaaacccgggtgacaggtgggtggagagccctgtttgaggttgtggctgatccctctctggtattagtttttcccctgggagcaggaagccctaggaagaggggactgcagggtccccaggggatctttcctccctcccctgcatgaggcagaggcaagctgcctgccaaccccctccctcaaggaatggccttgcccaggaatgcccaccacacataccctcttctttttttctagtcaaactcttgtttattccttggcttgcctccctccttcctcccctctcaacctttacttctgatttctatttcatggaatttgggattgaagttaaactacaacagtgccgccaacaccaagtcttgcaggaaaaaaatacaaagaaatttaacaaaaaaaatatattaataaaaaagttcaaaaaaggggggggattgtcatctcctttggggtgcgatggcttcaaatccaaactgaggctctccgggtggtaaggatgtgcgaggaggcctcttgaagaactccaggcctatcatgctgtctctccgctaaagcctgaggcccgaggtcagaggattcaggaaggctctgcagtcggcccaggagggcggggtcccgtggtggaggcggggagagggaaggaccgcacggagcaccaacccctgctcggccccgtaccaggaagcgctggggggcagaggagcggagttgaggcagaagccaggtgaggctggagtcctggggtaggcaggctgtcgctgccgctgccgctgcctgagatggaaatcgggggaggaagctcgcggaagaaacagcggagggtcgtggaaaaaaaagcaatggctgagctagggatggggtaccaggtagggggaggaaacggtagagagaaataggtggggctcccgcgcatgctcaataggaaggggcgccngtggggtgcggacgcatgcgtagtgggcttctcgggcggtggggtgggcgcggaatttggagacccacttcgggaaaggtaaaatgcgggcgcaattttagggtacctgtgggacccgggctcttagggtcttgacacaggacgggcctgggccgaaagcccaggcacgcccgaccagagagtgtttctccactcccggactctgccagtcaggatggtggtgccttcgctgaagcttcaggacctcatcgaagagattcgcggggccaagactcaggcccaggagcgggaggtgatccaaaaggagtgtgcccacatccgggcctccttccgcgacggggacccagtgcacaggcaccggcagctggccaaactgctctacgtccacatgttgggctaccccgcccactttggacagatggagtgcctgaaactgatcgcctcctccagattcacagacaagagggtgggctacctgggggccatgcttctattggatgagaggcacgatgcccacctgctcattaccaacagcatcaagaagtgagagggttctggcaatcacttggaatcagggagatgggagagtagggaccttggaaatcccaggggactgcctgttgtgggtattgaaaaggactgattttctcagaggtttgactgaccgtcctcccaaaccctgcagtgacctgagccaggggattcagccagtacaaggcctggccttgtgcactttgagcaccatgggctctgctgagatgtgccgagacctggccccagaggtggagaaactgctcctgcagcccagtccctacgtgcgcaagaaggctattctgactgcagtgcacatgatccggaaggtccctgaactctccagtgtcttcctcccaccctgtgcccaactgcttcatgagcgtcaccatggtaaggctgtggggccccccatcctttgcttcaggtctatggacagaagaattgaaaatcggatgggaaccccagctcacaggagaagggtagtgcacacacacaggcacacacgcaatagactctcttgcccctggcccccaccattcacttccccgacgctgaccccaggcatcctgctgggcaccatcacgctgatcacggagctctgcgaacgaagccctgcagccctcaggcacttccgaaaggtgggctggtgaaggggcaggccctgggcgtggtaccccagctggtacacatcctccggactctggtgacaatgggatactccacagaacacagcatatctggagtcagcgaccccttcctgcaggtccagatacttcgtctgcttcggatcctgggccggaaccacgaggagagcagtgagaccatgaatgacttgctggcccaggtggccactaacacggacaccagccgaaatgccggaaatgcggtcctgtttgagacagtactcaccatcatggatatccgctctgcagctggcctacgggttctagctgtcaacattcttggtcgcttcctactcaacagtgacaggaacattaggtatgtagccctgacatcactgcttcgactggtgcagtctgatcacagtgctgtgcagcggcatcggcccactgtggtggaatgtctacgggaaactgatgcctccctcagccggtgagcagtgatagaggggacaggagggcagggcagaggttcccagtgccctgtggccaagactcgagccagtttagagcagctggagtaaggggactaagggggacaggtccctggggaagcagagggcctgaggcatggaccaggatgacctgggctacctgcatggaaacctctttctcctgccaggagagccctggaactaagcctggctctggtaaatagctccaatgtgcgagccatgatgcaagagctgcaggcctttctggagtcctgccctcctgacctacgggctgactgtgcctcaggcatcctgctggctgcagagaggtttgctccaaccaaacgctggcacatagacaccatcctgcatgtgctgacaacggcgggcacccatgtgcgggatgatgcagtggccaacctgacccagctgattgggggggcccaggagctacatgcctactctgtgcgccgcctctacaatgccctggcagaagacatttcccagcaaccactggtgcaggtggcagcctggtgcattggggagtatggggacctcctgctggcagggaactgcgaggagattgagccccttcaggtggacgaagaggaagtgctggcattgctggaaaaggtgctgcagtcccacatgtccctgccagccactcgaggatatgccctcacagccctcatgaagctcagcactcgcctctgtggggacaacaaccgcatccgccaggtggtgtccatctacgggagctgcttggacgtggagctgcagcagcgggctgtggagtatgacacactcttccggaaatacgaccacatgagggctgccatcctggaaaaaatgcctcttgtggagcgagatggccctcaggctgatgaggaagcaaaggaaagcaaagaagcagcccagctttcagaagcagccccagtgcccacagagccccaggcctcacagctcctggatctgctagatctcctggatggggcttctggggatgtccagcatcctccccatctggacccctccccaggaggtgccctggtacacctgcttgaccttccctgtgtacctccacccccagctcccatcccagatctcaaagtgtttgagcgtgagggagtacagctgaatctgtctttcattcgaccccctgaaaaccctgctttgctgttaatcaccatcactgccaccaacttctcagagggtgatgtcacccatttcatctgccaggctgctgtgcccaagagtctccagctgcagctgcaggcccccagtgggaacacagttccagctcggggtggccttcctatcacccagctcttcagaatcctcaatcctaacaaggcccccctgcggctaaagctgcgcctcacctacgaccactttcaccagtcggtgcaggagatctttgaggtgaacaacttgcctgtggaatcgtggcagtaactgtctccactcacagcctgaaattctcctgtgtcccaaaccccagggggccccagcagcttcgaacctacacctgagggctaccagcaggtggcgctctggctttgcactgcaaaaactggggaccagcccccttctcccacaaataaagcccaataaagcctgagaagtgaggaaagccaaaaaaaaaaatatttg

SEQ ID NO: 377685 - DNA, 5257 bp, Homo sapiens
  misc_feature (2124)..(2124): n is a, c, g, or t
agctcggtacctacttttcacagggggggacccacaccacccgcaatgccgctgtctctcttcacccctttgacctgccttttttctcttctcctcttcctggctgtgttttctcctatctttctttctcttcttcctttcttttctgtgctcctttgtttttttctctcgctttttctttccctgtcttctttcagattatctcatttcttctggatctgtctctgtattcctcactcccttccccatcccaaccccttctttctctagattgtttacatatgaagggcttttctctctcagagttgctgtcttctctgagacacacaaatctaagtcagaccattgctccacgccctcccaccttttctttagacctcaacttcgctgcgggtgggggtttggtgtcctaaggagactcctggaagctgaatggagaggaggaagaaaatgaagaaggagtgattgaatgtcgggcaaggcactggctgagctgctgtggctccctagcctaaggggcctgctgtccctctgaggcctagtgaaaaagctgcaggaggtgcatcctccacctctaatcttggaggctattatcttacctccaagcactgagctgggttactgcccaattccatccttccctgaaggagagaagggaagtgaaaagtagagtaactccccagcatttccctctttttctcctcatcggccagcccctcctccagccccctctggtggcatgccatgccaagagcaacgtgtaaaggaacagagaatatccaatgcagtcaagtccaccctgcccagactttgccactgacttctcccacccttctgtctcccccataatagtttatttggttggtctggactcacttgtggcctttgattaaattcctaaggggcctgaagaagacatttctactgcagagggttagaggcacttgagcaaggcccccacatcccaactctgggagttgtggtgggaggaggcacttctgggggataggaccagacaagataacaggagctcacatggaagcagaagctgtgacaagtttagtagtcccaaaatgggttatatcccttccccctttacatcagaatcttgtgaaatgggaaaacaacagaaggaggggatcaaagatagctgatctcacatgcttcccaggcagggcagaggtgggagtcaaacccgggtgacaggtgggtggagagccctgtttgaggttgtggctgatccctctctggtattagtttttcccctgggagcaggaagccctaggaagaggggactgcagggtccccaggggatctttcctccctcccctgcatgaggcagaggcaagctgcctgccaaccccctccctcaaggaatggccttgcccaggaatgcccaccacacataccctcttctttttttctagtcaaactcttgtttattccttggcttgcctccctccttcctcccctctcaacctttacttctgatttctatttcatggaatttgggattgaagttaaactacaacagtgccgccaacaccaagtcttgcaggaaaaaaatacaaagaaatttaacaaaaaaaatatattaataaaaaagttcaaaaaaggggggggattgtcatctcctttggggtgcgatggcttcaaatccaaactgaggctctccgggtggtaaggatgtgcgaggaggcctcttgaagaactccaggcctatcatgctgtctctccgctaaagcctgaggcccgaggtcagaggattcaggaaggctctgcagtcggcccaggagggcggggtcccgtggtggaggcggggagagggaaggaccgcacggagcaccaacccctgctcggccccgtaccaggaagcgctggggggcagaggagcggagttgaggcagaagccaggtgaggctggagtcctggggtaggcaggctgtcgctgccgctgccgctgcctgagatggaaatcgggggaggaagctcgcggaagaaacagcggagggtcgtggaaaaaaaagcaatggctgagctagggatggggtaccaggtagggggaggaaacggtagagagaaataggtggggctcccgcgcatgctcaataggaaggggcgccngtggggtgcggacgcatgcgtagtgggcttctcgggcggtggggtgggcgcggaatttggagacccacttcgggaaaggtaaaatgcgggcgcaattttagggtacctgtgggacccgggctcttagggtcttgacacaggacgggcctgggccgaaagcccaggcacgcccgaccagagagtgtttctccactcccggactctgccagtcaggatggtggtgccttcgctgaagcttcaggacctcatcgaagagattcgcggggccaagactcaggcccaggagcgggaggtgatccaaaaggagtgtgcccacatccgggcctccttccgcgacggggacccagtgcacaggcaccggcagctggccaaactgctctacgtccacatgttgggctaccccgcccactttggacagatggagtgcctgaaactgatcgcctcctccagattcacagacaagagggtgggctacctgggggccatgcttctattggatgagaggcacgatgcccacctgctcattaccaacagcatcaagaagtgagagggttctggcaatcacttggaatcagggagatgggagagtagggaccttggaaatcccaggggactgcctgttgtgggtattgaaaaggactgattttctcagaggtttgactgaccgtcctcccaaaccctgcagtgacctgagccaggggattcagccagtacaaggcctggccttgtgcactttgagcaccatgggctctgctgagatgtgccgagacctggccccagaggtggagaaactgctcctgcagcccagtccctacgtgcgcaagaaggctattctgactgcagtgcacatgatccggaaggtccctgaactctccagtgtcttcctcccaccctgtgcccaactgcttcatgagcgtcaccatggcatcctgctgggcaccatcacgctgatcacggagctctgcgaacgaagccctgcagccctcaggcacttccgaaaggtggtaccccagctggtacacatcctccggactctggtgacaatgggatactccacagaacacagcatatctggagtcagcgaccccttcctgcaggtccagatacttcgtctgcttcggatcctgggccggaaccacgaggagagcagtgagaccatgaatgacttgctggcccaggtggccactaacacggacaccagccgaaatgccggaaatgcggtcctgtttgagacagtactcaccatcatggatatccgctctgcagctggcctacgggttctagctgtcaacattcttggtcgcttcctactcaacagtgacaggaacattaggtatgtagccctgacatcactgcttcgactggtgcagtctgatcacagtgctgtgcagcggcatcggcccactgtggtggaatgtctacgggaaactgatgcctccctcagccggagagccctggaactaagcctggctctggtaaatagctccaatgtgcgagccatgatgcaagagctgcaggcctttctggagtcctgccctcctgacctacgggctgactgtgcctcaggcatcctgctggctgcagagaggtttgctccaaccaaacgctggcacatagacaccatcctgcatgtgctgacaacggcgggcacccatgtgcgggatgatgcagtggccaacctgacccagctgattgggggggcccaggagctacatgcctactctgtgcgccgcctctacaatgccctggcagaagacatttcccagcaaccactggtgcaggtggcagcctggtgcattggggagtatggggacctcctgctggcagggaactgcgaggagattgagccccttcaggtggacgaagaggaagtgctggcattgctggaaaaggtgctgcagtcccacatgtccctgccagccactcgaggatatgccctcacagccctcatgaagctcagcactcgcctctgtggggacaacaagtaagaaggggtcccagccccttgagagatggcctgtcactgggtccacccatttttgagtttctttccaggcatacatgcccagccctccctaccccctagcccttaggttcttgtttttgagccaaatctgggtatttccctgctccgtgggcctttccttcttgccacatcctgcagtggcacactgccatagccacttacatactacactggcccagccgcatccgccaggtggtgtccatctacgggagctgcttggacgtggagctgcagcagcgggctgtggagtatgacacactcttccggaaatacgaccacatgagggctgccatcctggaaaaaatgcctcttgtggagcgagatggccctcaggctgatgaggaagcaaaggaaagcaaagaagcagcccagctttcagaagcagccccagtgcccacagagccccaggcctcacagctcctggatctgctagatctcctggatggggcttctggggatgtccagcatcctccccatctggacccctccccaggaggtgccctggtacacctgcttgaccttccctgtgtacctccacccccagctcccatcccagatctcaaagtgtttgagcgtgagggagtacagctgaatctgtctttcattcgaccccctgaaaaccctgctttgctgttaatcaccatcactgccaccaacttctcagagggtgatgtcacccatttcatctgccaggctgctgtgcccaagagtctccagctgcagctgcaggcccccagtgggaacacagttccagctcggggtggccttcctatcacccagctcttcagaatcctcaatcctaacaaggcccccctgcggctaaagctgcgcctcacctacgaccactttcaccagtcggtgcaggagatctttgaggtgaacaacttgcctgtggaatcgtggcagtaactgtctccactcacagcctgaaattctcctgtgtcccaaaccccagggggccccagcagcttcgaacctacacctgagggctaccagcaggtggcgctctggctttgcactgcaaaaactggggaccagcccccttctcccacaaataaagcccaataaagcctgagaagtgaggaaagccaaaaaaaaaaatatttg

SEQ ID NO: 377686 - DNA, 5480 bp, Homo sapiens
  misc_feature (2124)..(2124): n is a, c, g, or t
agctcggtacctacttttcacagggggggacccacaccacccgcaatgccgctgtctctcttcacccctttgacctgccttttttctcttctcctcttcctggctgtgttttctcctatctttctttctcttcttcctttcttttctgtgctcctttgtttttttctctcgctttttctttccctgtcttctttcagattatctcatttcttctggatctgtctctgtattcctcactcccttccccatcccaaccccttctttctctagattgtttacatatgaagggcttttctctctcagagttgctgtcttctctgagacacacaaatctaagtcagaccattgctccacgccctcccaccttttctttagacctcaacttcgctgcgggtgggggtttggtgtcctaaggagactcctggaagctgaatggagaggaggaagaaaatgaagaaggagtgattgaatgtcgggcaaggcactggctgagctgctgtggctccctagcctaaggggcctgctgtccctctgaggcctagtgaaaaagctgcaggaggtgcatcctccacctctaatcttggaggctattatcttacctccaagcactgagctgggttactgcccaattccatccttccctgaaggagagaagggaagtgaaaagtagagtaactccccagcatttccctctttttctcctcatcggccagcccctcctccagccccctctggtggcatgccatgccaagagcaacgtgtaaaggaacagagaatatccaatgcagtcaagtccaccctgcccagactttgccactgacttctcccacccttctgtctcccccataatagtttatttggttggtctggactcacttgtggcctttgattaaattcctaaggggcctgaagaagacatttctactgcagagggttagaggcacttgagcaaggcccccacatcccaactctgggagttgtggtgggaggaggcacttctgggggataggaccagacaagataacaggagctcacatggaagcagaagctgtgacaagtttagtagtcccaaaatgggttatatcccttccccctttacatcagaatcttgtgaaatgggaaaacaacagaaggaggggatcaaagatagctgatctcacatgcttcccaggcagggcagaggtgggagtcaaacccgggtgacaggtgggtggagagccctgtttgaggttgtggctgatccctctctggtattagtttttcccctgggagcaggaagccctaggaagaggggactgcagggtccccaggggatctttcctccctcccctgcatgaggcagaggcaagctgcctgccaaccccctccctcaaggaatggccttgcccaggaatgcccaccacacataccctcttctttttttctagtcaaactcttgtttattccttggcttgcctccctccttcctcccctctcaacctttacttctgatttctatttcatggaatttgggattgaagttaaactacaacagtgccgccaacaccaagtcttgcaggaaaaaaatacaaagaaatttaacaaaaaaaatatattaataaaaaagttcaaaaaaggggggggattgtcatctcctttggggtgcgatggcttcaaatccaaactgaggctctccgggtggtaaggatgtgcgaggaggcctcttgaagaactccaggcctatcatgctgtctctccgctaaagcctgaggcccgaggtcagaggattcaggaaggctctgcagtcggcccaggagggcggggtcccgtggtggaggcggggagagggaaggaccgcacggagcaccaacccctgctcggccccgtaccaggaagcgctggggggcagaggagcggagttgaggcagaagccaggtgaggctggagtcctggggtaggcaggctgtcgctgccgctgccgctgcctgagatggaaatcgggggaggaagctcgcggaagaaacagcggagggtcgtggaaaaaaaagcaatggctgagctagggatggggtaccaggtagggggaggaaacggtagagagaaataggtggggctcccgcgcatgctcaataggaaggggcgccngtggggtgcggacgcatgcgtagtgggcttctcgggcggtggggtgggcgcggaatttggagacccacttcgggaaaggtaaaatgcgggcgcaattttagggtacctgtgggacccgggctcttagggtcttgacacaggacgggcctgggccgaaagcccaggcacgcccgaccagagagtgtttctccactcccggactctgccagtcaggatggtggtgccttcgctgaagcttcaggacctcatcgaagagattcgcggggccaagactcaggcccaggagcgggaggtgatccaaaaggagtgtgcccacatccgggcctccttccgcgacggggacccagtgcacaggcaccggcagctggccaaactgctctacgtccacatgttgggctaccccgcccactttggacagatggagtgcctgaaactgatcgcctcctccagattcacagacaagagggtgggctacctgggggccatgcttctattggatgagaggcacgatgcccacctgctcattaccaacagcatcaagaagtgagagggttctggcaatcacttggaatcagggagatgggagagtagggaccttggaaatcccaggggactgcctgttgtgggtattgaaaaggactgattttctcagaggtttgactgaccgtcctcccaaaccctgcagtgacctgagccaggggattcagccagtacaaggcctggccttgtgcactttgagcaccatgggctctgctgagatgtgccgagacctggccccagaggtggagaaactgctcctgcagcccagtccctacgtgcgcaagaaggctattctgactgcagtgcacatgatccggaaggtccctgaactctccagtgtcttcctcccaccctgtgcccaactgcttcatgagcgtcaccatggtaaggctgtggggccccccatcctttgcttcaggtctatggacagaagaattgaaaatcggatgggaaccccagctcacaggagaagggtagtgcacacacacaggcacacacgcaatagactctcttgcccctggcccccaccattcacttccccgacgctgaccccaggcatcctgctgggcaccatcacgctgatcacggagctctgcgaacgaagccctgcagccctcaggcacttccgaaaggtgggctggtgaaggggcaggccctgggcgtggtaccccagctggtacacatcctccggactctggtgacaatgggatactccacagaacacagcatatctggagtcagcgaccccttcctgcaggtccagatacttcgtctgcttcggatcctgggccggaaccacgaggagagcagtgagaccatgaatgacttgctggcccaggtggccactaacacggacaccagccgaaatgccggaaatgcggtcctgtttgagacagtactcaccatcatggatatccgctctgcagctggcctacgggttctagctgtcaacattcttggtcgcttcctactcaacagtgacaggaacattaggtatgtagccctgacatcactgcttcgactggtgcagtctgatcacagtgctgtgcagcggcatcggcccactgtggtggaatgtctacgggaaactgatgcctccctcagccggtgagcagtgatagaggggacaggagggcagggcagaggttcccagtgccctgtggccaagactcgagccagtttagagcagctggagtaaggggactaagggggacaggtccctggggaagcagagggcctgaggcatggaccaggatgacctgggctacctgcatggaaacctctttctcctgccaggagagccctggaactaagcctggctctggtaaatagctccaatgtgcgagccatgatgcaagagctgcagggcagaggttcccagtgccctgtggccaagactcgagccagtttagagcagctggagtaaggggactaagggggacaggtccctggggaagcagagggcctgaggcatcctgctggctgcagagaggtttgctccaaccaaacgctggcacatagacaccatcctgcatgtgctgacaacggcgggcacccatgtgcgggatgatgcagtggccaacctgacccagctgattgggggggcccaggagctacatgcctactctgtgcgccgcctctacaatgccctggcagaagacatttcccagcaaccactggtgcaggtggcagcctggtgcattggggagtatggggacctcctgctggcagggaactgcgaggagattgagccccttcaggtggacgaagaggaagtgctggcattgctggaaaaggtgctgcagtcccacatgtccctgccagccactcgaggatatgccctcacagccctcatgaagctcagcactcgcctctgtggggacaacaaccgcatccgccaggtggtgtccatctacgggagctgcttggacgtggagctgcagcagcgggctgtggagtatgacacactcttccggaaatacgaccacatgagggctgccatcctggaaaaaatgcctcttgtggagcgagatggccctcaggctgatgaggaagcaaaggaaagcaaagaagcagcccagctttcagaagcagccccagtgcccacagagccccaggcctcacagctcctggatctgctagatctcctggatggggcttctggggatgtccagcatcctccccatctggacccctccccaggaggtgccctggtacacctgcttgaccttccctgtgtacctccacccccagctcccatcccagatctcaaagtgtttgagcgtgagggagtacagctgaatctgtctttcattcgaccccctgaaaaccctgctttgctgttaatcaccatcactgccaccaacttctcagagggtgatgtcacccatttcatctgccaggctgctgtgcccaagagtctccagctgcagctgcaggcccccagtgggaacacagttccagctcggggtggccttcctatcacccagctcttcagaatcctcaatcctaacaaggcccccctgcggctaaagctgcgcctcacctacgaccactttcaccagtcggtgcaggagatctttgaggtgaacaacttgcctgtggaatcgtggcagtaactgtctccactcacagcctgaaattctcctgtgtcccaaaccccagggggccccagcagcttcgaacctacacctgagggctaccagcaggtggcgctctggctttgcactgcaaaaactggggaccagcccccttctcccacaaataaagcccaataaagcctgagaagtgaggaaagccaaaaaaaaaaatatttg

SEQ ID NO: 377687 - DNA, 5313 bp, Homo sapiens
  misc_feature (2124)..(2124): n is a, c, g, or t
agctcggtacctacttttcacagggggggacccacaccacccgcaatgccgctgtctctcttcacccctttgacctgccttttttctcttctcctcttcctggctgtgttttctcctatctttctttctcttcttcctttcttttctgtgctcctttgtttttttctctcgctttttctttccctgtcttctttcagattatctcatttcttctggatctgtctctgtattcctcactcccttccccatcccaaccccttctttctctagattgtttacatatgaagggcttttctctctcagagttgctgtcttctctgagacacacaaatctaagtcagaccattgctccacgccctcccaccttttctttagacctcaacttcgctgcgggtgggggtttggtgtcctaaggagactcctggaagctgaatggagaggaggaagaaaatgaagaaggagtgattgaatgtcgggcaaggcactggctgagctgctgtggctccctagcctaaggggcctgctgtccctctgaggcctagtgaaaaagctgcaggaggtgcatcctccacctctaatcttggaggctattatcttacctccaagcactgagctgggttactgcccaattccatccttccctgaaggagagaagggaagtgaaaagtagagtaactccccagcatttccctctttttctcctcatcggccagcccctcctccagccccctctggtggcatgccatgccaagagcaacgtgtaaaggaacagagaatatccaatgcagtcaagtccaccctgcccagactttgccactgacttctcccacccttctgtctcccccataatagtttatttggttggtctggactcacttgtggcctttgattaaattcctaaggggcctgaagaagacatttctactgcagagggttagaggcacttgagcaaggcccccacatcccaactctgggagttgtggtgggaggaggcacttctgggggataggaccagacaagataacaggagctcacatggaagcagaagctgtgacaagtttagtagtcccaaaatgggttatatcccttccccctttacatcagaatcttgtgaaatgggaaaacaacagaaggaggggatcaaagatagctgatctcacatgcttcccaggcagggcagaggtgggagtcaaacccgggtgacaggtgggtggagagccctgtttgaggttgtggctgatccctctctggtattagtttttcccctgggagcaggaagccctaggaagaggggactgcagggtccccaggggatctttcctccctcccctgcatgaggcagaggcaagctgcctgccaaccccctccctcaaggaatggccttgcccaggaatgcccaccacacataccctcttctttttttctagtcaaactcttgtttattccttggcttgcctccctccttcctcccctctcaacctttacttctgatttctatttcatggaatttgggattgaagttaaactacaacagtgccgccaacaccaagtcttgcaggaaaaaaatacaaagaaatttaacaaaaaaaatatattaataaaaaagttcaaaaaaggggggggattgtcatctcctttggggtgcgatggcttcaaatccaaactgaggctctccgggtggtaaggatgtgcgaggaggcctcttgaagaactccaggcctatcatgctgtctctccgctaaagcctgaggcccgaggtcagaggattcaggaaggctctgcagtcggcccaggagggcggggtcccgtggtggaggcggggagagggaaggaccgcacggagcaccaacccctgctcggccccgtaccaggaagcgctggggggcagaggagcggagttgaggcagaagccaggtgaggctggagtcctggggtaggcaggctgtcgctgccgctgccgctgcctgagatggaaatcgggggaggaagctcgcggaagaaacagcggagggtcgtggaaaaaaaagcaatggctgagctagggatggggtaccaggtagggggaggaaacggtagagagaaataggtggggctcccgcgcatgctcaataggaaggggcgccngtggggtgcggacgcatgcgtagtgggcttctcgggcggtggggtgggcgcggaatttggagacccacttcgggaaaggtaaaatgcgggcgcaattttagggtacctgtgggacccgggctcttagggtcttgacacaggacgggcctgggccgaaagcccaggcacgcccgaccagagagtgtttctccactcccggactctgccagtcaggatggtggtgccttcgctgaagcttcaggacctcatcgaagagattcgcggggccaagactcaggcccaggagcgggaggtgatccaaaaggagtgtgcccacatccgggcctccttccgcgacggggacccagtgcacaggcaccggcagctggccaaactgctctacgtccacatgttgggctaccccgcccactttggacagatggagtgcctgaaactgatcgcctcctccagattcacagacaagagggtgggctacctgggggccatgcttctattggatgagaggcacgatgcccacctgctcattaccaacagcatcaagaagtgagagggttctggcaatcacttggaatcagggagatgggagagtagggaccttggaaatcccaggggactgcctgttgtgggtattgaaaaggactgattttctcagaggtttgactgaccgtcctcccaaaccctgcagtgacctgagccaggggattcagccagtacaaggcctggccttgtgcactttgagcaccatgggctctgctgagatgtgccgagacctggccccagaggtggagaaactgctcctgcagcccagtccctacgtgcgcaagaaggctattctgactgcagtgcacatgatccggaaggtccctgaactctccagtgtcttcctcccaccctgtgcccaactgcttcatgagcgtcaccatggtaaggctgtggggccccccatcctttgcttcaggtctatggacagaagaattgaaaatcggatgggaaccccagctcacaggagaagggtagtgcacacacacaggcacacacgcaatagactctcttgcccctggcccccaccattcacttccccgacgctgaccccaggcatcctgctgggcaccatcacgctgatcacggagctctgcgaacgaagccctgcagccctcaggcacttccgaaaggtgggctggtgaaggggcaggccctgggcgtggtaccccagctggtacacatcctccggactctggtgacaatgggatactccacagaacacagcatatctggagtcagcgaccccttcctgcaggtccagatacttcgtctgcttcggatcctgggccggaaccacgaggagagcagtgagaccatgaatgacttgctggcccaggtggccactaacacggacaccagccgaaatgccggaaatgcggtcctgtttgagacagtactcaccatcatggatatccgctctgcagctggcctacgggttctagctgtcaacattcttggtcgcttcctactcaacagtgacaggaacattaggtatgtagccctgacatcactgcttcgactggtgcagtctgatcacagtgctgtgcagcggcatcggcccactgtggtggaatgtctacgggaaactgatgcctccctcagccggagagccctggaactaagcctggctctggtaaatagctccaatgtgcgagccatgatgcaagagctgcaggcctttctggagtcctgccctcctgacctacgggctgactgtgcctcaggcatcctgctggctgcagagaggtgaggtgcccaggagtcgaagagggtagaatctggggagcgtcagtaccaggactgatgagccatatatcccctaggtttgctccaaccaaacgctggcacatagacaccatcctgcatgtgctgacaacggcgggcacccatgtgcgggatgatgcagtggccaacctgacccagctgattgggggggcccaggagctacatgcctactctgtgcgccgcctctacaatgccctggcagaagacatttcccagcaaccactggtgcaggtggcagcctggtgcattggggagtatggggacctcctgctggcagggaactgcgaggagattgagccccttcaggtggacgaagaggaagtgctggcattgctggaaaaggtgctgcagtcccacatgtccctgccagccactcgaggatatgccctcacagccctcatgaagctcagcactcgcctctgtggggacaacaaccgcatccgccaggtggtgtccatctacgggagctgcttggacgtggagctgcagcagcgggctgtggagtatgacacactcttccggaaatacgaccacatgagggctgccatcctggaaaaaatgcctcttgtggagcgagatggccctcaggctgatgaggaagcaaaggaaagcaaagaagcagcccagctttcagaagcagccccagtgcccacagagccccaggcctcacagctcctggatctgctagatctcctggatggggcttctggggatgtccagcatcctccccatctggacccctccccaggaggtgccctggtacacctgcttgaccttccctgtgtacctccacccccagctcccatcccagatctcaaagtgtttgagcgtgagggagtacagctgaatctgtctttcattcgaccccctgaaaaccctgctttgctgttaatcaccatcactgccaccaacttctcagagggtgatgtcacccatttcatctgccaggctgctgtgcccaagagtctccagctgcagctgcaggcccccagtgggaacacagttccagctcggggtggccttcctatcacccagctcttcagaatcctcaatcctaacaaggcccccctgcggctaaagctgcgcctcacctacgaccactttcaccagtcggtgcaggagatctttgaggtgaacaacttgcctgtggaatcgtggcagtaactgtctccactcacagcctgaaattctcctgtgtcccaaaccccagggggccccagcagcttcgaacctacacctgagggctaccagcaggtggcgctctggctttgcactgcaaaaactggggaccagcccccttctcccacaaataaagcccaataaagcctgagaagtgaggaaagccaaaaaaaaaaatatttg

SEQ ID NO: 377688 - DNA, 1341 bp, Homo sapiens
ttcgagcatcggtaccccgggaaattcgtgctgcgtgctcaatagacaccatcactgcatgtgctgacaacggcgggcacccatgtgcgggatgatgcagtggccaacctgacccagctgattgggggggcccaggagctacatgcctactctgtgcgccgcctctacaatgccctggcagaagacatttcccagcaaccactggtgcaggtggcagcctggtgcattggggagtatggggacctcctgctggcagggaactgcgaggagattgagccccttcaggtggacgaagaggaagtgctggcattgctggaaaaggtgctgcagtcccacatgtccctgccagccactcgaggatatgccctcacagccctcatgaagctcagcactcgcctctgtggggacaacaaccgcatccgccaggtggtgtccatctacgggagctgcttggacgtggagctgcagcagcgggctgtggagtatgacacactcttccggaaatacgaccacatgagggctgccatcctggaaaaaatgcctcttgtggagcgagatggccctcaggctgatgaggaagcaaaggaaagcaaagaagcagcccagctttcagaagcagccccagtgcccacagagccccaggcctcacagctcctggatctgctagatctcctggatggggcttctggggatgtccagcatcctccccatctggacccctccccaggaggtgccctggtacacctgcttgaccttccctgtgtacctccacccccagctcccatcccagatctcaaagtgtttgagcgtgagggagtacagctgaatctgtctttcattcgaccccctgaaaaccctgctttgctgttaatcaccatcactgccaccaacttctcagagggtgatgtcacccatttcatctgccaggctgctgtgcccaagagtctccagctgcagctgcaggcccccagtgggaacacagttccagctcggggtggccttcctatcacccagctcttcagaatcctcaatcctaacaaggcccccctgcggctaaagctgcgcctcacctacgaccactttcaccagtcggtgcaggagatctttgaggtgaacaacttgcctgtggaatcgtggcagtaactgtctccactcacagcctgaaattctcctgtgtcccaaaccccagggggccccagcagcttcgaacctacacctgagggctaccagcaggtggcgctctggctttgcactgcaaaaactggggaccagcccccttctcccacaaataaagcccaataaagcctgagaagtgaggaaagccaaaaaaaaaaatatttg

SEQ ID NO: 377689 - DNA, 5254 bp, Homo sapiens
  misc_feature (2124)..(2124): n is a, c, g, or t
agctcggtacctacttttcacagggggggacccacaccacccgcaatgccgctgtctctcttcacccctttgacctgccttttttctcttctcctcttcctggctgtgttttctcctatctttctttctcttcttcctttcttttctgtgctcctttgtttttttctctcgctttttctttccctgtcttctttcagattatctcatttcttctggatctgtctctgtattcctcactcccttccccatcccaaccccttctttctctagattgtttacatatgaagggcttttctctctcagagttgctgtcttctctgagacacacaaatctaagtcagaccattgctccacgccctcccaccttttctttagacctcaacttcgctgcgggtgggggtttggtgtcctaaggagactcctggaagctgaatggagaggaggaagaaaatgaagaaggagtgattgaatgtcgggcaaggcactggctgagctgctgtggctccctagcctaaggggcctgctgtccctctgaggcctagtgaaaaagctgcaggaggtgcatcctccacctctaatcttggaggctattatcttacctccaagcactgagctgggttactgcccaattccatccttccctgaaggagagaagggaagtgaaaagtagagtaactccccagcatttccctctttttctcctcatcggccagcccctcctccagccccctctggtggcatgccatgccaagagcaacgtgtaaaggaacagagaatatccaatgcagtcaagtccaccctgcccagactttgccactgacttctcccacccttctgtctcccccataatagtttatttggttggtctggactcacttgtggcctttgattaaattcctaaggggcctgaagaagacatttctactgcagagggttagaggcacttgagcaaggcccccacatcccaactctgggagttgtggtgggaggaggcacttctgggggataggaccagacaagataacaggagctcacatggaagcagaagctgtgacaagtttagtagtcccaaaatgggttatatcccttccccctttacatcagaatcttgtgaaatgggaaaacaacagaaggaggggatcaaagatagctgatctcacatgcttcccaggcagggcagaggtgggagtcaaacccgggtgacaggtgggtggagagccctgtttgaggttgtggctgatccctctctggtattagtttttcccctgggagcaggaagccctaggaagaggggactgcagggtccccaggggatctttcctccctcccctgcatgaggcagaggcaagctgcctgccaaccccctccctcaaggaatggccttgcccaggaatgcccaccacacataccctcttctttttttctagtcaaactcttgtttattccttggcttgcctccctccttcctcccctctcaacctttacttctgatttctatttcatggaatttgggattgaagttaaactacaacagtgccgccaacaccaagtcttgcaggaaaaaaatacaaagaaatttaacaaaaaaaatatattaataaaaaagttcaaaaaaggggggggattgtcatctcctttggggtgcgatggcttcaaatccaaactgaggctctccgggtggtaaggatgtgcgaggaggcctcttgaagaactccaggcctatcatgctgtctctccgctaaagcctgaggcccgaggtcagaggattcaggaaggctctgcagtcggcccaggagggcggggtcccgtggtggaggcggggagagggaaggaccgcacggagcaccaacccctgctcggccccgtaccaggaagcgctggggggcagaggagcggagttgaggcagaagccaggtgaggctggagtcctggggtaggcaggctgtcgctgccgctgccgctgcctgagatggaaatcgggggaggaagctcgcggaagaaacagcggagggtcgtggaaaaaaaagcaatggctgagctagggatggggtaccaggtagggggaggaaacggtagagagaaataggtggggctcccgcgcatgctcaataggaaggggcgccngtggggtgcggacgcatgcgtagtgggcttctcgggcggtggggtgggcgcggaatttggagacccacttcgggaaaggtaaaatgcgggcgcaattttagggtacctgtgggacccgggctcttagggtcttgacacaggacgggcctgggccgaaagcccaggcacgcccgaccagagagtgtttctccactcccggactctgccagtcaggatggtggtgccttcgctgaagcttcaggacctcatcgaagagattcgcggggccaagactcaggcccaggagcgggaggtgatccaaaaggagtgtgcccacatccgggcctccttccgcgacggggacccagtgcacaggcaccggcagctggccaaactgctctacgtccacatgttgggctaccccgcccactttggacagatggagtgcctgaaactgatcgcctcctccagattcacagacaagagggtgggctacctgggggccatgcttctattggatgagaggcacgatgcccacctgctcattaccaacagcatcaagaagtgagagggttctggcaatcacttggaatcagggagatgggagagtagggaccttggaaatcccaggggactgcctgttgtgggtattgaaaaggactgattttctcagaggtttgactgaccgtcctcccaaaccctgcagtgacctgagccaggggattcagccagtacaaggcctggccttgtgcactttgagcaccatgggctctgctgagatgtgccgagacctggccccagaggtggagaaactgctcctgcagcccagtccctacgtgcgcaagaaggctattctgactgcagtgcacatgatccggaaggtccctgaactctccagtgtcttcctcccaccctgtgcccaactgcttcatgagcgtcaccatggcatcctgctgggcaccatcacgctgatcacggagctctgcgaacgaagccctgcagccctcaggcacttccgaaaggtggtaccccagctggtacacatcctccggactctggtgacaatgggatactccacagaacacagcatatctggagtcagcgaccccttcctgcaggtccagatacttcgtctgcttcggatcctgggccggaaccacgaggagagcagtgagaccatgaatgacttgctggcccaggtggccactaacacggacaccagccgaaatgccggaaatgcggtcctgtttgagacagtactcaccatcatggatatccgctctgcagctggcctacgggttctagctgtcaacattcttggtcgcttcctactcaacagtgacaggaacattaggtatgtagccctgacatcactgcttcgactggtgcagtctgatcacagtgctgtgcagcggcatcggcccactgtggtggaatgtctacgggaaactgatgcctccctcagccggagagccctggaactaagcctggctctggtaaatagctccaatgtgcgagccatgatgcaagagctgcaggcctttctggagtcctgccctcctgacctacgggctgactgtgcctcaggcatcctgctggctgcagagaggtttgctccaaccaaacgctggcacatagacaccatcctgcatgtgctgacaacggcgggcacccatgtgcgggatgatgcagtggccaacctgacccagctgattgggggggcccaggagctacatgcctactctgtgcgccgcctctacaatgccctggcagaagacatttcccagcaaccactggtgcaggtggcagcctggtgcattggggagtatggggacctcctgctggcagggaactgcgaggagattgagccccttcaggtggacgaagaggaagtgctggcattgctggaaaaggtgctgcagtcccacatgtccctgccagccactcgaggatatgccctcacagccctcatgaagctcagcactcgcctctgtggggacaacaaccgcatccgccaggtggtgtccatctacgggagctgcttggacgtggagctgcagcagcgggctgtggagtatgacacactcttccggaaatacgaccacatgagggctgccatcctggaaaaaatgcctcttgtggagcgagatggccctcaggctgatgaggaagcaaaggaaagcaaagaagcagcccagctttcagaagcagccccagtgcccacagagccccaggcctcacagctcctggatctgctagatctcctggatggggcttctggggatgtccagcatcctccccatctggacccctccccaggaggtgccctggtacacctgcttgaccttccctgtgtacctccacccccagctcccatcccagatctcaaagtgtttgagcgtgagggagtacagctgaatctgtctttcattcgaccccctgaaaaccctgctttgctgttaatcaccatcactgccaccaacttctcagagggtgatgtcacccatttcatctgccaggctgctgtgcccaaggtttgtaaagatcagagttcagaggtggcctggggactccaggagaaaaggccactaagtggaggaggtgggtgggagacagtgtgagatgggattgagtcatctggagatcagcacttggggagttacaggaaaagggtgtggagccactgagtatagaggggctgcctgagccctacctactgccatactgtgctctgttaaactcctgtgttcagagtctccagctgcagctgcaggcccccagtgggaacacagttccagctcggggtggccttcctatcacccagctcttcagaatcctcaatcctaacaaggcccccctgcggctaaagctgcgcctcacctacgaccactttcaccagtcggtgcaggagatctttgaggtgaacaacttgcctgtggaatcgtggcagtaactgtctccactcacagcctgaaattctcctgtgtcccaaaccccagggggccccagcagcttcgaacctacacctgagggctaccagcaggtggcgctctggctttgcactgcaaaaactggggaccagcccccttctcccacaaataaagcccaataaagcctgagaagtgaggaaagccaaaaaaaaaaatatttg

SEQ ID NO: 377690 - DNA, 5341 bp, Homo sapiens
  misc_feature (2124)..(2124): n is a, c, g, or t
agctcggtacctacttttcacagggggggacccacaccacccgcaatgccgctgtctctcttcacccctttgacctgccttttttctcttctcctcttcctggctgtgttttctcctatctttctttctcttcttcctttcttttctgtgctcctttgtttttttctctcgctttttctttccctgtcttctttcagattatctcatttcttctggatctgtctctgtattcctcactcccttccccatcccaaccccttctttctctagattgtttacatatgaagggcttttctctctcagagttgctgtcttctctgagacacacaaatctaagtcagaccattgctccacgccctcccaccttttctttagacctcaacttcgctgcgggtgggggtttggtgtcctaaggagactcctggaagctgaatggagaggaggaagaaaatgaagaaggagtgattgaatgtcgggcaaggcactggctgagctgctgtggctccctagcctaaggggcctgctgtccctctgaggcctagtgaaaaagctgcaggaggtgcatcctccacctctaatcttggaggctattatcttacctccaagcactgagctgggttactgcccaattccatccttccctgaaggagagaagggaagtgaaaagtagagtaactccccagcatttccctctttttctcctcatcggccagcccctcctccagccccctctggtggcatgccatgccaagagcaacgtgtaaaggaacagagaatatccaatgcagtcaagtccaccctgcccagactttgccactgacttctcccacccttctgtctcccccataatagtttatttggttggtctggactcacttgtggcctttgattaaattcctaaggggcctgaagaagacatttctactgcagagggttagaggcacttgagcaaggcccccacatcccaactctgggagttgtggtgggaggaggcacttctgggggataggaccagacaagataacaggagctcacatggaagcagaagctgtgacaagtttagtagtcccaaaatgggttatatcccttccccctttacatcagaatcttgtgaaatgggaaaacaacagaaggaggggatcaaagatagctgatctcacatgcttcccaggcagggcagaggtgggagtcaaacccgggtgacaggtgggtggagagccctgtttgaggttgtggctgatccctctctggtattagtttttcccctgggagcaggaagccctaggaagaggggactgcagggtccccaggggatctttcctccctcccctgcatgaggcagaggcaagctgcctgccaaccccctccctcaaggaatggccttgcccaggaatgcccaccacacataccctcttctttttttctagtcaaactcttgtttattccttggcttgcctccctccttcctcccctctcaacctttacttctgatttctatttcatggaatttgggattgaagttaaactacaacagtgccgccaacaccaagtcttgcaggaaaaaaatacaaagaaatttaacaaaaaaaatatattaataaaaaagttcaaaaaaggggggggattgtcatctcctttggggtgcgatggcttcaaatccaaactgaggctctccgggtggtaaggatgtgcgaggaggcctcttgaagaactccaggcctatcatgctgtctctccgctaaagcctgaggcccgaggtcagaggattcaggaaggctctgcagtcggcccaggagggcggggtcccgtggtggaggcggggagagggaaggaccgcacggagcaccaacccctgctcggccccgtaccaggaagcgctggggggcagaggagcggagttgaggcagaagccaggtgaggctggagtcctggggtaggcaggctgtcgctgccgctgccgctgcctgagatggaaatcgggggaggaagctcgcggaagaaacagcggagggtcgtggaaaaaaaagcaatggctgagctagggatggggtaccaggtagggggaggaaacggtagagagaaataggtggggctcccgcgcatgctcaataggaaggggcgccngtggggtgcggacgcatgcgtagtgggcttctcgggcggtggggtgggcgcggaatttggagacccacttcgggaaaggtaaaatgcgggcgcaattttagggtacctgtgggacccgggctcttagggtcttgacacaggacgggcctgggccgaaagcccaggcacgcccgaccagagagtgtttctccactcccggactctgccagtcaggatggtggtgccttcgctgaagcttcaggacctcatcgaagagattcgcggggccaagactcaggcccaggagcgggaggtgatccaaaaggagtgtgcccacatccgggcctccttccgcgacggggacccagtgcacaggcaccggcagctggccaaactgctctacgtccacatgttgggctaccccgcccactttggacagatggagtgcctgaaactgatcgcctcctccagattcacagacaagagggtgggctacctgggggccatgcttctattggatgagaggcacgatgcccacctgctcattaccaacagcatcaagaagtgagagggttctggcaatcacttggaatcagggagatgggagagtagggaccttggaaatcccaggggactgcctgttgtgggtattgaaaaggactgattttctcagaggtttgactgaccgtcctcccaaaccctgcagtgacctgagccaggggattcagccagtacaaggcctggccttgtgcactttgagcaccatgggctctgctgagatgtgccgagacctggccccagaggtggagaaactgctcctgcagcccagtccctacgtgcgcaagaaggctattctgactgcagtgcacatgatccggaaggtccctgaactctccagtgtcttcctcccaccctgtgcccaactgcttcatgagcgtcaccatggcatcctgctgggcaccatcacgctgatcacggagctctgcgaacgaagccctgcagccctcaggcacttccgaaaggtggtaccccagctggtacacatcctccggactctggtgacaatgggatactccacagaacacagcatatctggagtcagcgaccccttcctgcaggtccagatacttcgtctgcttcggatcctgggccggaaccacgaggagagcagtgagaccatgaatgacttgctggcccaggtggccactaacacggacaccagccgaaatgccggaaatgcggtcctgtttgagacagtactcaccatcatggatatccgctctgcagctggcctacgggttctagctgtcaacattcttggtcgcttcctactcaacagtgacaggaacattaggtatgtagccctgacatcactgcttcgactggtgcagtctgatcacagtgctgtgcagcggcatcggcccactgtggtggaatgtctacgggaaactgatgcctccctcagccggagagccctggaactaagcctggctctggtaaatagctccaatgtgcgagccatgatgcaagagctgcaggcctttctggagtcctgccctcctgacctacgggctgactgtgcctcaggcatcctgctggctgcagagaggtttgctccaaccaaacgctggcacatagacaccatcctgcatgtgctgacaacggcgggcacccatgtgcgggatgatgcagtggccaacctgacccagctgattgggggggcccaggagctacatgcctactctgtgcgccgcctctacaatgccctggcagaagacatttcccagcaaccactggtgcaggtggcagcctggtgcattggggagtatggggacctcctgctggcagggaactgcgaggagattgagccccttcaggtggacgaagaggaagtgctggcattgctggaaaaggtgctgcagtcccacatgtccctgccagccactcgaggatatgccctcacagccctcatgaagctcagcactcgcctctgtggggacaacaaccgcatccgccaggtggtgtccatctacgggagctgcttggacgtggagctgcagcagcgggctgtggagtatgacacactcttccggaaatacgaccacatgagggctgccatcctggaaaaaatgcctcttgtggagcgagatggccctcaggctgatgaggaagcaaaggaaagcaaagaagcagcccagctttcagaagcagccccagtgcccacagagccccaggcctcacagctcctggatctgctagatctcctggatggggcttctggggatgtccagcatcctccccatctggacccctccccaggaggtgccctggtacacctgcttgaccttccctgtgtacctccacccccagctcccatcccagatctcaaagtgtttgagcgtgagggagtacagctgaatctgtctttcattcgaccccctgaaaaccctgctttgctgttaatcaccatcactgccaccaacttctcagagggtgatgtcacccatttcatctgccaggctgctgtgcccaaggtttgtaaagatcagagttcagaggtggcctggggactccaggagaaaaggccactaagtggaggaggtgggtgggagacagtgtgagatgggattgagtcatctggagatcagcacttggggagttacaggaaaagggtgtggagccactgagtatagaggggctgcctgagccctacctactgccatactgtgctctgttaaactcctgtgttcagagtctccagctgcagctgcaggcccccagtgggaacacagttccagctcggggtggccttcctatcacccagctcttcagaatcctcaatcctaacaaggtgagcttcaggagttcccccaagacaagacccagggatagaagaagccgtgggtgctaaccctggtccctgctctcctattcctaggcccccctgcggctaaagctgcgcctcacctacgaccactttcaccagtcggtgcaggagatctttgaggtgaacaacttgcctgtggaatcgtggcagtaactgtctccactcacagcctgaaattctcctgtgtcccaaaccccagggggccccagcagcttcgaacctacacctgagggctaccagcaggtggcgctctggctttgcactgcaaaaactggggaccagcccccttctcccacaaataaagcccaataaagcctgagaagtgaggaaagccaaaaaaaaaaatatttg

SEQ ID NO: 377691 - DNA, 4275 bp, Homo sapiens
  misc_feature (2124)..(2124): n is a, c, g, or t
agctcggtacctacttttcacagggggggacccacaccacccgcaatgccgctgtctctcttcacccctttgacctgccttttttctcttctcctcttcctggctgtgttttctcctatctttctttctcttcttcctttcttttctgtgctcctttgtttttttctctcgctttttctttccctgtcttctttcagattatctcatttcttctggatctgtctctgtattcctcactcccttccccatcccaaccccttctttctctagattgtttacatatgaagggcttttctctctcagagttgctgtcttctctgagacacacaaatctaagtcagaccattgctccacgccctcccaccttttctttagacctcaacttcgctgcgggtgggggtttggtgtcctaaggagactcctggaagctgaatggagaggaggaagaaaatgaagaaggagtgattgaatgtcgggcaaggcactggctgagctgctgtggctccctagcctaaggggcctgctgtccctctgaggcctagtgaaaaagctgcaggaggtgcatcctccacctctaatcttggaggctattatcttacctccaagcactgagctgggttactgcccaattccatccttccctgaaggagagaagggaagtgaaaagtagagtaactccccagcatttccctctttttctcctcatcggccagcccctcctccagccccctctggtggcatgccatgccaagagcaacgtgtaaaggaacagagaatatccaatgcagtcaagtccaccctgcccagactttgccactgacttctcccacccttctgtctcccccataatagtttatttggttggtctggactcacttgtggcctttgattaaattcctaaggggcctgaagaagacatttctactgcagagggttagaggcacttgagcaaggcccccacatcccaactctgggagttgtggtgggaggaggcacttctgggggataggaccagacaagataacaggagctcacatggaagcagaagctgtgacaagtttagtagtcccaaaatgggttatatcccttccccctttacatcagaatcttgtgaaatgggaaaacaacagaaggaggggatcaaagatagctgatctcacatgcttcccaggcagggcagaggtgggagtcaaacccgggtgacaggtgggtggagagccctgtttgaggttgtggctgatccctctctggtattagtttttcccctgggagcaggaagccctaggaagaggggactgcagggtccccaggggatctttcctccctcccctgcatgaggcagaggcaagctgcctgccaaccccctccctcaaggaatggccttgcccaggaatgcccaccacacataccctcttctttttttctagtcaaactcttgtttattccttggcttgcctccctccttcctcccctctcaacctttacttctgatttctatttcatggaatttgggattgaagttaaactacaacagtgccgccaacaccaagtcttgcaggaaaaaaatacaaagaaatttaacaaaaaaaatatattaataaaaaagttcaaaaaaggggggggattgtcatctcctttggggtgcgatggcttcaaatccaaactgaggctctccgggtggtaaggatgtgcgaggaggcctcttgaagaactccaggcctatcatgctgtctctccgctaaagcctgaggcccgaggtcagaggattcaggaaggctctgcagtcggcccaggagggcggggtcccgtggtggaggcggggagagggaaggaccgcacggagcaccaacccctgctcggccccgtaccaggaagcgctggggggcagaggagcggagttgaggcagaagccaggtgaggctggagtcctggggtaggcaggctgtcgctgccgctgccgctgcctgagatggaaatcgggggaggaagctcgcggaagaaacagcggagggtcgtggaaaaaaaagcaatggctgagctagggatggggtaccaggtagggggaggaaacggtagagagaaataggtggggctcccgcgcatgctcaataggaaggggcgccngtggggtgcggacgcatgcgtagtgggcttctcgggcggtggggtgggcgcggaatttggagacccacttcgggaaaggtaaaatgcgggcgcaattttagggtacctgtgggacccgggctcttagggtcttgacacaggacgggcctgggccgaaagcccaggcacgcccgaccagagagtgtttctccactcccggactctgccagtcaggatggtggtgccttcgctgaagcttcaggacctcatcgaagagattcgcggggccaagactcaggcccaggagcgggaggtgatccaaaaggagtgtgcccacatccgggcctccttccgcgacggggacccagtgcacaggcaccggcagctggccaaactgctctacgtccacatgttgggctaccccgcccactttggacagatggagtgcctgaaactgatcgcctcctccagattcacagacaagagggtgggctacctgggggccatgcttctattggatgagaggcacgatgcccacctgctcattaccaacagcatcaagaagtgagagggttctggcaatcacttggaatcagggagatgggagagtagggaccttggaaatcccaggggactgcctgttgtgggtattgaaaaggactgattttctcagaggtttgactgaccgtcctcccaaaccctgcagtgacctgagccaggggattcagccagtacaaggcctggccttgtgcactttgagcaccatgggctctgctgagatgtgccgagacctggccccagaggtggagaaactgctcctgcagcccagtccctacgtgcgcaagaaggctattctgactgcagtgcacatgatccggaaggtccctgaactctccagtgtcttcctcccaccctgtgcccaactgcttcatgagcgtcaccatggcatcctgctgggcaccatcacgctgatcacggagctctgcgaacgaagccctgcagccctcaggcacttccgaaaggtggtaccccagctggtacacatcctccggactctggtgacaatgggatactccacagaacacagcatatctggagtcagcgaccccttcctgcaggtccagatacttcgtctgcttcggatcctgggccggaaccacgaggagagcagtgagaccatgaatgacttgctggcccaggtggccactaacacggacaccagccgaaatgccggaaatgcggtcctgtttgagacagtactcaccatcatggatatccgctctgcagctggcctacgggttctagctgtcaacattcttggtcgcttcctactcaacagtgacaggaacattaggtatgtagccctgacatcactgcttcgactggtgcagtctgatcacagtgctgtgcagcggcatcggcccactgtggtggaatgtctacgggaaactgatgcctccctcagccggagagccctggaactaagcctggctctggtaaatagctccaatgtgcgagccatgatgcaagagctgcaggcctttctggagtcctgccctcctgacctacgggctgactgtgcctcaggcatcctgctggctgcagagaggtttgctccaaccaaacgctggcacatagacaccatcctgcatgtgctgacaacggcgggcacccatgtgcgggatgatgcagtggccaacctgacccagctgattgggggggcccaggagctacatgcctactctgtgcgccgcctctacaatgccctggcagaagacatttcccagcaaccactggtgcaggtggcagcctggtgcattggggagtatggggacctcctgctggcagggaactgcgaggagattgagccccttcaggtggacgaagaggaagtgctggcattgctggaaaaggtgctgcagtcccacatgtccctgccagccactcgaggatatgccctcacagccctcatgaagctcagcactcgcctctgtggggacaacaagtaagaaggggtcccagccccttgagagatggcctgtcactgggtccacccatttttgagtttctttccaggcatacatgcccagaactggggaccagcccccttctcccacaaataaagcccaataaagcctgagaagtgaggaaagccaaaaaaaaaaatatttg

SEQ ID NO: 377692 - DNA, 4158 bp, Homo sapiens
  misc_feature (2124)..(2124): n is a, c, g, or t
agctcggtacctacttttcacagggggggacccacaccacccgcaatgccgctgtctctcttcacccctttgacctgccttttttctcttctcctcttcctggctgtgttttctcctatctttctttctcttcttcctttcttttctgtgctcctttgtttttttctctcgctttttctttccctgtcttctttcagattatctcatttcttctggatctgtctctgtattcctcactcccttccccatcccaaccccttctttctctagattgtttacatatgaagggcttttctctctcagagttgctgtcttctctgagacacacaaatctaagtcagaccattgctccacgccctcccaccttttctttagacctcaacttcgctgcgggtgggggtttggtgtcctaaggagactcctggaagctgaatggagaggaggaagaaaatgaagaaggagtgattgaatgtcgggcaaggcactggctgagctgctgtggctccctagcctaaggggcctgctgtccctctgaggcctagtgaaaaagctgcaggaggtgcatcctccacctctaatcttggaggctattatcttacctccaagcactgagctgggttactgcccaattccatccttccctgaaggagagaagggaagtgaaaagtagagtaactccccagcatttccctctttttctcctcatcggccagcccctcctccagccccctctggtggcatgccatgccaagagcaacgtgtaaaggaacagagaatatccaatgcagtcaagtccaccctgcccagactttgccactgacttctcccacccttctgtctcccccataatagtttatttggttggtctggactcacttgtggcctttgattaaattcctaaggggcctgaagaagacatttctactgcagagggttagaggcacttgagcaaggcccccacatcccaactctgggagttgtggtgggaggaggcacttctgggggataggaccagacaagataacaggagctcacatggaagcagaagctgtgacaagtttagtagtcccaaaatgggttatatcccttccccctttacatcagaatcttgtgaaatgggaaaacaacagaaggaggggatcaaagatagctgatctcacatgcttcccaggcagggcagaggtgggagtcaaacccgggtgacaggtgggtggagagccctgtttgaggttgtggctgatccctctctggtattagtttttcccctgggagcaggaagccctaggaagaggggactgcagggtccccaggggatctttcctccctcccctgcatgaggcagaggcaagctgcctgccaaccccctccctcaaggaatggccttgcccaggaatgcccaccacacataccctcttctttttttctagtcaaactcttgtttattccttggcttgcctccctccttcctcccctctcaacctttacttctgatttctatttcatggaatttgggattgaagttaaactacaacagtgccgccaacaccaagtcttgcaggaaaaaaatacaaagaaatttaacaaaaaaaatatattaataaaaaagttcaaaaaaggggggggattgtcatctcctttggggtgcgatggcttcaaatccaaactgaggctctccgggtggtaaggatgtgcgaggaggcctcttgaagaactccaggcctatcatgctgtctctccgctaaagcctgaggcccgaggtcagaggattcaggaaggctctgcagtcggcccaggagggcggggtcccgtggtggaggcggggagagggaaggaccgcacggagcaccaacccctgctcggccccgtaccaggaagcgctggggggcagaggagcggagttgaggcagaagccaggtgaggctggagtcctggggtaggcaggctgtcgctgccgctgccgctgcctgagatggaaatcgggggaggaagctcgcggaagaaacagcggagggtcgtggaaaaaaaagcaatggctgagctagggatggggtaccaggtagggggaggaaacggtagagagaaataggtggggctcccgcgcatgctcaataggaaggggcgccngtggggtgcggacgcatgcgtagtgggcttctcgggcggtggggtgggcgcggaatttggagacccacttcgggaaaggtaaaatgcgggcgcaattttagggtacctgtgggacccgggctcttagggtcttgacacaggacgggcctgggccgaaagcccaggcacgcccgaccagagagtgtttctccactcccggactctgccagtcaggatggtggtgccttcgctgaagcttcaggacctcatcgaagagattcgcggggccaagactcaggcccaggagcgggaggtgatccaaaaggagtgtgcccacatccgggcctccttccgcgacggggacccagtgcacaggcaccggcagctggccaaactgctctacgtccacatgttgggctaccccgcccactttggacagatggagtgcctgaaactgatcgcctcctccagattcacagacaagagggtgggctacctgggggccatgcttctattggatgagaggcacgatgcccacctgctcattaccaacagcatcaagaagtgagagggttctggcaatcacttggaatcagggagatgggagagtagggaccttggaaatcccaggggactgcctgttgtgggtattgaaaaggactgattttctcagaggtttgactgaccgtcctcccaaaccctgcagtgacctgagccaggggattcagccagtacaaggcctggccttgtgcactttgagcaccatgggctctgctgagatgtgccgagacctggccccagaggtggagaaactgctcctgcagcccagtccctacgtgcgcaagaaggctattctgactgcagtgcacatgatccggaaggtccctgaactctccagtgtcttcctcccaccctgtgcccaactgcttcatgagcgtcaccatggcatcctgctgggcaccatcacgctgatcacggagctctgcgaacgaagccctgcagccctcaggcacttccgaaaggtggtaccccagctggtacacatcctccggactctggtgacaatgggatactccacagaacacagcatatctggagtcagcgaccccttcctgcaggtccagatacttcgtctgcttcggatcctgggccggaaccacgaggagagcagtgagaccatgaatgacttgctggcccaggtggccactaacacggacaccagccgaaatgccggaaatgcggtcctgtttgagacagtactcaccatcatggatatccgctctgcagctggcctacgggttctagctgtcaacattcttggtcgcttcctactcaacagtgacaggaacattaggtatgtagccctgacatcactgcttcgactggtgcagtctgatcacagtgctgtgcagcggcatcggcccactgtggtggaatgtctacgggaaactgatgcctccctcagccggagagccctggaactaagcctggctctggtaaatagctccaatgtgcgagccatgatgcaagagctgcaggcctttctggagtcctgccctcctgacctacgggctgactgtgcctcaggcatcctgctggctgcagagaggtttgctccaaccaaacgctggcacatagacaccatcctgcatgtgctgacaacggtgaggcaggggccagtcagagagctgggcagaagtggtcaagattcaccacactgacttggccatgcccacaccttccaggcgggcacccatgtgcgggatgatgcagtggccaacctgacccagctgattgggggggcccaggagctacatgcctactctgtgcgccgcctctacaatgccctggcagaagacatttcccaggtcacagctgcttacacagtgcagaagacatctgagcacagagccctgtttttaagaacatctgggcttttgtcctgactctggtacctcctggttatgtaactacagatgactaacttcccttatgctccatgtaccctgactgcctcttagagctgccttgagattaaagctcttgtgtttatga

SEQ ID NO: 377693 - DNA, 1110 bp, Homo sapiens
tcgatgacgaggcccaggaagcacgctgaaaccctgggcggcggcaagctgtgcgacctcttctgcggccggcctgggcaggtgtctctgcctcagcctcccaatgtgctgggattacaggaatgagccaccatgcccagcccaagaagtagagtttcttttatactgactttggcctaaaaaaacagattttcatggaggaaaaaaaaacctagatttttagtaagactattttatatacttttttacattgatcaagtacattatttttaccaaacaacattgtttcccactacatccatggttatgtataaaaaaacgccattgtcaattaagatgttaaaaaattatttccataagagtattaaattctaatctatgattcacttaacttcctactttataaacactaggtaaagtaatctcacaagctgccaaagaacacatcccaagcagtaatcacagacgatgaagcaccttacaggacccctccaccctcaaacgcgcatgtccagagaagtattaatgccttaatagactactgaaggttaactatttacatcattctaaaaatattttaagctgtattacagtgctataaattctccttttaaggaaaaaagtaatagattgtttccttaccgtgtttgaaaggaaaaaaaataaatccatagtaactaatggtctgccgattttttccctgaatttttaaactccaacaaagcattattttgcaaaaagtcctttagcccaaagtcagtgtctctgttttgatctctttgtaaaagaactctctgttcatccattctctttccctgggaccgtaaaataaggctgaaaaagtcttcatctggtactgtcggaccctttgtggtagcaggtggtggagcacatctttgatcatctaatctggatccctagaagtttatgagagagattaaaagacatactgtgggaaagaaagcaccaagctatgttaaatctctcagtcacaacaagaaaacgcagttgtaaacttttatttggggcttctcagaaattaatctttgtttttatattgttctctttagttcccagcctgatttctgaaagaaataatctttaaacctg

SEQ ID NO: 377694 - DNA, 4982 bp, Homo sapiens
tcgatgacgaggcccaggaagcacgctgaaaccctgggcggcggcaagctgtgcgacctcttctgcggccggcctgggcaggtgtcttcctcgagaggcaggcaggggatcccggacactagctttatcgtcatctgggaaattgttaaaaatgcaaattcgcaagtttgagagccatggttccaagaaactgcataagcatacgaaataagttgcagcctcccgacttataccctggtacttctagtctaaaacaggatttgactctactaatccagccttatacaggatgctgtgttctttgctcctttgtgaatgtctgttgctggtagctggttatgctcatgatgatgactggattgaccccacagacatgcttaactatgatgctgcttcaggaacaatgagaaaatctcaggcaaaatatggtatttcaggggaaaaggatgtcagtcctgacttgtcatgtgctgatgaaatatcagaatgttatcacaaacttgattctttaacttataagattgatgagtgtgaaaagaaaaagagggaagactatgaaagtcaaagcaatcctgtttttaggagatacttaaataagattttaattgaagctggaaagcttggacttcctgatgaaaacaaaggcgatatgcattatgatgctgagattatccttaaaagagaaactttgttagaaatacagaagtttctcaatggagaagactggaaaccaggtgccttggatgatgcactaagtgatattttaattaattttaagtttcatgattttgaaacatggaagtggcgattcgaagattcctttggagtggatccatataatgtgttaatggtacttctttgtctgctctgcatcgtggttttagtggctactgagctgtggacatatgtacgttggtacactcagttgagacgtgttttaatcatcagctttctgttcagtttgggatggaattggatgtatttatataagctagcttttgcacagcatcaggctgaagtcgccaagatggagccattaaacaatgtgtgtgccaaaaagatggactggactggaagtatctgggaatggtttagaagttcatggacctataaggatgacccatgccaaaaatactatgagctcttactagtcaaccctatttggttggtcccaccaacaaaggcacttgcagttacattcaccacatttgtaacggagccattgaagcatattggaaaaggaactggggaatttattaaagcactcatgaaggaaattccagcgctgcttcatcttccagtgctgataattatggcattagccatcctgagtttctgctatggtgctggaaaatcagttcatgtgctgagacatataggcggtcctgagagcgaacctccccaggcacttcggccacgggatagaagacggcaggaggaaattgattatagacctgatggtggagcaggtgatgccgatttccattataggggccaaatgggccccactgagcaaggcccttatgccaaaacgtatgagggtagaagagagattttgagagagagagatgttgacttgagatttcagactggcaacaagagccctgaagtgctccgggcatttgatgtaccagacgcagaggcacgagagcatcccacggtggtacccagtcataaatcacctgttttggatacaaagcccaaggagacaggtggaatcctgggggaaggcacaccgaaagaaagcagtactgaaagcagccagtcggccaagcctgtctctggccaagacacatcagggaatacagaaggttcacccgcagcggaaaaggcccagctcaagtctgaagccgcaggcagcccagaccaaggcagcacatacagccccgcaagaggtgtggctggaccacgtggacaggatccggtcagcagcccctgtggctagaggaacaccagcacaaacgacagcctcaagtctccttcgagctttatatccatttggggatgaagtctactttgacagctagcaaggcgacatgcaactgttgttgaatgatgacagcaattcaggaaagacttaaatatgaaagcaaattgaacacatcgggtgtttgttatcagaaaagagatgagatgagataagacttgtttattgactagccaatatgtcattaaaattaaggtttatattgtgaagcttttttgaaattttacttttttttgagagttttgctctgtcacccaggctggagtgaggtggtacaatctcggctcactgcaacctccacctcccaggttcaagagattctcctgcctcagtctcccgagtagctaggattacagatgtgcatcaccatgcctggctaatttttgtattttttagtagagatggggtttcaccatgttggtcaggctggtctcgaactcctgacctcaagtgacccgcccttgtcggcctcccaaagtgctgggattacaggcatgagccattgtgcccagcctatatagtgtgaagcttttaggaaaatcagaacagggtagacagctgttaaaaacaatgtttaaatggaataatgttgaatgtttacaggctgtaagaactattgtatacacaaaataatacacaaagtttgtactttgtgtacaaatacaaatttgtactttgtgtacaaataatacaaaaagtttgtatacacaaactttttacgttgtggtttggtatattgtcttaactgaattttcttataagaaccccatgaaacttacctgagtttttaaaatgctatccaggacatcataccttatagtatacatgaaacataatgtaatccaggttgtaatttagaacttttttttttttttagctgagcacttaatgtaattaattccaggttatgactcttaaaaaacattggccattagagaaatagttctatttgcccatccaaatcacctgaatgactttttgaaagaataggggtccacatccccagatcccatcccagctgtgcacagtctgaagcaagcagagtgaaacaagttggcaacttgttccaagcgtgggcctttgcagtctgtgatccagtgttactccaggtcccagtctgtcccatacttgtcttttgctacagttagttagttactttgttatcatccccttgtaaactgccttcaatatctgggataaggaagacaaagcttaatgacaactaaggttctagctgacatctttctttcatatttaatttttgtgagttttcatctgttttctgtttgtttatgtgtcctaggttcttgacctaaccacatgggttttgttttttgtttttatattagaacttagaaaagtttgttttacagcagtattatggaacagaagagaccattttaaataatttttttaaacagcccaaaacacacaaaagatacttgttttctagagacagggtcttgctctgtcacccaggctggagtgcagtggcacgatcatagctcagtgcagcctccacctcctgggctcaagtggtcctcctgcctcagcctcttaagcagttgggactacaggtgtgtgccagcatgcttgctttttttttttttttgagacagagtcttgctctgtcactcaggctggagtccagtggcttggtctcagctcactgcaatctctgcctcccaggggttcaagtgattctcctgcctcagcctcccaagtagctgaaactacaggcgcatgccaccatgcccagctaatttttgtatttttagtagagacagggtttcactatgttggccaggctggtctcaaactcccgacctcaagtgatccgcccgcttcggcctcccaaagtgctgggattacaggtgtgagccactgcgcctggctgctgatttatttttcatagacacgggggtctatgttgcccaggttggtcttgaactcctagcctcaagcgatcctcctgcctcagcctcccaatgtgctgggattacaggaatgagccaccatgcccagcccaagaagtagagtttcttttatactgactttggcctaaaaaaacagattttcatggaggaaaaaaaaacctagatttttagtaagactattttatatacttttttacattgatcaagtacattatttttaccaaacaacattgtttcccactacatccatggttatgtataaaaaaacgccattgtcaattaagatgttaaaaaattatttccataagagtattaaattctaatctatgattcacttaacttcctactttataaacactaggtaaagtaatctcacaagctgccaaagaacacatcccaagcagtaatcacagacgatgaagcaccttacaggacccctccaccctcaaacgcgcatgtccagagaagtattaatgccttaatagactactgaaggttaactatttacatcattctaaaaatattttaagctgtattacagtgctataaattctccttttaaggaaaaaagtaatagattgtttccttaccgtgtttgaaaggaaaaaaaataaatccatagtaactaatggtctgccgattttttccctgaatttttaaactccaacaaagcattattttgcaaaaagtcctttagcccaaagtcagtgtctctgttttgatctctttgtaaaagaactctctgttcatccattctctttccctgggaccgtaaaataaggctgaaaaagtcttcatctggtactgtcggaccctttgtggtagcaggtggtggagcacatctttgatcatctaatctggatccctagaagtttatgagagagattaaaagacatactgtgggaaagaaagcaccaagctatgttaaatctctcagtcacaacaagaaaacgcagttgtaaacttttatttggggcttctcagaaattaatctttgtttttatattgttctctttagttcccagcctgatttctgaaagaaataatctttaaacctg

SEQ ID NO: 377695 - DNA, 5152 bp, Homo sapiens
  misc_feature (12)..(12): n is a, c, g, or t
ctctgtctcaanaaaacaaaaaacccaaaaataggggggagattcgttaaaatacctgtttttaaattgactttattgagctataaatcacatactatataatccacccatttaaagtgtccagttccaccaggtgctgggattacaagcgtgagccattgcgcctggctccaaatctgatttgagtgtaaaaagttagacacaccataagctgtaggtttattactgggtggtgaaaaacaattcaggttttctttataatagtgattatgaagtgttcttcccagactagctttatcgtcatctgggaaattgttaaaaatgcaaattcgcaagtttgagagccatggttccaagaaactgcataagcatacgaaataagttgcagcctcccgacttataccctggtacttctagtctaaaacaggatttgactctactaatccagccttatacaggatgctgtgttctttgctcctttgtgaatgtctgttgctggtagctggttatgctcatgatgatgactggattgaccccacagacatgcttaactatgatgctgcttcaggaacaatgagaaaatctcaggcaaaatatggtatttcaggggaaaaggatgtcagtcctgacttgtcatgtgctgatgaaatatcagaatgttatcacaaacttgattctttaacttataagattgatgagtgtgaaaagaaaaagagggaagactatgaaagtcaaagcaatcctgtttttaggagatacttaaataagattttaattgaagctggaaagcttggacttcctgatgaaaacaaaggcgatatgcattatgatgctgagattatccttaaaagagaaactttgttagaaatacagaagtttctcaatggagaagactggaaaccaggtgccttggatgatgcactaagtgatattttaattaattttaagtttcatgattttgaaacatggaagtggcgattcgaagattcctttggagtggatccatataatgtgttaatggtacttctttgtctgctctgcatcgtggttttagtggctactgagctgtggacatatgtacgttggtacactcagttgagacgtgttttaatcatcagctttctgttcagtttgggatggaattggatgtatttatataagctagcttttgcacagcatcaggctgaagtcgccaagatggagccattaaacaatgtgtgtgccaaaaagatggactggactggaagtatctgggaatggtttagaagttcatggacctataaggatgacccatgccaaaaatactatgagctcttactagtcaaccctatttggttggtcccaccaacaaaggcacttgcagttacattcaccacatttgtaacggagccattgaagcatattggaaaaggaactggggaatttattaaagcactcatgaaggaaattccagcgctgcttcatcttccagtgctgataattatggcattagccatcctgagtttctgctatggtgctggaaaatcagttcatgtgctgagacatataggcggtcctgagagcgaacctccccaggcacttcggccacgggatagaagacggcaggaggaaattgattatagacctgatggtggagcaggtgatgccgatttccattataggggccaaatgggccccactgagcaaggcccttatgccaaaacgtatgagggtagaagagagattttgagagagagagatgttgacttgagatttcagactggcaacaagagccctgaagtgctccgggcatttgatgtaccagacgcagaggcacgagagcatcccacggtggtacccagtcataaatcacctgttttggatacaaagcccaaggagacaggtggaatcctgggggaaggcacaccgaaagaaagcagtactgaaagcagccagtcggccaagcctgtctctggccaagacacatcagggaatacagaaggttcacccgcagcggaaaaggcccagctcaagtctgaagccgcaggcagcccagaccaaggcagcacatacagccccgcaagaggtgtggctggaccacgtggacaggatccggtcagcagcccctgtggctagaggaacaccagcacaaacgacagcctcaagtctccttcgagctttatatccatttggggatgaagtctactttgacagctagcaaggcgacatgcaactgttgttgaatgatgacagcaattcaggaaagacttaaatatgaaagcaaattgaacacatcgggtgtttgttatcagaaaagagatgagatgagataagacttgtttattgactagccaatatgtcattaaaattaaggtttatattgtgaagcttttttgaaattttacttttttttgagagttttgctctgtcacccaggctggagtgaggtggtacaatctcggctcactgcaacctccacctcccaggttcaagagattctcctgcctcagtctcccgagtagctaggattacagatgtgcatcaccatgcctggctaatttttgtattttttagtagagatggggtttcaccatgttggtcaggctggtctcgaactcctgacctcaagtgacccgcccttgtcggcctcccaaagtgctgggattacaggcatgagccattgtgcccagcctatatagtgtgaagcttttaggaaaatcagaacagggtagacagctgttaaaaacaatgtttaaatggaataatgttgaatgtttacaggctgtaagaactattgtatacacaaaataatacacaaagtttgtactttgtgtacaaatacaaatttgtactttgtgtacaaataatacaaaaagtttgtatacacaaactttttacgttgtggtttggtatattgtcttaactgaattttcttataagaaccccatgaaacttacctgagtttttaaaatgctatccaggacatcataccttatagtatacatgaaacataatgtaatccaggttgtaatttagaacttttttttttttttagctgagcacttaatgtaattaattccaggttatgactcttaaaaaacattggccattagagaaatagttctatttgcccatccaaatcacctgaatgactttttgaaagaataggggtccacatccccagatcccatcccagctgtgcacagtctgaagcaagcagagtgaaacaagttggcaacttgttccaagcgtgggcctttgcagtctgtgatccagtgttactccaggtcccagtctgtcccatacttgtcttttgctacagttagttagttactttgttatcatccccttgtaaactgccttcaatatctgggataaggaagacaaagcttaatgacaactaaggttctagctgacatctttctttcatatttaatttttgtgagttttcatctgttttctgtttgtttatgtgtcctaggttcttgacctaaccacatgggttttgttttttgtttttatattagaacttagaaaagtttgttttacagcagtattatggaacagaagagaccattttaaataatttttttaaacagcccaaaacacacaaaagatacttgttttctagagacagggtcttgctctgtcacccaggctggagtgcagtggcacgatcatagctcagtgcagcctccacctcctgggctcaagtggtcctcctgcctcagcctcttaagcagttgggactacaggtgtgtgccagcatgcttgctttttttttttttttgagacagagtcttgctctgtcactcaggctggagtccagtggcttggtctcagctcactgcaatctctgcctcccaggggttcaagtgattctcctgcctcagcctcccaagtagctgaaactacaggcgcatgccaccatgcccagctaatttttgtatttttagtagagacagggtttcactatgttggccaggctggtctcaaactcccgacctcaagtgatccgcccgcttcggcctcccaaagtgctgggattacaggtgtgagccactgcgcctggctgctgatttatttttcatagacacgggggtctatgttgcccaggttggtcttgaactcctagcctcaagcgatcctcctgcctcagcctcccaatgtgctgggattacaggaatgagccaccatgcccagcccaagaagtagagtttcttttatactgactttggcctaaaaaaacagattttcatggaggaaaaaaaaacctagatttttagtaagactattttatatacttttttacattgatcaagtacattatttttaccaaacaacattgtttcccactacatccatggttatgtataaaaaaacgccattgtcaattaagatgttaaaaaattatttccataagagtattaaattctaatctatgattcacttaacttcctactttataaacactaggtaaagtaatctcacaagctgccaaagaacacatcccaagcagtaatcacagacgatgaagcaccttacaggacccctccaccctcaaacgcgcatgtccagagaagtattaatgccttaatagactactgaaggttaactatttacatcattctaaaaatattttaagctgtattacagtgctataaattctccttttaaggaaaaaagtaatagattgtttccttaccgtgtttgaaaggaaaaaaaataaatccatagtaactaatggtctgccgattttttccctgaatttttaaactccaacaaagcattattttgcaaaaagtcctttagcccaaagtcagtgtctctgttttgatctctttgtaaaagaactctctgttcatccattctctttccctgggaccgtaaaataaggctgaaaaagtcttcatctggtactgtcggaccctttgtggtagcaggtggtggagcacatctttgatcatctaatctggatccctagaagtttatgagagagattaaaagacatactgtgggaaagaaagcaccaagctatgttaaatctctcagtcacaacaagaaaacgcagttgtaaacttttatttggggcttctcagaaattaatctttgtttttatattgttctctttagttcccagcctgatttctgaaagaaataatctttaaacctg

SEQ ID NO: 377696 - DNA, 6914 bp, Homo sapiens
tcgatgacgaggcccaggaagcacgctgaaaccctgggcggcggcaagctgtgcgacctcttctgcggccggcctgggcaggtgtctccttatacaggatgctgtgttctttgctcctttgtgaatgtctgttgctggtagctggttatgctcatgatgatgactggattgaccccacagacatgcttaactatgatgctgcttcaggaacaatgagaaaatctcaggcaaaatatggtatttcaggggaaaaggatgtcagtcctgacttgtcatgtgctgatgaaatatcagaatgttatcacaaacttgattctttaacttataagattgatgagtgtgaaaagaaaaagagggaagactatgaaagtcaaagcaatcctgtttttaggagatacttaaataagattttaattgaagctggaaagcttggacttcctgatgaaaacaaaggcgatatgcattatgatgctgagattatccttaaaagagaaactttgttagaaatacagaagtttctcaatggagaagactggaaaccaggtgccttggatgatgcactaagtgatattttaattaattttaagtttcatgattttgaaacatggaagtggcgattcgaagattcctttggagtggatccatataatgtgttaatggtacttctttgtctgctctgcatcgtggttttagtggctactgagctgtggacatatgtacgttggtacactcagttgagacgtgttttaatcatcagctttctgttcagtttgggatggaattggatgtatttatataagctagcttttgcacagcatcaggctgaagtcgccaagatggagccattaaacaatgtgtgtgccaaaaagatggactggactggaagtatctgggaatggtttagaagttcatggacctataaggatgacccatgccaaaaatactatgagctcttactagtcaaccctatttggttggtcccaccaacaaaggcacttgcagttacattcaccacatttgtaacggagccattgaagcatattggaaaaggaactggggaatttattaaagcactcatgaaggaaattccagcgctgcttcatcttccagtgctgataattatggcattagccatcctgagtttctgctatggtgctggaaaatcagttcatgtgctgagacatataggcggtcctgagagcgaacctccccaggcacttcggccacgggatagaagacggcaggaggaaattgattatagacctgatggtggagcaggtgatgccgatttccattataggggccaaatgggccccactgagcaaggcccttatgccaaaacgtatgagggtagaagagagattttgagagagagagatgttgacttgagatttcagactggcaacaagagccctgaagtgctccgggcatttgatgtaccagacgcagaggcacgagagcatcccacggtggtacccagtcataaatcacctgttttggatacaaagcccaaggagacaggtggaatcctgggggaaggcacaccgaaagaaagcagtactgaaagcagccagtcggccaagcctgtctctggccaagacacatcagggaatacagaaggttcacccgcagcggaaaaggcccagctcaagtctgaagccgcaggcagcccagaccaaggcagcacatacagccccgcaagaggtgtggctggaccacgtggacaggatccggtcagcagcccctgtggctagaggaacaccagcacaaacgacagcctcaagtctccttcgagctttgtaaagtatactcttcactctctttctcttctctgcaagaattctgattactacaaaggtgccaacttcaacattcacatttcaacttcaacattcacatttttactgacaattagaattaacaaacacgttatatatgtaaaagcttttcatttcatcttctctttgatatttacatcccataaagtaagaagtgtttattttaagatgaacagatgacaggcatcactgattctggatagttaaggaggccagtttgaattggggacattgaaaaagaaattttattgttacaggcacttacgggaacccactaaccaatttacattgcctagtgaatccactagagttaaggccacccacttgatgcctccagcatcttcatgcagccatggagtatcgttaccaggatcagtctgactgacacctcagcttatctctacgcaggctgcccacaggtcactgtggctgtagtttcatcttttccacagctattactacgcctgcatccttattgttccttttactttgtttacttagagaaaactgaagactgccagggcaatttagataacatagcttgttatattggtaatctgttttacagagtcagtcgactgaaaatgactttattcttttcccccaccaattgaagtgcatgggctttttataaaacctattttttgtgttactcagaatcctagcagtggagactattagatattaccatatcttaattcatattatagcaaatcatattgtcttgtccataggaagtttgcatttttagagatctatacatagagaataccatgatgaggaagaagagagttgggtgtcttccttaactgcagacaggacatcagtcagcactttacattagcctttctgattatcaaaagcattcctcattttaaactttttaaaaagcaatgcataaattttgtacctgtccttagcagacttcacagacatcaggtgtcctttgttttaaccatattcacactacaagttatgttcaactgcttactaaaagtgataccagtcaggaataaagtctttaaattttcatgcagatatttgtatcccaagcacttgcttttttattttaatatgaaatgcagaatacacatttttggatccaggaagtgttacttacgtgcctgtaacaatgtaattttaggccaggtgcagtggctcatgcctacagtcctagcactttggaaggttgagggaggatgatcgcttaagttcagttgttgaaatgcagaatacacatttttggatccaggaagtgttacttacgtgcctgtaacaatgtaattttaggccaggtgcagtggctcatgcctacagtcctagcactttggaaggttgagggaggatgatcgcttaagttcagttgttgaaatgcagaatacacatttttggatccaggaagtgttacttacgtgcctgtaacaatgtaattttaggccaggtgcagtggctcatgcctacagtcctagcactttggaaggttgagggaggatgatcgcttaagctcagttgttcaaggctatgtactaaaaataaaactagccaggcatggtggtacacgcctgcagtcccagctacttggagggctgaggcaagaggatcgtgaggtggcagtgagttatgatcgagccactgtactccagcctgggtgacagagcaagaccttgtctcaaaattatacatgttaatatattctagtttaatattgcaaacatctttagaatttcatcagaaacgtgattttttctaagaaatgcaaaaggattttaggatttttaacacagaggacatgtttaacaaatgaatcctgacagacacctgcagtttagaataaatttgtgaacatccatgcgtataaagtgtcctcttgggacaagacatgttcacactgacttggggaatatgcccccaaggtgagagctgtcttttgaactgtgatctgactctgaaaagtagtgaatgccccaggtgatagactgtaactgtgagtggaattaatgctgcttgcatgccttttaatccaaaaccaaattcttttaaaaaatttttaaataaaatttcacctttgtattctttcattacagatatccatttggggatgaagtctactttgacagctagcaaggcgacatgcaactgttgttgaatgatgacagcaattcaggaaagacttaaatatgaaagcaaattgaacacatcgggtgtttgttatcagaaaagagatgagatgagataagacttgtttattgactagccaatatgtcattaaaattaaggtttatattgtgaagcttttttgaaattttacttttttttgagagttttgctctgtcacccaggctggagtgaggtggtacaatctcggctcactgcaacctccacctcccaggttcaagagattctcctgcctcagtctcccgagtagctaggattacagatgtgcatcaccatgcctggctaatttttgtattttttagtagagatggggtttcaccatgttggtcaggctggtctcgaactcctgacctcaagtgacccgcccttgtcggcctcccaaagtgctgggattacaggcatgagccattgtgcccagcctatatagtgtgaagcttttaggaaaatcagaacagggtagacagctgttaaaaacaatgtttaaatggaataatgttgaatgtttacaggctgtaagaactattgtatacacaaaataatacacaaagtttgtactttgtgtacaaatacaaatttgtactttgtgtacaaataatacaaaaagtttgtatacacaaactttttacgttgtggtttggtatattgtcttaactgaattttcttataagaaccccatgaaacttacctgagtttttaaaatgctatccaggacatcataccttatagtatacatgaaacataatgtaatccaggttgtaatttagaacttttttttttttttagctgagcacttaatgtaattaattccaggttatgactcttaaaaaacattggccattagagaaatagttctatttgcccatccaaatcacctgaatgactttttgaaagaataggggtccacatccccagatcccatcccagctgtgcacagtctgaagcaagcagagtgaaacaagttggcaacttgttccaagcgtgggcctttgcagtctgtgatccagtgttactccaggtcccagtctgtcccatacttgtcttttgctacagttagttagttactttgttatcatccccttgtaaactgccttcaatatctgggataaggaagacaaagcttaatgacaactaaggttctagctgacatctttctttcatatttaatttttgtgagttttcatctgttttctgtttgtttatgtgtcctaggttcttgacctaaccacatgggttttgttttttgtttttatattagaacttagaaaagtttgttttacagcagtattatggaacagaagagaccattttaaataatttttttaaacagcccaaaacacacaaaagatacttgttttctagagacagggtcttgctctgtcacccaggctggagtgcagtggcacgatcatagctcagtgcagcctccacctcctgggctcaagtggtcctcctgcctcagcctcttaagcagttgggactacaggtgtgtgccagcatgcttgctttttttttttttttgagacagagtcttgctctgtcactcaggctggagtccagtggcttggtctcagctcactgcaatctctgcctcccaggggttcaagtgattctcctgcctcagcctcccaagtagctgaaactacaggcgcatgccaccatgcccagctaatttttgtatttttagtagagacagggtttcactatgttggccaggctggtctcaaactcccgacctcaagtgatccgcccgcttcggcctcccaaagtgctgggattacaggtgtgagccactgcgcctggctgctgatttatttttcatagacacgggggtctatgttgcccaggttggtcttgaactcctagcctcaagcgatcctcctgcctcagcctcccaatgtgctgggattacaggaatgagccaccatgcccagcccaagaagtagagtttcttttatactgactttggcctaaaaaaacagattttcatggaggaaaaaaaaacctagatttttagtaagactattttatatacttttttacattgatcaagtacattatttttaccaaacaacattgtttcccactacatccatggttatgtataaaaaaacgccattgtcaattaagatgttaaaaaattatttccataagagtattaaattctaatctatgattcacttaacttcctactttataaacactaggtaaagtaatctcacaagctgccaaagaacacatcccaagcagtaatcacagacgatgaagcaccttacaggacccctccaccctcaaacgcgcatgtccagagaagtattaatgccttaatagactactgaaggttaactatttacatcattctaaaaatattttaagctgtattacagtgctataaattctccttttaaggaaaaaagtaatagattgtttccttaccgtgtttgaaaggaaaaaaaataaatccatagtaactaatggtctgccgattttttccctgaatttttaaactccaacaaagcattattttgcaaaaagtcctttagcccaaagtcagtgtctctgttttgatctctttgtaaaagaactctctgttcatccattctctttccctgggaccgtaaaataaggctgaaaaagtcttcatctggtactgtcggaccctttgtggtagcaggtggtggagcacatctttgatcatctaatctggatccctagaagtttatgagagagattaaaagacatactgtgggaaagaaagcaccaagctatgttaaatctctcagtcacaacaagaaaacgcagttgtaaacttttatttggggcttctcagaaattaatctttgtttttatattgttctctttagttcccagcctgatttctgaaagaaataatctttaaacctg

SEQ ID NO: 377697 - DNA, 5048 bp, Homo sapiens
tcgatgacgaggcccaggaagcacgctgaaaccctgggcggcggcaagctgtgcgacctcttctgcggccggcctgggcaggtgtctccttatacaggatgctgtgttctttgctcctttgtgaatgtctgttgctggtagctggttatgctcatgatgatgactggattgaccccacagacatgcttaactatgatgctgcttcaggaacaatgagaaaatctcaggcaaaatatggtatttcaggggaaaaggatgtcagtcctgacttgtcatgtgctgatgaaatatcagaatgttatcacaaacttgattctttaacttataagattgatgagtgtgaaaagaaaaagagggaagactatgaaagtcaaagcaatcctgtttttaggagatacttaaataagattttaattgaagctggaaagcttggacttcctgatgaaaacaaaggcgatatgcattatgatgctgagattatccttaaaagagaaactttgttagaaatacagaagtttctcaatggagaagactggaaaccaggtgccttggatgatgcactaagtgatattttaattaattttaagtttcatgattttgaaacatggaagtggcgattcgaagattcctttggagtggatccatataatgtgttaatggtacttctttgtctgctctgcatcgtggttttagtggctactgagctgtggacatatgtacgttggtacactcagttgagacgtgttttaatcatcagctttctgttcagtttgggatggaattggatgtatttatataagctagcttttgcacagcatcaggctgaagtcgccaagatggagccattaaacaatgtgtgtgccaaaaagatggactggactggaagtatctgggaatggtttagaagttcatggacctataaggatgacccatgccaaaaatactatgagctcttactagtcaaccctatttggttggtcccaccaacaaaggcacttgcagttacattcaccacatttgtaacggagccattgaagcatattggaaaaggaactggggaatttattaaagcactcatgaaggaaattccagcgctgcttcatcttccagtgctgataattatggcattagccatcctgagtttctgctatggtgctggaaaatcagttcatgtgctgagacatataggcggtcctgagagcgaacctccccaggcacttcggccacgggatagaagacggcaggaggaaattgattatagacctgatggtggagcaggtgatgccgatttccattataggggccaaatgggccccactgagcaaggcccttatgccaaaacgtatgagggtagaagagagattttgagagagagagatgttgacttgagatttcagactggcaacaagagccctgaagtgctccgggcatttgatgtaccagacgcagaggcacgagagcatcccacggtggtacccagtcataaatcacctgttttggatacaaagcccaaggagacaggtggaatcctgggggaaggcacaccgaaagaaagcagtactgaaagcagccagtcggccaagcctgtctctggccaagacacatcagggaatacagaaggttcacccgcagcggaaaaggcccagctcaagtctgaagccgcaggcagcccagaccaaggcagcacatacagccccgcaagaggtgtggctggaccacgtggacaggatccggtcagcagcccctgtggctagaggaacaccagcacaaacgacagcctcaagtctccttcgagctttgtaaagtatactcttcactctctttctcttctctgcaagaattctgattactacaaaggtgccaacttcaacattcacatttcaacttcaacattcacatttttactgacaattagaattaacaaacacgttatatatgtaaaagcttttcatttcatcttctctttgatatttacatcccataaagtaagaagtgtttattttaagatgaacagatgacaggcatcactgattctggatagttaaggaggccagtttgaattggggacattgaaaaagaaattttattgttacaggcacttacgggaacccactaaccaatttacattgcctagtgaatccactagagttaaggccacccacttgatgcctccagcatcttcatgcagccatggagtatcgttaccaggatcagtctgactgacacctcagcttatctctacgcaggctgcccacaggtcactgtggctgtagtttcatcttttccacagctattactacgcctgcatccttattgttccttttactttgtttacttagagaaaactgaagactgccagggcaatttagataacatagcttgttatattggtaatctgttttacagagtcagtcgactgaaaatgactttattcttttcccccaccaattgaagtgcatgggctttttataaaacctattttttgtgttactcagaatcctagcagtggagactattagatattaccatatcttaattcatattatagcaaatcatattgtcttgtccataggaagtttgcatttttagagatctatacatagagaataccatgatgaggaagaagagagttgggtgtcttccttaactgcagacaggacatcagtcagcactttacattagcctttctgattatcaaaagcattcctcattttaaactttttaaaaagcaatgcataaattttgtacctgtccttagcagacttcacagacatcaggtgtcctttgttttaaccatattcacactacaagttatgttcaactgcttactaaaagtgataccagtcaggaataaagtctttaaattttcatgcagatatttgtatcccaagcacttgcttttttattttaatatgaaatgcagaatacacatttttggatccaggaagtgttacttacgtgcctgtaacaatgtaattttaggccaggtgcagtggctcatgcctacagtcctagcactttggaaggttgagggaggatgatcgcttaagttcagttgttgaaatgcagaatacacatttttggatccaggaagtgttacttacgtgcctgtaacaatgtaattttaggccaggtgcagtggctcatgcctacagtcctagcactttggaaggttgagggaggatgatcgcttaagttcagttgttgaaatgcagaatacacatttttggatccaggaagtgttacttacgtgcctgtaacaatgtaattttaggccaggtgcagtggctcatgcctacagtcctagcactttggaaggttgagggaggatgatcgcttaagctcagttgttcaaggctatgtactaaaaataaaactagccaggcatggtggtacacgcctgcagtcccagctacttggagggctgaggcaagaggatcgtgaggtggcagtgagttatgatcgagccactgtactccagcctgggtgacagagcaagaccttgtctcaaaattatacatgttaatatattctagtttaatattgcaaacatctttagaatttcatcagaaacgtgattttttctaagaaatgcaaaaggattttaggatttttaacacagaggacatgtttaacaaatgaatcctgacagacacctgcagtttagaataaatttgtgaacatccatgcgtataaagtgtcctcttgggacaagacatgttcacactgacttggggaatatgcccccaaggtgagagctgtcttttgaactgtgatctgactctgaaaagtagtgaatgccccaggtgatagactgtaactgtgagtggaattaatgctgcttgcatgccttttaatccaaaaccaaattcttttaaaaaatttttaaataaaatttcacctttgtattctttcattacagatatccatttggggatgaagtctactttgacagctagcaaggcgacatgcaactgttgttgaatgatgacagcaattcaggaaagacttaaatatgaaagcaaattgaacacatcgggtgtttgttatcagaaaagagatgagatgagataagacttgtttattgactagccaatatgtcattaaaattaaggtttatattgtgaagcttttttgaaattttacttttttttgagagttttgctctgtcacccaggctggagtgaggtggtacaatctcggctcactgcaacctccacctcccaggttcaagagattctcctgcctcagtctcccgagtagctaggattacagatgtgcatcaccatgcctggctaatttttgtattttttagtagagatggggtttcaccatgttggtcaggctggtctcgaactcctgacctcaagtgacccgcccttgtcggcctcccaaagtgctgggattacaggcatgagccattgtgcccagcctatatagtgtgaagcttttaggaaaatcagaacagggtagacagctgttaaaaacaatgtttaaatggaataatgttgaatgtttacaggctgtaagaactattgtatacacaaaataatacacaaagtttgtactttgtgtacaaatacaaatttgtactttgtgtacaaataatacaaaaagtttgtatacacaaactttttacgttgtggtttggtatattgtcttaactgaattttcttataagaaccccatgaaacttacctgagtttttaaaatgctatccaggacatcataccttatagtatacatgaaacataatgtaatccaggttgtaatttagaacttttttttttttttagctgagcacttaatgtaattaattccaggttatgactcttaaaaaacattggccattagagaaatagttctatttgcccatccaaatcacctgaatgactttttgaaagaataggggtccacatccccagatcccatcccagctgtgcacagtctgaagcaagcagagtgaaacaagttggcaaccagtccgttcgactgagcagcagagatgtgaatgttgaagtagaggaggtagagtgtggaaagaacac

SEQ ID NO: 377698 - DNA, 6570 bp, Homo sapiens
ctctttgcagtcttaaaaattgaagcccacaaacagctcttacttaaggtgattatatttattgatacttacatattaggagttaaaacaaatttaaaacatacgagtactgtacacgcaagcatgcatcccctgagtctgagtgaggctgtcactctagcatctggaatgctccgttgtatattcaggaggggacagtgaaaaagacaaataataatgtctttgtattatgaaaagttttgatctcatagatctcctgaaagtctcaggtatcccccgggggtccctgggccacactgtaaggaactgctgcctactttttcccatggaatgtgaatcaaaacctgttgaattttagctgtaacttaagcctagtttatatttgtaaaaagaaaatgtacagaagattgtttacataatgatatacaactttaaatattttcagcatttaccttatatgatgggcatgaatctagaaacatgaataattatcagactagaaccttctaatttaaatatctaggcttcagcctgccattgttatagttcaatcgaaatgtgtctagctgattaaaatgtctactgaaagatttattaagttttattggccactctggccttgtattaatctaaagaggtctctaatgaaaaaaagtcaaattaacatgtttatgtctataaatgccacaagtaagttaaattacataactttgttagcactctgaataaaatgcctcataacttttgtaagttagccattgagtcctcaggaaaatgtatttcttttccttacagagtttctgctatggtgctggaaaatcagttcatgtgctgagacatataggcggtcctgagagcgaacctccccaggcacttcggccacgggatagaagacggcaggaggaaattgattatagacctgatggtggagcaggtgatgccgatttccattataggggccaaatgggccccactgagcaaggcccttatgccaaaacgtatgagggtagaagagagattttgagagagagagatgttgacttgagatttcagactggcaacaagagccctgaagtgctccgggcatttgatgtaccagacgcagaggcacgagagcatcccacggtggtacccagtcataaatcacctgttttggatacaaagcccaaggagacaggtggaatcctgggggaaggcacaccgaaagaaagcagtactgaaagcagccagtcggccaagcctgtctctggccaagacacatcagggaatacagaaggttcacccgcagcggaaaaggcccagctcaagtctgaagccgcaggcagcccagaccaaggcagcacatacagccccgcaagaggtgtggctggaccacgtggacaggatccggtcagcagcccctgtggctagaggaacaccagcacaaacgacagcctcaagtctccttcgagctttgtaaagtatactcttcactctctttctcttctctgcaagaattctgattactacaaaggtgccaacttcaacattcacatttcaacttcaacattcacatttttactgacaattagaattaacaaacacgttatatatgtaaaagcttttcatttcatcttctctttgatatttacatcccataaagtaagaagtgtttattttaagatgaacagatgacaggcatcactgattctggatagttaaggaggccagtttgaattggggacattgaaaaagaaattttattgttacaggcacttacgggaacccactaaccaatttacattgcctagtgaatccactagagttaaggccacccacttgatgcctccagcatcttcatgcagccatggagtatcgttaccaggatcagtctgactgacacctcagcttatctctacgcaggctgcccacaggtcactgtggctgtagtttcatcttttccacagctattactacgcctgcatccttattgttccttttactttgtttacttagagaaaactgaagactgccagggcaatttagataacatagcttgttatattggtaatctgttttacagagtcagtcgactgaaaatgactttattcttttcccccaccaattgaagtgcatgggctttttataaaacctattttttgtgttactcagaatcctagcagtggagactattagatattaccatatcttaattcatattatagcaaatcatattgtcttgtccataggaagtttgcatttttagagatctatacatagagaataccatgatgaggaagaagagagttgggtgtcttccttaactgcagacaggacatcagtcagcactttacattagcctttctgattatcaaaagcattcctcattttaaactttttaaaaagcaatgcataaattttgtacctgtccttagcagacttcacagacatcaggtgtcctttgttttaaccatattcacactacaagttatgttcaactgcttactaaaagtgataccagtcaggaataaagtctttaaattttcatgcagatatttgtatcccaagcacttgcttttttattttaatatgaaatgcagaatacacatttttggatccaggaagtgttacttacgtgcctgtaacaatgtaattttaggccaggtgcagtggctcatgcctacagtcctagcactttggaaggttgagggaggatgatcgcttaagttcagttgttgaaatgcagaatacacatttttggatccaggaagtgttacttacgtgcctgtaacaatgtaattttaggccaggtgcagtggctcatgcctacagtcctagcactttggaaggttgagggaggatgatcgcttaagttcagttgttgaaatgcagaatacacatttttggatccaggaagtgttacttacgtgcctgtaacaatgtaattttaggccaggtgcagtggctcatgcctacagtcctagcactttggaaggttgagggaggatgatcgcttaagctcagttgttcaaggctatgtactaaaaataaaactagccaggcatggtggtacacgcctgcagtcccagctacttggagggctgaggcaagaggatcgtgaggtggcagtgagttatgatcgagccactgtactccagcctgggtgacagagcaagaccttgtctcaaaattatacatgttaatatattctagtttaatattgcaaacatctttagaatttcatcagaaacgtgattttttctaagaaatgcaaaaggattttaggatttttaacacagaggacatgtttaacaaatgaatcctgacagacacctgcagtttagaataaatttgtgaacatccatgcgtataaagtgtcctcttgggacaagacatgttcacactgacttggggaatatgcccccaaggtgagagctgtcttttgaactgtgatctgactctgaaaagtagtgaatgccccaggtgatagactgtaactgtgagtggaattaatgctgcttgcatgccttttaatccaaaaccaaattcttttaaaaaatttttaaataaaatttcacctttgtattctttcattacagatatccatttggggatgaagtctactttgacagctagcaaggcgacatgcaactgttgttgaatgatgacagcaattcaggaaagacttaaatatgaaagcaaattgaacacatcgggtgtttgttatcagaaaagagatgagatgagataagacttgtttattgactagccaatatgtcattaaaattaaggtttatattgtgaagcttttttgaaattttacttttttttgagagttttgctctgtcacccaggctggagtgaggtggtacaatctcggctcactgcaacctccacctcccaggttcaagagattctcctgcctcagtctcccgagtagctaggattacagatgtgcatcaccatgcctggctaatttttgtattttttagtagagatggggtttcaccatgttggtcaggctggtctcgaactcctgacctcaagtgacccgcccttgtcggcctcccaaagtgctgggattacaggcatgagccattgtgcccagcctatatagtgtgaagcttttaggaaaatcagaacagggtagacagctgttaaaaacaatgtttaaatggaataatgttgaatgtttacaggctgtaagaactattgtatacacaaaataatacacaaagtttgtactttgtgtacaaatacaaatttgtactttgtgtacaaataatacaaaaagtttgtatacacaaactttttacgttgtggtttggtatattgtcttaactgaattttcttataagaaccccatgaaacttacctgagtttttaaaatgctatccaggacatcataccttatagtatacatgaaacataatgtaatccaggttgtaatttagaacttttttttttttttagctgagcacttaatgtaattaattccaggttatgactcttaaaaaacattggccattagagaaatagttctatttgcccatccaaatcacctgaatgactttttgaaagaataggggtccacatccccagatcccatcccagctgtgcacagtctgaagcaagcagagtgaaacaagttggcaacttgttccaagcgtgggcctttgcagtctgtgatccagtgttactccaggtcccagtctgtcccatacttgtcttttgctacagttagttagttactttgttatcatccccttgtaaactgccttcaatatctgggataaggaagacaaagcttaatgacaactaaggttctagctgacatctttctttcatatttaatttttgtgagttttcatctgttttctgtttgtttatgtgtcctaggttcttgacctaaccacatgggttttgttttttgtttttatattagaacttagaaaagtttgttttacagcagtattatggaacagaagagaccattttaaataatttttttaaacagcccaaaacacacaaaagatacttgttttctagagacagggtcttgctctgtcacccaggctggagtgcagtggcacgatcatagctcagtgcagcctccacctcctgggctcaagtggtcctcctgcctcagcctcttaagcagttgggactacaggtgtgtgccagcatgcttgctttttttttttttttgagacagagtcttgctctgtcactcaggctggagtccagtggcttggtctcagctcactgcaatctctgcctcccaggggttcaagtgattctcctgcctcagcctcccaagtagctgaaactacaggcgcatgccaccatgcccagctaatttttgtatttttagtagagacagggtttcactatgttggccaggctggtctcaaactcccgacctcaagtgatccgcccgcttcggcctcccaaagtgctgggattacaggtgtgagccactgcgcctggctgctgatttatttttcatagacacgggggtctatgttgcccaggttggtcttgaactcctagcctcaagcgatcctcctgcctcagcctcccaatgtgctgggattacaggaatgagccaccatgcccagcccaagaagtagagtttcttttatactgactttggcctaaaaaaacagattttcatggaggaaaaaaaaacctagatttttagtaagactattttatatacttttttacattgatcaagtacattatttttaccaaacaacattgtttcccactacatccatggttatgtataaaaaaacgccattgtcaattaagatgttaaaaaattatttccataagagtattaaattctaatctatgattcacttaacttcctactttataaacactaggtaaagtaatctcacaagctgccaaagaacacatcccaagcagtaatcacagacgatgaagcaccttacaggacccctccaccctcaaacgcgcatgtccagagaagtattaatgccttaatagactactgaaggttaactatttacatcattctaaaaatattttaagctgtattacagtgctataaattctccttttaaggaaaaaagtaatagattgtttccttaccgtgtttgaaaggaaaaaaaataaatccatagtaactaatggtctgccgattttttccctgaatttttaaactccaacaaagcattattttgcaaaaagtcctttagcccaaagtcagtgtctctgttttgatctctttgtaaaagaactctctgttcatccattctctttccctgggaccgtaaaataaggctgaaaaagtcttcatctggtactgtcggaccctttgtggtagcaggtggtggagcacatctttgatcatctaatctggatccctagaagtttatgagagagattaaaagacatactgtgggaaagaaagcaccaagctatgttaaatctctcagtcacaacaagaaaacgcagttgtaaacttttatttggggcttctcagaaattaatctttgtttttatattgttctctttagttcccagcctgatttctgaaagaaataatctttaaacctg

SEQ ID NO: 377699 - DNA, 2252 bp, Homo sapiens
tcgatgacgaggcccaggaagcacgctgaaaccctgggcggcggcaagctgtgcgacctcttctgcggccggcctgggcaggtgtcttcctcgagaggcaggcaggggatcccggacccttatacaggatgctgtgttctttgctcctttgtgaatgtctgttgctggtagctggttatgctcatgatgatgactggattgaccccacagacatgcttaactatgatgctgcttcaggaacaatgagaaaatctcaggcaaaatatggtatttcaggggaaaaggatgtcagtcctgacttgtcatgtgctgatgaaatatcagaatgttatcacaaacttgattctttaacttataagattgatgagtgtgaaaagaaaaagagggaagactatgaaagtcaaagcaatcctgtttttaggagatacttaaataagattttaattgaagctggaaagcttggactttttcatgattttgaaacatggaagtggcgattcgaagattcctttggagtggatccatataatgtgttaatggtacttctttgtctgctctgcatcgtggttttagtggctactgagctgtggacatatgtacgttggtacactcagttgagacgtgttttaatcatcagctttctgttcagtttgggatggaattggatgtatttatataagctagcttttgcacagcatcaggctgaagtcgccaagatggagccattaaacaatgtgtgtgccaaaaagatggactggactggaagtatctgggaatggtttagaagttcatggacctataaggatgacccatgccaaaaatactatgagctcttactagtcaaccctatttggttggtcccaccaacaaaggcacttgcagttacattcaccacatttgtaacggagccattgaagcatattggaaaaggaactggggaatttattaaagcactcatgaaggaaattccagcgctgcttcatcttccagtgctgataattatggcattagccatcctgagtttctgctatggtgctggaaaatcagttcatgtgctgagacatataggcggtcctgagagcgaacctccccaggcacttcggccacgggatagaagacggcaggaggaaattgattatagacctgatggtggagcaggtgatgccgatttccattataggggccaaatgggccccactgagcaaggcccttatgccaaaacgtatgagggtagaagagagattttgagagagagagatgttgacttgagatttcagactggcaacaagagccctgaagtgctccgggcatttgatgtaccagacgcagaggcacgagagcatcccacggtggtacccagtcataaatcacctgttttggatacaaagcccaaggagacaggtggaatcctgggggaaggcacaccgaaagaaagcagtactgaaagcagccagtcggccaagcctgtctctggccaagacacatcagggaatacagaaggttcacccgcagcggaaaaggcccagctcaagtctgaagccgcaggcagcccagaccaaggcagcacatacagccccgcaagaggtgtggctggaccacgtggacaggatccggtcagcagcccctgtggctagaggaacaccagcacaaacgacagcctcaagtctccttcgagctttatatccatttggggatgaagtctactttgacagctagcaaggcgacatgcaactgttgttgaatgatgacagcaattcaggaaagacttaaatatgaaagcaaattgaacacatcgggtgtttgttatcagaaaagagatgagatgagataagacttgtttattgactagccaatatgtcattaaaattaaggtttatattgtgaagcttttttgaaattttacttttttttgagagttttgctctgtcacccaggctggagtgaggtggtacaatctcggctcactgcaacctccacctcccaggttcaagagattctcctgcctcagtctcccgagtagctaggattacagatgtgcatcaccatgcctggctaatttttgtattttttagtagagatggggtttcaccatgttggtcaggctggtctcgaactcctgacctcaagtgacccgcccttgtcggcctcccaaagtgctgggattacaggcatgagccattgtgcccagcctatatctacttgagcctgtgtgcccactgaagagatgaagaataaaagcctaagctctcatc

SEQ ID NO: 377700 - DNA, 5642 bp, Homo sapiens
tgaaagcacacccaattatttgtcggtgttaacaaaatggattccactgagcctccctacagccagaagagtatgagggtagaagagagattttgagagagagagatgttgacttgagatttcagactggcaacaagagccctgaagtgctccgggcatttgatgtaccagacgcagaggcacgagagcatcccacggtggtacccagtcataaatcacctgttttggatacaaagcccaaggagacaggtggaatcctgggggaaggcacaccgaaagaaagcagtactgaaagcagccagtcggccaagcctgtctctggccaagacacatcagggaatacagaaggttcacccgcagcggaaaaggcccagctcaagtctgaagccgcaggcagcccagaccaaggcagcacatacagccccgcaagaggtgtggctggaccacgtggacaggatccggtcagcagcccctgtggctagaggaacaccagcacaaacgacagcctcaagtctccttcgagctttgtaaagtatactcttcactctctttctcttctctgcaagaattctgattactacaaaggtgccaacttcaacattcacatttcaacttcaacattcacatttttactgacaattagaattaacaaacacgttatatatgtaaaagcttttcatttcatcttctctttgatatttacatcccataaagtaagaagtgtttattttaagatgaacagatgacaggcatcactgattctggatagttaaggaggccagtttgaattggggacattgaaaaagaaattttattgttacaggcacttacgggaacccactaaccaatttacattgcctagtgaatccactagagttaaggccacccacttgatgcctccagcatcttcatgcagccatggagtatcgttaccaggatcagtctgactgacacctcagcttatctctacgcaggctgcccacaggtcactgtggctgtagtttcatcttttccacagctattactacgcctgcatccttattgttccttttactttgtttacttagagaaaactgaagactgccagggcaatttagataacatagcttgttatattggtaatctgttttacagagtcagtcgactgaaaatgactttattcttttcccccaccaattgaagtgcatgggctttttataaaacctattttttgtgttactcagaatcctagcagtggagactattagatattaccatatcttaattcatattatagcaaatcatattgtcttgtccataggaagtttgcatttttagagatctatacatagagaataccatgatgaggaagaagagagttgggtgtcttccttaactgcagacaggacatcagtcagcactttacattagcctttctgattatcaaaagcattcctcattttaaactttttaaaaagcaatgcataaattttgtacctgtccttagcagacttcacagacatcaggtgtcctttgttttaaccatattcacactacaagttatgttcaactgcttactaaaagtgataccagtcaggaataaagtctttaaattttcatgcagatatttgtatcccaagcacttgcttttttattttaatatgaaatgcagaatacacatttttggatccaggaagtgttacttacgtgcctgtaacaatgtaattttaggccaggtgcagtggctcatgcctacagtcctagcactttggaaggttgagggaggatgatcgcttaagttcagttgttgaaatgcagaatacacatttttggatccaggaagtgttacttacgtgcctgtaacaatgtaattttaggccaggtgcagtggctcatgcctacagtcctagcactttggaaggttgagggaggatgatcgcttaagttcagttgttgaaatgcagaatacacatttttggatccaggaagtgttacttacgtgcctgtaacaatgtaattttaggccaggtgcagtggctcatgcctacagtcctagcactttggaaggttgagggaggatgatcgcttaagctcagttgttcaaggctatgtactaaaaataaaactagccaggcatggtggtacacgcctgcagtcccagctacttggagggctgaggcaagaggatcgtgaggtggcagtgagttatgatcgagccactgtactccagcctgggtgacagagcaagaccttgtctcaaaattatacatgttaatatattctagtttaatattgcaaacatctttagaatttcatcagaaacgtgattttttctaagaaatgcaaaaggattttaggatttttaacacagaggacatgtttaacaaatgaatcctgacagacacctgcagtttagaataaatttgtgaacatccatgcgtataaagtgtcctcttgggacaagacatgttcacactgacttggggaatatgcccccaaggtgagagctgtcttttgaactgtgatctgactctgaaaagtagtgaatgccccaggtgatagactgtaactgtgagtggaattaatgctgcttgcatgccttttaatccaaaaccaaattcttttaaaaaatttttaaataaaatttcacctttgtattctttcattacagatatccatttggggatgaagtctactttgacagctagcaaggcgacatgcaactgttgttgaatgatgacagcaattcaggaaagacttaaatatgaaagcaaattgaacacatcgggtgtttgttatcagaaaagagatgagatgagataagacttgtttattgactagccaatatgtcattaaaattaaggtttatattgtgaagcttttttgaaattttacttttttttgagagttttgctctgtcacccaggctggagtgaggtggtacaatctcggctcactgcaacctccacctcccaggttcaagagattctcctgcctcagtctcccgagtagctaggattacagatgtgcatcaccatgcctggctaatttttgtattttttagtagagatggggtttcaccatgttggtcaggctggtctcgaactcctgacctcaagtgacccgcccttgtcggcctcccaaagtgctgggattacaggcatgagccattgtgcccagcctatatagtgtgaagcttttaggaaaatcagaacagggtagacagctgttaaaaacaatgtttaaatggaataatgttgaatgtttacaggctgtaagaactattgtatacacaaaataatacacaaagtttgtactttgtgtacaaatacaaatttgtactttgtgtacaaataatacaaaaagtttgtatacacaaactttttacgttgtggtttggtatattgtcttaactgaattttcttataagaaccccatgaaacttacctgagtttttaaaatgctatccaggacatcataccttatagtatacatgaaacataatgtaatccaggttgtaatttagaacttttttttttttttagctgagcacttaatgtaattaattccaggttatgactcttaaaaaacattggccattagagaaatagttctatttgcccatccaaatcacctgaatgactttttgaaagaataggggtccacatccccagatcccatcccagctgtgcacagtctgaagcaagcagagtgaaacaagttggcaacttgttccaagcgtgggcctttgcagtctgtgatccagtgttactccaggtcccagtctgtcccatacttgtcttttgctacagttagttagttactttgttatcatccccttgtaaactgccttcaatatctgggataaggaagacaaagcttaatgacaactaaggttctagctgacatctttctttcatatttaatttttgtgagttttcatctgttttctgtttgtttatgtgtcctaggttcttgacctaaccacatgggttttgttttttgtttttatattagaacttagaaaagtttgttttacagcagtattatggaacagaagagaccattttaaataatttttttaaacagcccaaaacacacaaaagatacttgttttctagagacagggtcttgctctgtcacccaggctggagtgcagtggcacgatcatagctcagtgcagcctccacctcctgggctcaagtggtcctcctgcctcagcctcttaagcagttgggactacaggtgtgtgccagcatgcttgctttttttttttttttgagacagagtcttgctctgtcactcaggctggagtccagtggcttggtctcagctcactgcaatctctgcctcccaggggttcaagtgattctcctgcctcagcctcccaagtagctgaaactacaggcgcatgccaccatgcccagctaatttttgtatttttagtagagacagggtttcactatgttggccaggctggtctcaaactcccgacctcaagtgatccgcccgcttcggcctcccaaagtgctgggattacaggtgtgagccactgcgcctggctgctgatttatttttcatagacacgggggtctatgttgcccaggttggtcttgaactcctagcctcaagcgatcctcctgcctcagcctcccaatgtgctgggattacaggaatgagccaccatgcccagcccaagaagtagagtttcttttatactgactttggcctaaaaaaacagattttcatggaggaaaaaaaaacctagatttttagtaagactattttatatacttttttacattgatcaagtacattatttttaccaaacaacattgtttcccactacatccatggttatgtataaaaaaacgccattgtcaattaagatgttaaaaaattatttccataagagtattaaattctaatctatgattcacttaacttcctactttataaacactaggtaaagtaatctcacaagctgccaaagaacacatcccaagcagtaatcacagacgatgaagcaccttacaggacccctccaccctcaaacgcgcatgtccagagaagtattaatgccttaatagactactgaaggttaactatttacatcattctaaaaatattttaagctgtattacagtgctataaattctccttttaaggaaaaaagtaatagattgtttccttaccgtgtttgaaaggaaaaaaaataaatccatagtaactaatggtctgccgattttttccctgaatttttaaactccaacaaagcattattttgcaaaaagtcctttagcccaaagtcagtgtctctgttttgatctctttgtaaaagaactctctgttcatccattctctttccctgggaccgtaaaataaggctgaaaaagtcttcatctggtactgtcggaccctttgtggtagcaggtggtggagcacatctttgatcatctaatctggatccctagaagtttatgagagagattaaaagacatactgtgggaaagaaagcaccaagctatgttaaatctctcagtcacaacaagaaaacgcagttgtaaacttttatttggggcttctcagaaattaatctttgtttttatattgttctctttagttcccagcctgatttctgaaagaaataatctttaaacctg

SEQ ID NO: 377701 - DNA, 5731 bp, Homo sapiens
tcgatgacgaggcccaggaagcacgctgaaaccctgggcggcggcaagctgtgcgacctcttctgcggccggcctgggcaggtgtctccttatacaggatgctgtgttctttgctcctttgtgaatgtctgttgctggtagctggttatgctcatgatgatgactggattgaccccacagacatgcttaactatgatgctgcttcaggaacaatgagaaaatctcaggcaaaatatggtatttcaggggaaaaggatgtcagtcctgacttgtcatgtgctgatgaaatatcagaatgttatcacaaacttgattctttaacttataagattgatgagtgtgaaaagaaaaagagggaagactatgaaagtcaaagcaatcctgtttttaggagatacttaaataagattttaattgaagctggaaagcttggacttcctgatgaaaacaaaggcgatatgcattatgatgctgagattatccttaaaagagaaactttgttagaaatacagaagtttctcaatggagaagactggaaaccaggtgccttggatgatgcactaagtgatattttaattaattttaagtttcatgattttgaaacatggaagtggcgattcgaagattcctttggagtggatccatataatgtgttaatggtacttctttgtctgctctgcatcgtggttttagtggctactgagctgtggacatatgtacgttggtacactcagttgagacgtgttttaatcatcagctttctgttcagtttgggatggaattggatgtatttatataagctagcttttgcacagcatcaggctgaagtcgccaagatggagccattaaacaatgtgtgtgccaaaaagatggactggactggaagtatctgggaatggtttagaagttcatggacctataaggatgacccatgccaaaaatactatgagctcttactagtcaaccctatttggttggtcccaccaacaaaggcacttgcagttacattcaccacatttgtaacggagccattgaagcatattggaaaaggaactggggaatttattaaagcactcatgaaggaaattccagcgctgcttcatcttccagtgctgataattatggcattagccatcctgagtttctgctatggtgctggaaaatcagttcatgtgctgagacatataggcggtcctgagagcgaacctccccaggcacttcggccacgggatagaagacggcaggaggaaattgattatagacctgatggtggagcaggtgatgccgatttccattataggggccaaatgggccccactgagcaaggcccttatgccaaaacgtatgagggtagaagagagattttgagagagagagatgttgacttgagatttcagactggcaacaagagccctgaagtgctccgggcatttgatgtaccagacgcagaggcacgagagcatcccacggtggtacccagtcataaatcacctgttttggatacaaagcccaaggagacaggtggaatcctgggggaaggcacaccgaaagaaagcagtactgaaagcagccagtcggccaagcctgtctctggccaagacacatcagggaatacagaaggttcacccgcagcggaaaaggcccagctcaagtctgaagccgcaggcagcccagaccaaggcagcacatacagccccgcaagaggtgtggctggaccacgtggacaggatccggtcagcagcccctgtggctagaggaacaccagcacaaacgacagcctcaagtctccttcgagctttgtaaagtatactcttcactctctttctcttctctgcaagaattctgattactacaaaggtgccaacttcaacattcacatttcaacttcaacattcacatttttactgacaattagaattaacaaacacgttatatatgtaaaagcttttcatttcatcttctctttgatatttacatcccataaagtaagaagtgtttattttaagatgaacagatgacaggcatcactgattctggatagttaaggaggccagtttgaattggggacattgaaaaagaaattttattgttacaggcacttacgggaacccactaaccaatttacattgcctagtgaatccactagagttaaggccacccacttgatgcctccagcatcttcatgcagccatggagtatcgttaccaggatcagtctgactgacacctcagcttatctctacgcaggctgcccacaggtcactgtggctgtagtttcatcttttccacagctattactacgcctgcatccttattgttccttttactttgtttacttagagaaaactgaagactgccagggcaatttagataacatagcttgttatattggtaatctgttttacagagtcagtcgactgaaaatgactttattcttttcccccaccaattgaagtgcatgggctttttataaaacctattttttgtgttactcagaatcctagcagtggagactattagatattaccatatcttaattcatattatagcaaatcatattgtcttgtccataggaagtttgcatttttagagatctatacatagagaataccatgatgaggaagaagagagttgggtgtcttccttaactgcagacaggacatcagtcagcactttacattagcctttctgattatcaaaagcattcctcattttaaactttttaaaaagcaatgcataaattttgtacctgtccttagcagacttcacagacatcaggtgtcctttgttttaaccatattcacactacaagttatgttcaactgcttactaaaagtgataccagtcaggaataaagtctttaaattttcatgcagatatttgtatcccaagcacttgcttttttattttaatatgaaatgcagaatacacatttttggatccaggaagtgttacttacgtgcctgtaacaatgtaattttaggccaggtgcagtggctcatgcctacagtcctagcactttggaaggttgagggaggatgatcgcttaagttcagttgttgaaatgcagaatacacatttttggatccaggaagtgttacttacgtgcctggctaatttttgtattttttagtagagatggggtttcaccatgttggtcaggctggtctcgaactcctgacctcaagtgacccgcccttgtcggcctcccaaagtgctgggattacaggcatgagccattgtgcccagcctatatagtgtgaagcttttaggaaaatcagaacagggtagacagctgttaaaaacaatgtttaaatggaataatgttgaatgtttacaggctgtaagaactattgtatacacaaaataatacacaaagtttgtactttgtgtacaaatacaaatttgtactttgtgtacaaataatacaaaaagtttgtatacacaaactttttacgttgtggtttggtatattgtcttaactgaattttcttataagaaccccatgaaacttacctgagtttttaaaatgctatccaggacatcataccttatagtatacatgaaacataatgtaatccaggttgtaatttagaacttttttttttttttagctgagcacttaatgtaattaattccaggttatgactcttaaaaaacattggccattagagaaatagttctatttgcccatccaaatcacctgaatgactttttgaaagaataggggtccacatccccagatcccatcccagctgtgcacagtctgaagcaagcagagtgaaacaagttggcaacttgttccaagcgtgggcctttgcagtctgtgatccagtgttactccaggtcccagtctgtcccatacttgtcttttgctacagttagttagttactttgttatcatccccttgtaaactgccttcaatatctgggataaggaagacaaagcttaatgacaactaaggttctagctgacatctttctttcatatttaatttttgtgagttttcatctgttttctgtttgtttatgtgtcctaggttcttgacctaaccacatgggttttgttttttgtttttatattagaacttagaaaagtttgttttacagcagtattatggaacagaagagaccattttaaataatttttttaaacagcccaaaacacacaaaagatacttgttttctagagacagggtcttgctctgtcacccaggctggagtgcagtggcacgatcatagctcagtgcagcctccacctcctgggctcaagtggtcctcctgcctcagcctcttaagcagttgggactacaggtgtgtgccagcatgcttgctttttttttttttttgagacagagtcttgctctgtcactcaggctggagtccagtggcttggtctcagctcactgcaatctctgcctcccaggggttcaagtgattctcctgcctcagcctcccaagtagctgaaactacaggcgcatgccaccatgcccagctaatttttgtatttttagtagagacagggtttcactatgttggccaggctggtctcaaactcccgacctcaagtgatccgcccgcttcggcctcccaaagtgctgggattacaggtgtgagccactgcgcctggctgctgatttatttttcatagacacgggggtctatgttgcccaggttggtcttgaactcctagcctcaagcgatcctcctgcctcagcctcccaatgtgctgggattacaggaatgagccaccatgcccagcccaagaagtagagtttcttttatactgactttggcctaaaaaaacagattttcatggaggaaaaaaaaacctagatttttagtaagactattttatatacttttttacattgatcaagtacattatttttaccaaacaacattgtttcccactacatccatggttatgtataaaaaaacgccattgtcaattaagatgttaaaaaattatttccataagagtattaaattctaatctatgattcacttaacttcctactttataaacactaggtaaagtaatctcacaagctgccaaagaacacatcccaagcagtaatcacagacgatgaagcaccttacaggacccctccaccctcaaacgcgcatgtccagagaagtattaatgccttaatagactactgaaggttaactatttacatcattctaaaaatattttaagctgtattacagtgctataaattctccttttaaggaaaaaagtaatagattgtttccttaccgtgtttgaaaggaaaaaaaataaatccatagtaactaatggtctgccgattttttccctgaatttttaaactccaacaaagcattattttgcaaaaagtcctttagcccaaagtcagtgtctctgttttgatctctttgtaaaagaactctctgttcatccattctctttccctgggaccgtaaaataaggctgaaaaagtcttcatctggtactgtcggaccctttgtggtagcaggtggtggagcacatctttgatcatctaatctggatccctagaagtttatgagagagattaaaagacatactgtgggaaagaaagcaccaagctatgttaaatctctcagtcacaacaagaaaacgcagttgtaaacttttatttggggcttctcagaaattaatctttgtttttatattgttctctttagttcccagcctgatttctgaaagaaataatctttaaacctg

SEQ ID NO: 377702 - DNA, 439 bp, Homo sapiens
tgattatgaagtgttcttcccagactagctttatcgtcatctgggaaattgttaaaaatgcaaattcgcaagtttgagagccatggttccaagaaactgcataagcatacgaaataagttgcagcctcccgacttataccctggtacttctagtctaaaacaggatttgactctactaatccaggttagtcttgcctttcccattactcatgtgctttcgttgaaaccaaagactttttcttttgtgcccatttctactcactgcctggccgtctgcacgacgatctgtgtttcctggtagttctccagtctagtagctactataaactactctccctatttcccgctctgtggagatgtcgttccaacaggtcctctccactctaagaccctatcctctcagagaagcccctgagagccattagtacttttgccctgg

SEQ ID NO: 377703 - DNA, 4791 bp, Homo sapiens
tcgatgacgaggcccaggaagcacgctgaaaccctgggcggcggcaagctgtgcgacctcttctgcggccggcctgggcaggtgtctccttatacaggatgctgtgttctttgctcctttgtgaatgtctgttgctggtagctggttatgctcatgatgatgactggattgaccccacagacatgcttaactatgatgctgcttcaggaacaatgagaaaatctcaggcaaaatatggtatttcaggggaaaaggatgtcagtcctgacttgtcatgtgctgatgaaatatcagaatgttatcacaaacttgattctttaacttataagattgatgagtgtgaaaagaaaaagagggaagactatgaaagtcaaagcaatcctgtttttaggagatacttaaataagattttaattgaagctggaaagcttggacttcctgatgaaaacaaaggcgatatgcattatgatgctgagattatccttaaaagagaaactttgttagaaatacagaagtttctcaatggagaagactggaaaccaggtgccttggatgatgcactaagtgatattttaattaattttaagtttcatgattttgaaacatggaagtggcgattcgaagattcctttggagtggatccatataatgtgttaatggtacttctttgtctgctctgcatcgtggttttagtggctactgagctgtggacatatgtacgttggtacactcagttgagacgtgttttaatcatcagctttctgttcagtttgggatggaattggatgtatttatataagctagcttttgcacagcatcaggctgaagtcgccaagatggagccattaaacaatgtgtgtgccaaaaagatggactggactggaagtatctgggaatggtttagaagttcatggacctataaggatgacccatgccaaaaatactatgagctcttactagtcaaccctatttggttggtcccaccaacaaaggcacttgcagttacattcaccacatttgtaacggagccattgaagcatattggaaaaggaactggggaatttattaaagcactcatgaaggaaattccagcgctgcttcatcttccagtgctgataattatggcattagccatcctgagtttctgctatggtgctggaaaatcagttcatgtgctgagacatataggcggtcctgagagcgaacctccccaggcacttcggccacgggatagaagacggcaggaggaaattgattatagacctgatggtggagcaggtgatgccgatttccattataggggccaaatgggccccactgagcaaggcccttatgccaaaacgtatgagggtagaagagagattttgagagagagagatgttgacttgagatttcagactggcaacaagagccctgaagtgctccgggcatttgatgtaccagacgcagaggcacgagagcatcccacggtggtacccagtcataaatcacctgttttggatacaaagcccaaggagacaggtggaatcctgggggaaggcacaccgaaagaaagcagtactgaaagcagccagtcggccaagcctgtctctggccaagacacatcagggaatacagaaggttcacccgcagcggaaaaggcccagctcaagtctgaagccgcaggcagcccagaccaaggcagcacatacagccccgcaagaggtgtggctggaccacgtggacaggatccggtcagcagcccctgtggctagaggaacaccagcacaaacgacagcctcaagtctccttcgagctttatatccatttggggatgaagtctactttgacagctagcaaggcgacatgcaactgttgttgaatgatgacagcaattcaggaaagacttaaatatgaaagcaaattgaacacatcgggtgtttgttatcagaaaagagatgagatgagataagacttgtttattgactagccaatatgtcattaaaattaaggtttatattgtgaagcttttttgaaattttacttttttttgagagttttgctctgtcacccaggctggagtgaggtggtacaatctcggctcactgcaacctccacctcccaggttcaagagattctcctgcctcagtctcccgagtagctaggattacagatgtgcatcaccatgcctggctaatttttgtattttttagtagagatggggtttcaccatgttggtcaggctggtctcgaactcctgacctcaagtgacccgcccttgtcggcctcccaaagtgctgggattacaggcatgagccattgtgcccagcctatatagtgtgaagcttttaggaaaatcagaacagggtagacagctgttaaaaacaatgtttaaatggaataatgttgaatgtttacaggctgtaagaactattgtatacacaaaataatacacaaagtttgtactttgtgtacaaatacaaatttgtactttgtgtacaaataatacaaaaagtttgtatacacaaactttttacgttgtggtttggtatattgtcttaactgaattttcttataagaaccccatgaaacttacctgagtttttaaaatgctatccaggacatcataccttatagtatacatgaaacataatgtaatccaggttgtaatttagaacttttttttttttttagctgagcacttaatgtaattaattccaggttatgactcttaaaaaacattggccattagagaaatagttctatttgcccatccaaatcacctgaatgactttttgaaagaataggggtccacatccccagatcccatcccagctgtgcacagtctgaagcaagcagagtgaaacaagttggcaacttgttccaagcgtgggcctttgcagtctgtgatccagtgttactccaggtcccagtctgtcccatacttgtcttttgctacagttagttagttactttgttatcatccccttgtaaactgccttcaatatctgggataaggaagacaaagcttaatgacaactaaggttctagctgacatctttctttcatatttaatttttgtgagttttcatctgttttctgtttgtttatgtgtcctaggttcttgacctaaccacatgggttttgttttttgtttttatattagaacttagaaaagtttgttttacagcagtattatggaacagaagagaccattttaaataatttttttaaacagcccaaaacacacaaaagatacttgttttctagagacagggtcttgctctgtcacccaggctggagtgcagtggcacgatcatagctcagtgcagcctccacctcctgggctcaagtggtcctcctgcctcagcctcttaagcagttgggactacaggtgtgtgccagcatgcttgctttttttttttttttgagacagagtcttgctctgtcactcaggctggagtccagtggcttggtctcagctcactgcaatctctgcctcccaggggttcaagtgattctcctgcctcagcctcccaagtagctgaaactacaggcgcatgccaccatgcccagctaatttttgtatttttagtagagacagggtttcactatgttggccaggctggtctcaaactcccgacctcaagtgatccgcccgcttcggcctcccaaagtgctgggattacaggtgtgagccactgcgcctggctgctgatttatttttcatagacacgggggtctatgttgcccaggttggtcttgaactcctagcctcaagcgatcctcctgcctcagcctcccaatgtgctgggattacaggaatgagccaccatgcccagcccaagaagtagagtttcttttatactgactttggcctaaaaaaacagattttcatggaggaaaaaaaaacctagatttttagtaagactattttatatacttttttacattgatcaagtacattatttttaccaaacaacattgtttcccactacatccatggttatgtataaaaaaacgccattgtcaattaagatgttaaaaaattatttccataagagtattaaattctaatctatgattcacttaacttcctactttataaacactaggtaaagtaatctcacaagctgccaaagaacacatcccaagcagtaatcacagacgatgaagcaccttacaggacccctccaccctcaaacgcgcatgtccagagaagtattaatgccttaatagactactgaaggttaactatttacatcattctaaaaatattttaagctgtattacagtgctataaattctccttttaaggaaaaaagtaatagattgtttccttaccgtgtttgaaaggaaaaaaaataaatccatagtaactaatggtctgccgattttttccctgaatttttaaactccaacaaagcattattttgcaaaaagtcctttagcccaaagtcagtgtctctgttttgatctctttgtaaaagaactctctgttcatccattctctttccctgggaccgtaaaataaggctgaaaaagtcttcatctggtactgtcggaccctttgtggtagcaggtggtggagcacatctttgatcatctaatctggatccctagaagtttatgagagagattaaaagacatactgtgggaaagaaagcaccaagctatgttaaatctctcagtcacaacaagaaaacgcagttgtaaacttttatttggggcttctcagaaattaatctttgtttttatattgttctctttagttcccagcctgatttctgaaagaaataatctttaaacctg

SEQ ID NO: 377704 - DNA, 5060 bp, Homo sapiens
gactcctgggctcaaaggatcttcccatcttggcctccaaagtgctgggattacaagcgtgagccattgcgcctggctccaaatctgatttgagtgtaaaaagttagacacaccataagctgtaggtttattactgggtggtgaaaaacaattcaggttttctttataatagtgattatgaagtgttcttcccagactagctttatcgtcatctgggaaattgttaaaaatgcaaattcgcaagtttgagagccatggttccaagaaactgcataagcatacgaaataagttgcagcctcccgacttataccctggtacttctagtctaaaacaggatttgactctactaatccagccttatacaggatgctgtgttctttgctcctttgtgaatgtctgttgctggtagctggttatgctcatgatgatgactggattgaccccacagacatgcttaactatgatgctgcttcaggaacaatgagaaaatctcaggcaaaatatggtatttcaggggaaaaggatgtcagtcctgacttgtcatgtgctgatgaaatatcagaatgttatcacaaacttgattctttaacttataagattgatgagtgtgaaaagaaaaagagggaagactatgaaagtcaaagcaatcctgtttttaggagatacttaaataagattttaattgaagctggaaagcttggacttcctgatgaaaacaaaggcgatatgcattatgatgctgagattatccttaaaagagaaactttgttagaaatacagaagtttctcaatggagaagactggaaaccaggtgccttggatgatgcactaagtgatattttaattaattttaagtttcatgattttgaaacatggaagtggcgattcgaagattcctttggagtggatccatataatgtgttaatggtacttctttgtctgctctgcatcgtggttttagtggctactgagctgtggacatatgtacgttggtacactcagttgagacgtgttttaatcatcagctttctgttcagtttgggatggaattggatgtatttatataagctagcttttgcacagcatcaggctgaagtcgccaagatggagccattaaacaatgtgtgtgccaaaaagatggactggactggaagtatctgggaatggtttagaagttcatggacctataaggatgacccatgccaaaaatactatgagctcttactagtcaaccctatttggttggtcccaccaacaaaggcacttgcagttacattcaccacatttgtaacggagccattgaagcatattggaaaaggaactggggaatttattaaagcactcatgaaggaaattccagcgctgcttcatcttccagtgctgataattatggcattagccatcctgagtttctgctatggtgctggaaaatcagttcatgtgctgagacatataggcggtcctgagagcgaacctccccaggcacttcggccacgggatagaagacggcaggaggaaattgattatagacctgatggtggagcaggtgatgccgatttccattataggggccaaatgggccccactgagcaaggcccttatgccaaaacgtatgagggtagaagagagattttgagagagagagatgttgacttgagatttcagactggcaacaagagccctgaagtgctccgggcatttgatgtaccagacgcagaggcacgagagcatcccacggtggtacccagtcataaatcacctgttttggatacaaagcccaaggagacaggtggaatcctgggggaaggcacaccgaaagaaagcagtactgaaagcagccagtcggccaagcctgtctctggccaagacacatcagggaatacagaaggttcacccgcagcggaaaaggcccagctcaagtctgaagccgcaggcagcccagaccaaggcagcacatacagccccgcaagaggtgtggctggaccacgtggacaggatccggtcagcagcccctgtggctagaggaacaccagcacaaacgacagcctcaagtctccttcgagctttatatccatttggggatgaagtctactttgacagctagcaaggcgacatgcaactgttgttgaatgatgacagcaattcaggaaagacttaaatatgaaagcaaattgaacacatcgggtgtttgttatcagaaaagagatgagatgagataagacttgtttattgactagccaatatgtcattaaaattaaggtttatattgtgaagcttttttgaaattttacttttttttgagagttttgctctgtcacccaggctggagtgaggtggtacaatctcggctcactgcaacctccacctcccaggttcaagagattctcctgcctcagtctcccgagtagctaggattacagatgtgcatcaccatgcctggctaatttttgtattttttagtagagatggggtttcaccatgttggtcaggctggtctcgaactcctgacctcaagtgacccgcccttgtcggcctcccaaagtgctgggattacaggcatgagccattgtgcccagcctatatagtgtgaagcttttaggaaaatcagaacagggtagacagctgttaaaaacaatgtttaaatggaataatgttgaatgtttacaggctgtaagaactattgtatacacaaaataatacacaaagtttgtactttgtgtacaaatacaaatttgtactttgtgtacaaataatacaaaaagtttgtatacacaaactttttacgttgtggtttggtatattgtcttaactgaattttcttataagaaccccatgaaacttacctgagtttttaaaatgctatccaggacatcataccttatagtatacatgaaacataatgtaatccaggttgtaatttagaacttttttttttttttagctgagcacttaatgtaattaattccaggttatgactcttaaaaaacattggccattagagaaatagttctatttgcccatccaaatcacctgaatgactttttgaaagaataggggtccacatccccagatcccatcccagctgtgcacagtctgaagcaagcagagtgaaacaagttggcaacttgttccaagcgtgggcctttgcagtctgtgatccagtgttactccaggtcccagtctgtcccatacttgtcttttgctacagttagttagttactttgttatcatccccttgtaaactgccttcaatatctgggataaggaagacaaagcttaatgacaactaaggttctagctgacatctttctttcatatttaatttttgtgagttttcatctgttttctgtttgtttatgtgtcctaggttcttgacctaaccacatgggttttgttttttgtttttatattagaacttagaaaagtttgttttacagcagtattatggaacagaagagaccattttaaataatttttttaaacagcccaaaacacacaaaagatacttgttttctagagacagggtcttgctctgtcacccaggctggagtgcagtggcacgatcatagctcagtgcagcctccacctcctgggctcaagtggtcctcctgcctcagcctcttaagcagttgggactacaggtgtgtgccagcatgcttgctttttttttttttttgagacagagtcttgctctgtcactcaggctggagtccagtggcttggtctcagctcactgcaatctctgcctcccaggggttcaagtgattctcctgcctcagcctcccaagtagctgaaactacaggcgcatgccaccatgcccagctaatttttgtatttttagtagagacagggtttcactatgttggccaggctggtctcaaactcccgacctcaagtgatccgcccgcttcggcctcccaaagtgctgggattacaggtgtgagccactgcgcctggctgctgatttatttttcatagacacgggggtctatgttgcccaggttggtcttgaactcctagcctcaagcgatcctcctgcctcagcctcccaatgtgctgggattacaggaatgagccaccatgcccagcccaagaagtagagtttcttttatactgactttggcctaaaaaaacagattttcatggaggaaaaaaaaacctagatttttagtaagactattttatatacttttttacattgatcaagtacattatttttaccaaacaacattgtttcccactacatccatggttatgtataaaaaaacgccattgtcaattaagatgttaaaaaattatttccataagagtattaaattctaatctatgattcacttaacttcctactttataaacactaggtaaagtaatctcacaagctgccaaagaacacatcccaagcagtaatcacagacgatgaagcaccttacaggacccctccaccctcaaacgcgcatgtccagagaagtattaatgccttaatagactactgaaggttaactatttacatcattctaaaaatattttaagctgtattacagtgctataaattctccttttaaggaaaaaagtaatagattgtttccttaccgtgtttgaaaggaaaaaaaataaatccatagtaactaatggtctgccgattttttccctgaatttttaaactccaacaaagcattattttgcaaaaagtcctttagcccaaagtcagtgtctctgttttgatctctttgtaaaagaactctctgttcatccattctctttccctgggaccgtaaaataaggctgaaaaagtcttcatctggtactgtcggaccctttgtggtagcaggtggtggagcacatctttgatcatctaatctggatccctagaagtttatgagagagattaaaagacatactgtgggaaagaaagcaccaagctatgttaaatctctcagtcacaacaagaaaacgcagttgtaaacttttatttggggcttctcagaaattaatctttgtttttatattgttctctttagttcccagcctgatttctgaaagaaataatctttaaacctg

SEQ ID NO: 377705 - DNA, 4821 bp, Homo sapiens
tcgatgacgaggcccaggaagcacgctgaaaccctgggcggcggcaagctgtgcgacctcttctgcggccggcctgggcaggtgtcttcctcgagaggcaggcaggggatcccggacccttatacaggatgctgtgttctttgctcctttgtgaatgtctgttgctggtagctggttatgctcatgatgatgactggattgaccccacagacatgcttaactatgatgctgcttcaggaacaatgagaaaatctcaggcaaaatatggtatttcaggggaaaaggatgtcagtcctgacttgtcatgtgctgatgaaatatcagaatgttatcacaaacttgattctttaacttataagattgatgagtgtgaaaagaaaaagagggaagactatgaaagtcaaagcaatcctgtttttaggagatacttaaataagattttaattgaagctggaaagcttggacttcctgatgaaaacaaaggcgatatgcattatgatgctgagattatccttaaaagagaaactttgttagaaatacagaagtttctcaatggagaagactggaaaccaggtgccttggatgatgcactaagtgatattttaattaattttaagtttcatgattttgaaacatggaagtggcgattcgaagattcctttggagtggatccatataatgtgttaatggtacttctttgtctgctctgcatcgtggttttagtggctactgagctgtggacatatgtacgttggtacactcagttgagacgtgttttaatcatcagctttctgttcagtttgggatggaattggatgtatttatataagctagcttttgcacagcatcaggctgaagtcgccaagatggagccattaaacaatgtgtgtgccaaaaagatggactggactggaagtatctgggaatggtttagaagttcatggacctataaggatgacccatgccaaaaatactatgagctcttactagtcaaccctatttggttggtcccaccaacaaaggcacttgcagttacattcaccacatttgtaacggagccattgaagcatattggaaaaggaactggggaatttattaaagcactcatgaaggaaattccagcgctgcttcatcttccagtgctgataattatggcattagccatcctgagtttctgctatggtgctggaaaatcagttcatgtgctgagacatataggcggtcctgagagcgaacctccccaggcacttcggccacgggatagaagacggcaggaggaaattgattatagacctgatggtggagcaggtgatgccgatttccattataggggccaaatgggccccactgagcaaggcccttatgccaaaacgtatgagggtagaagagagattttgagagagagagatgttgacttgagatttcagactggcaacaagagccctgaagtgctccgggcatttgatgtaccagacgcagaggcacgagagcatcccacggtggtacccagtcataaatcacctgttttggatacaaagcccaaggagacaggtggaatcctgggggaaggcacaccgaaagaaagcagtactgaaagcagccagtcggccaagcctgtctctggccaagacacatcagggaatacagaaggttcacccgcagcggaaaaggcccagctcaagtctgaagccgcaggcagcccagaccaaggcagcacatacagccccgcaagaggtgtggctggaccacgtggacaggatccggtcagcagcccctgtggctagaggaacaccagcacaaacgacagcctcaagtctccttcgagctttatatccatttggggatgaagtctactttgacagctagcaaggcgacatgcaactgttgttgaatgatgacagcaattcaggaaagacttaaatatgaaagcaaattgaacacatcgggtgtttgttatcagaaaagagatgagatgagataagacttgtttattgactagccaatatgtcattaaaattaaggtttatattgtgaagcttttttgaaattttacttttttttgagagttttgctctgtcacccaggctggagtgaggtggtacaatctcggctcactgcaacctccacctcccaggttcaagagattctcctgcctcagtctcccgagtagctaggattacagatgtgcatcaccatgcctggctaatttttgtattttttagtagagatggggtttcaccatgttggtcaggctggtctcgaactcctgacctcaagtgacccgcccttgtcggcctcccaaagtgctgggattacaggcatgagccattgtgcccagcctatatagtgtgaagcttttaggaaaatcagaacagggtagacagctgttaaaaacaatgtttaaatggaataatgttgaatgtttacaggctgtaagaactattgtatacacaaaataatacacaaagtttgtactttgtgtacaaatacaaatttgtactttgtgtacaaataatacaaaaagtttgtatacacaaactttttacgttgtggtttggtatattgtcttaactgaattttcttataagaaccccatgaaacttacctgagtttttaaaatgctatccaggacatcataccttatagtatacatgaaacataatgtaatccaggttgtaatttagaacttttttttttttttagctgagcacttaatgtaattaattccaggttatgactcttaaaaaacattggccattagagaaatagttctatttgcccatccaaatcacctgaatgactttttgaaagaataggggtccacatccccagatcccatcccagctgtgcacagtctgaagcaagcagagtgaaacaagttggcaacttgttccaagcgtgggcctttgcagtctgtgatccagtgttactccaggtcccagtctgtcccatacttgtcttttgctacagttagttagttactttgttatcatccccttgtaaactgccttcaatatctgggataaggaagacaaagcttaatgacaactaaggttctagctgacatctttctttcatatttaatttttgtgagttttcatctgttttctgtttgtttatgtgtcctaggttcttgacctaaccacatgggttttgttttttgtttttatattagaacttagaaaagtttgttttacagcagtattatggaacagaagagaccattttaaataatttttttaaacagcccaaaacacacaaaagatacttgttttctagagacagggtcttgctctgtcacccaggctggagtgcagtggcacgatcatagctcagtgcagcctccacctcctgggctcaagtggtcctcctgcctcagcctcttaagcagttgggactacaggtgtgtgccagcatgcttgctttttttttttttttgagacagagtcttgctctgtcactcaggctggagtccagtggcttggtctcagctcactgcaatctctgcctcccaggggttcaagtgattctcctgcctcagcctcccaagtagctgaaactacaggcgcatgccaccatgcccagctaatttttgtatttttagtagagacagggtttcactatgttggccaggctggtctcaaactcccgacctcaagtgatccgcccgcttcggcctcccaaagtgctgggattacaggtgtgagccactgcgcctggctgctgatttatttttcatagacacgggggtctatgttgcccaggttggtcttgaactcctagcctcaagcgatcctcctgcctcagcctcccaatgtgctgggattacaggaatgagccaccatgcccagcccaagaagtagagtttcttttatactgactttggcctaaaaaaacagattttcatggaggaaaaaaaaacctagatttttagtaagactattttatatacttttttacattgatcaagtacattatttttaccaaacaacattgtttcccactacatccatggttatgtataaaaaaacgccattgtcaattaagatgttaaaaaattatttccataagagtattaaattctaatctatgattcacttaacttcctactttataaacactaggtaaagtaatctcacaagctgccaaagaacacatcccaagcagtaatcacagacgatgaagcaccttacaggacccctccaccctcaaacgcgcatgtccagagaagtattaatgccttaatagactactgaaggttaactatttacatcattctaaaaatattttaagctgtattacagtgctataaattctccttttaaggaaaaaagtaatagattgtttccttaccgtgtttgaaaggaaaaaaaataaatccatagtaactaatggtctgccgattttttccctgaatttttaaactccaacaaagcattattttgcaaaaagtcctttagcccaaagtcagtgtctctgttttgatctctttgtaaaagaactctctgttcatccattctctttccctgggaccgtaaaataaggctgaaaaagtcttcatctggtactgtcggaccctttgtggtagcaggtggtggagcacatctttgatcatctaatctggatccctagaagtttatgagagagattaaaagacatactgtgggaaagaaagcaccaagctatgttaaatctctcagtcacaacaagaaaacgcagttgtaaacttttatttggggcttctcagaaattaatctttgtttttatattgttctctttagttcccagcctgatttctgaaagaaataatctttaaacctg

SEQ ID NO: 377706 - DNA, 4510 bp, Homo sapiens
tcgatgacgaggcccaggaagcacgctgaaaccctgggcggcggcaagctgtgcgacctcttctgcggccggcctgggcaggtgtctccttatacaggatgctgtgttctttgctcctttgtgaatgtctgttgctggtagctggttatgctcatgatgatgactggattgaccccacagacatgcttaactatgatgctgcttcaggaacaatgagaaaatctcaggcaaaatatggtatttcaggggaaaaggatgtcagtcctgacttgtcatgtgctgatgaaatatcagaatgttatcacaaacttgattctttaacttataagattgatgagtgtgaaaagaaaaagagggaagactatgaaagtcaaagcaatcctgtttttaggagatacttaaataagattttaattgaagctggaaagcttggacttcctgatgaaaacaaaggcgatatgcattatgatgctgagattatccttaaaagagaaactttgttagaaatacagaagtttctcaatggagaagactggaaaccaggtgccttggatgatgcactaagtgatattttaattaattttaagtttcatgattttgaaacatggaagtggcgattcgaagattcctttggagtggatccatataatgtgttaatggtacttctttgtctgctctgcatcgtggttttagtggctactgagctgtggacatatgtacgttggtacactcagttgagacgtgttttaatcatcagctttctgttcagtttgggatggaattggatgtatttatataagctagcttttgcacagcatcaggctgaagtcgccaagatggagccattaaacaatgtgtgtgccaaaaagatggactggactggaagtatctgggaatggtttagaagttcatggacctataaggatgacccatgccaaaaatactatgagctcttactagtcaaccctatttggttggtcccaccaacaaaggcacttgcagttacattcaccacatttgtaacggagccattgaagcatattggaaaaggaactggggaatttattaaagcactcatgaaggaaattccagcgctgcttcatcttccagtgctgataattatggcattagccatcctgagtttctgctatggtgctggaaaatcagttcatgtgctgagacatataggcggtcctgagagcgaacctccccaggcacttcggccacgggatagaagacggcaggaggaaattgattatagacctgatggtggagcaggtgatgccgatttccattataggggccaaatgggccccactgagcaaggcccttatgccaaaacgtatgagggtagaagagagattttgagagagagagatgttgacttgagatttcagactggcaacaagagccctgaagtgctccgggcatttgatgtaccagacgcagaggcacgagagcatcccacggtggtacccagtcataaatcacctgttttggatacaaagcccaaggagacaggtggaatcctgggggaaggcacaccgaaagaaagcagtactgaaagcagccagtcggccaagcctgtctctggccaagacacatcagggaatacagaaggttcacccgcagcggaaaaggcccagctcaagtctgaagccgcaggcagcccagaccaaggcagcacatacagccccgcaagaggtgtggctggaccacgtggacaggatccggtcagcagcccctgtggctagaggaacaccagcacaaacgacagcctcaagtctccttcgagctttgtaaagtatactcttcactctctttctcttctctgcaagaattctgattactacaaaggtgccaacttcaacattcacatttcaacttcaacattcacatttttactgacaattagaattaacaaacacgttatatatgtaaaagcttttcatttcatcttctctttgatatttacatcccataaagtaagaagtgtttattttaagatgaacagatgacaggcatcactgattctggatagttaaggaggccagtttgaattggggacattgaaaaagaaattttattgttacaggcacttacgggaacccactaaccaatttacattgcctagtgaatccactagagttaaggccacccacttgatgcctccagcatcttcatgcagccatggagtatcgttaccaggatcagtctgactgacacctcagcttatctctacgcaggctgcccacaggtcactgtggctgtagtttcatcttttccacagctattactacgcctgcatccttattgttccttttactttgtttacttagagaaaactgaagactgccagggcaatttagataacatagcttgttatattggtaatctgttttacagagtcagtcgactgaaaatgactttattcttttcccccaccaattgaagtgcatgggctttttataaaacctattttttgtgttactcagaatcctagcagtggagactattagatattaccatatcttaattcatattatagcaaatcatattgtcttgtccataggaagtttgcatttttagagatctatacatagagaataccatgatgaggaagaagagagttgggtgtcttccttaactgcagacaggacatcagtcagcactttacattagcctttctgattatcaaaagcattcctcattttaaactttttaaaaagcaatgcataaattttgtacctgtccttagcagacttcacagacatcaggtgtcctttgttttaaccatattcacactacaagttatgttcaactgcttactaaaagtgataccagtcaggaataaagtctttaaattttcatgcagatatttgtatcccaagcacttgcttttttattttaatatgaaatgcagaatacacatttttggatccaggaagtgttacttacgtgcctgtaacaatgtaattttaggccaggtgcagtggctcatgcctacagtcctagcactttggaaggttgagggaggatgatcgcttaagttcagttgttgaaatgcagaatacacatttttggatccaggaagtgttacttacgtgcctgtaacaatgtaattttaggccaggtgcagtggctcatgcctacagtcctagcactttggaaggttgagggaggatgatcgcttaagttcagttgttgaaatgcagaatacacatttttggatccaggaagtgttacttacgtgcctgtaacaatgtaattttaggccaggtgcagtggctcatgcctacagtcctagcactttggaaggttgagggaggatgatcgcttaagctcagttgttcaaggctatgtactaaaaataaaactagccaggcatggtggtacacgcctgcagtcccagctacttggagggctgaggcaagaggatcgtgaggtggcagtgagttatgatcgagccactgtactccagcctgggtgacagagcaagaccttgtctcaaaattatacatgttaatatattctagtttaatattgcaaacatctttagaatttcatcagaaacgtgattttttctaagaaatgcaaaaggattttaggatttttaacacagaggacatgtttaacaaatgaatcctgacagacacctgcagtttagaataaatttgtgaacatccatgcgtataaagtgtcctcttgggacaagacatgttcacactgacttggggaatatgcccccaaggtgagagctgtcttttgaactgtgatctgactctgaaaagtagtgaatgccccaggtgatagactgtaactgtgagtggaattaatgctgcttgcatgccttttaatccaaaaccaaattcttttaaaaaatttttaaataaaatttcacctttgtattctttcattacagatatccatttggggatgaagtctactttgacagctagcaaggcgacatgcaactgttgttgaatgatgacagcaattcaggaaagacttaaatatgaaagcaaattgaacacatcgggtgtttgttatcagaaaagagatgagatgagataagacttgtttattgactagccaatatgtcattaaaattaaggtttatattgtgaagcttttttgaaattttacttttttttgagagttttgctctgtcacccaggttgcagcgagcagagatcacaccactgcactccagcctgggcaacagagcgagactctgtctcaaaaaaaaaaaaaattttagtaaaaatcaagggtaagctaaaataagttttggttggtttattggttttggagatggagtctctactaaaaatacaaaaaattagccgggcgtggtggcaggtgcctataatcccagctactcgggaggctgaggcaggagactcacttgaacccggtgggcagaggttgcagtgagccatgattgggccattgcactctagcctgggcaacaagagcgaaactccgtctcaaaaaaacaaaaaacaaa

SEQ ID NO: 377707 - DNA, 6794 bp, Homo sapiens
tcgatgacgaggcccaggaagcacgctgaaaccctgggcggcggcaagctgtgcgacctcttctgcggccggcctgggcaggtgtcttcctcgagaggcaggcaggggatcccggacccttatacaggatgctgtgttctttgctcctttgtgaatgtctgttgctggtagctggttatgctcatgatgatgactggattgaccccacagacatgcttaactatgatgctgcttcaggaacaatgagaaaatctcaggcaaaatatggtatttcaggggaaaaggatgtcagtcctgacttgtcatgtgctgatgaaatatcagaatgttatcacaaacttgattctttaacttataagattgatgagtgtgaaaagaaaaagagggaagactatgaaagtcaaagcaatcctgtttttaggagatacttaaataagattttaattgaagctggaaagcttggactttttcatgattttgaaacatggaagtggcgattcgaagattcctttggagtggatccatataatgtgttaatggtacttctttgtctgctctgcatcgtggttttagtggctactgagctgtggacatatgtacgttggtacactcagttgagacgtgttttaatcatcagctttctgttcagtttgggatggaattggatgtatttatataagctagcttttgcacagcatcaggctgaagtcgccaagatggagccattaaacaatgtgtgtgccaaaaagatggactggactggaagtatctgggaatggtttagaagttcatggacctataaggatgacccatgccaaaaatactatgagctcttactagtcaaccctatttggttggtcccaccaacaaaggcacttgcagttacattcaccacatttgtaacggagccattgaagcatattggaaaaggaactggggaatttattaaagcactcatgaaggaaattccagcgctgcttcatcttccagtgctgataattatggcattagccatcctgagtttctgctatggtgctggaaaatcagttcatgtgctgagacatataggcggtcctgagagcgaacctccccaggcacttcggccacgggatagaagacggcaggaggaaattgattatagacctgatggtggagcaggtgatgccgatttccattataggggccaaatgggccccactgagcaaggcccttatgccaaaacgtatgagggtagaagagagattttgagagagagagatgttgacttgagatttcagactggcaacaagagccctgaagtgctccgggcatttgatgtaccagacgcagaggcacgagagcatcccacggtggtacccagtcataaatcacctgttttggatacaaagcccaaggagacaggtggaatcctgggggaaggcacaccgaaagaaagcagtactgaaagcagccagtcggccaagcctgtctctggccaagacacatcagggaatacagaaggttcacccgcagcggaaaaggcccagctcaagtctgaagccgcaggcagcccagaccaaggcagcacatacagccccgcaagaggtgtggctggaccacgtggacaggatccggtcagcagcccctgtggctagaggaacaccagcacaaacgacagcctcaagtctccttcgagctttgtaaagtatactcttcactctctttctcttctctgcaagaattctgattactacaaaggtgccaacttcaacattcacatttcaacttcaacattcacatttttactgacaattagaattaacaaacacgttatatatgtaaaagcttttcatttcatcttctctttgatatttacatcccataaagtaagaagtgtttattttaagatgaacagatgacaggcatcactgattctggatagttaaggaggccagtttgaattggggacattgaaaaagaaattttattgttacaggcacttacgggaacccactaaccaatttacattgcctagtgaatccactagagttaaggccacccacttgatgcctccagcatcttcatgcagccatggagtatcgttaccaggatcagtctgactgacacctcagcttatctctacgcaggctgcccacaggtcactgtggctgtagtttcatcttttccacagctattactacgcctgcatccttattgttccttttactttgtttacttagagaaaactgaagactgccagggcaatttagataacatagcttgttatattggtaatctgttttacagagtcagtcgactgaaaatgactttattcttttcccccaccaattgaagtgcatgggctttttataaaacctattttttgtgttactcagaatcctagcagtggagactattagatattaccatatcttaattcatattatagcaaatcatattgtcttgtccataggaagtttgcatttttagagatctatacatagagaataccatgatgaggaagaagagagttgggtgtcttccttaactgcagacaggacatcagtcagcactttacattagcctttctgattatcaaaagcattcctcattttaaactttttaaaaagcaatgcataaattttgtacctgtccttagcagacttcacagacatcaggtgtcctttgttttaaccatattcacactacaagttatgttcaactgcttactaaaagtgataccagtcaggaataaagtctttaaattttcatgcagatatttgtatcccaagcacttgcttttttattttaatatgaaatgcagaatacacatttttggatccaggaagtgttacttacgtgcctgtaacaatgtaattttaggccaggtgcagtggctcatgcctacagtcctagcactttggaaggttgagggaggatgatcgcttaagttcagttgttgaaatgcagaatacacatttttggatccaggaagtgttacttacgtgcctgtaacaatgtaattttaggccaggtgcagtggctcatgcctacagtcctagcactttggaaggttgagggaggatgatcgcttaagttcagttgttgaaatgcagaatacacatttttggatccaggaagtgttacttacgtgcctgtaacaatgtaattttaggccaggtgcagtggctcatgcctacagtcctagcactttggaaggttgagggaggatgatcgcttaagctcagttgttcaaggctatgtactaaaaataaaactagccaggcatggtggtacacgcctgcagtcccagctacttggagggctgaggcaagaggatcgtgaggtggcagtgagttatgatcgagccactgtactccagcctgggtgacagagcaagaccttgtctcaaaattatacatgttaatatattctagtttaatattgcaaacatctttagaatttcatcagaaacgtgattttttctaagaaatgcaaaaggattttaggatttttaacacagaggacatgtttaacaaatgaatcctgacagacacctgcagtttagaataaatttgtgaacatccatgcgtataaagtgtcctcttgggacaagacatgttcacactgacttggggaatatgcccccaaggtgagagctgtcttttgaactgtgatctgactctgaaaagtagtgaatgccccaggtgatagactgtaactgtgagtggaattaatgctgcttgcatgccttttaatccaaaaccaaattcttttaaaaaatttttaaataaaatttcacctttgtattctttcattacagatatccatttggggatgaagtctactttgacagctagcaaggcgacatgcaactgttgttgaatgatgacagcaattcaggaaagacttaaatatgaaagcaaattgaacacatcgggtgtttgttatcagaaaagagatgagatgagataagacttgtttattgactagccaatatgtcattaaaattaaggtttatattgtgaagcttttttgaaattttacttttttttgagagttttgctctgtcacccaggctggagtgaggtggtacaatctcggctcactgcaacctccacctcccaggttcaagagattctcctgcctcagtctcccgagtagctaggattacagatgtgcatcaccatgcctggctaatttttgtattttttagtagagatggggtttcaccatgttggtcaggctggtctcgaactcctgacctcaagtgacccgcccttgtcggcctcccaaagtgctgggattacaggcatgagccattgtgcccagcctatatagtgtgaagcttttaggaaaatcagaacagggtagacagctgttaaaaacaatgtttaaatggaataatgttgaatgtttacaggctgtaagaactattgtatacacaaaataatacacaaagtttgtactttgtgtacaaatacaaatttgtactttgtgtacaaataatacaaaaagtttgtatacacaaactttttacgttgtggtttggtatattgtcttaactgaattttcttataagaaccccatgaaacttacctgagtttttaaaatgctatccaggacatcataccttatagtatacatgaaacataatgtaatccaggttgtaatttagaacttttttttttttttagctgagcacttaatgtaattaattccaggttatgactcttaaaaaacattggccattagagaaatagttctatttgcccatccaaatcacctgaatgactttttgaaagaataggggtccacatccccagatcccatcccagctgtgcacagtctgaagcaagcagagtgaaacaagttggcaacttgttccaagcgtgggcctttgcagtctgtgatccagtgttactccaggtcccagtctgtcccatacttgtcttttgctacagttagttagttactttgttatcatccccttgtaaactgccttcaatatctgggataaggaagacaaagcttaatgacaactaaggttctagctgacatctttctttcatatttaatttttgtgagttttcatctgttttctgtttgtttatgtgtcctaggttcttgacctaaccacatgggttttgttttttgtttttatattagaacttagaaaagtttgttttacagcagtattatggaacagaagagaccattttaaataatttttttaaacagcccaaaacacacaaaagatacttgttttctagagacagggtcttgctctgtcacccaggctggagtgcagtggcacgatcatagctcagtgcagcctccacctcctgggctcaagtggtcctcctgcctcagcctcttaagcagttgggactacaggtgtgtgccagcatgcttgctttttttttttttttgagacagagtcttgctctgtcactcaggctggagtccagtggcttggtctcagctcactgcaatctctgcctcccaggggttcaagtgattctcctgcctcagcctcccaagtagctgaaactacaggcgcatgccaccatgcccagctaatttttgtatttttagtagagacagggtttcactatgttggccaggctggtctcaaactcccgacctcaagtgatccgcccgcttcggcctcccaaagtgctgggattacaggtgtgagccactgcgcctggctgctgatttatttttcatagacacgggggtctatgttgcccaggttggtcttgaactcctagcctcaagcgatcctcctgcctcagcctcccaatgtgctgggattacaggaatgagccaccatgcccagcccaagaagtagagtttcttttatactgactttggcctaaaaaaacagattttcatggaggaaaaaaaaacctagatttttagtaagactattttatatacttttttacattgatcaagtacattatttttaccaaacaacattgtttcccactacatccatggttatgtataaaaaaacgccattgtcaattaagatgttaaaaaattatttccataagagtattaaattctaatctatgattcacttaacttcctactttataaacactaggtaaagtaatctcacaagctgccaaagaacacatcccaagcagtaatcacagacgatgaagcaccttacaggacccctccaccctcaaacgcgcatgtccagagaagtattaatgccttaatagactactgaaggttaactatttacatcattctaaaaatattttaagctgtattacagtgctataaattctccttttaaggaaaaaagtaatagattgtttccttaccgtgtttgaaaggaaaaaaaataaatccatagtaactaatggtctgccgattttttccctgaatttttaaactccaacaaagcattattttgcaaaaagtcctttagcccaaagtcagtgtctctgttttgatctctttgtaaaagaactctctgttcatccattctctttccctgggaccgtaaaataaggctgaaaaagtcttcatctggtactgtcggaccctttgtggtagcaggtggtggagcacatctttgatcatctaatctggatccctagaagtttatgagagagattaaaagacatactgtgggaaagaaagcaccaagctatgttaaatctctcagtcacaacaagaaaacgcagttgtaaacttttatttggggcttctcagaaattaatctttgtttttatattgttctctttagttcccagcctgatttctgaaagaaataatctttaaacctg

SEQ ID NO: 377708 - DNA, 6073 bp, Homo sapiens
tgaaatgcaacattaaaagaaatgatcagtgttttgtctgtttctctaaacagaatggtttagaagttcatggacctataaggatgacccatgccaaaaatactatgagctcttactagtcaaccctatttggttggtcccaccaacaaaggcacttgcagttacattcaccacatttgtaacggagccattgaagcatattggaaaaggaactggggaatttattaaagcactcatgaaggaaattccagcgctgcttcatcttccagtgctgataattatggcattagccatcctgagtttctgctatggtgctggaaaatcagttcatgtgctgagacatataggcggtcctgagagcgaacctccccaggcacttcggccacgggatagaagacggcaggaggaaattgattatagacctgatggtggagcaggtgatgccgatttccattataggggccaaatgggccccactgagcaaggcccttatgccaaaacgtatgagggtagaagagagattttgagagagagagatgttgacttgagatttcagactggcaacaagagccctgaagtgctccgggcatttgatgtaccagacgcagaggcacgagagcatcccacggtggtacccagtcataaatcacctgttttggatacaaagcccaaggagacaggtggaatcctgggggaaggcacaccgaaagaaagcagtactgaaagcagccagtcggccaagcctgtctctggccaagacacatcagggaatacagaaggttcacccgcagcggaaaaggcccagctcaagtctgaagccgcaggcagcccagaccaaggcagcacatacagccccgcaagaggtgtggctggaccacgtggacaggatccggtcagcagcccctgtggctagaggaacaccagcacaaacgacagcctcaagtctccttcgagctttgtaaagtatactcttcactctctttctcttctctgcaagaattctgattactacaaaggtgccaacttcaacattcacatttcaacttcaacattcacatttttactgacaattagaattaacaaacacgttatatatgtaaaagcttttcatttcatcttctctttgatatttacatcccataaagtaagaagtgtttattttaagatgaacagatgacaggcatcactgattctggatagttaaggaggccagtttgaattggggacattgaaaaagaaattttattgttacaggcacttacgggaacccactaaccaatttacattgcctagtgaatccactagagttaaggccacccacttgatgcctccagcatcttcatgcagccatggagtatcgttaccaggatcagtctgactgacacctcagcttatctctacgcaggctgcccacaggtcactgtggctgtagtttcatcttttccacagctattactacgcctgcatccttattgttccttttactttgtttacttagagaaaactgaagactgccagggcaatttagataacatagcttgttatattggtaatctgttttacagagtcagtcgactgaaaatgactttattcttttcccccaccaattgaagtgcatgggctttttataaaacctattttttgtgttactcagaatcctagcagtggagactattagatattaccatatcttaattcatattatagcaaatcatattgtcttgtccataggaagtttgcatttttagagatctatacatagagaataccatgatgaggaagaagagagttgggtgtcttccttaactgcagacaggacatcagtcagcactttacattagcctttctgattatcaaaagcattcctcattttaaactttttaaaaagcaatgcataaattttgtacctgtccttagcagacttcacagacatcaggtgtcctttgttttaaccatattcacactacaagttatgttcaactgcttactaaaagtgataccagtcaggaataaagtctttaaattttcatgcagatatttgtatcccaagcacttgcttttttattttaatatgaaatgcagaatacacatttttggatccaggaagtgttacttacgtgcctgtaacaatgtaattttaggccaggtgcagtggctcatgcctacagtcctagcactttggaaggttgagggaggatgatcgcttaagttcagttgttgaaatgcagaatacacatttttggatccaggaagtgttacttacgtgcctgtaacaatgtaattttaggccaggtgcagtggctcatgcctacagtcctagcactttggaaggttgagggaggatgatcgcttaagttcagttgttgaaatgcagaatacacatttttggatccaggaagtgttacttacgtgcctgtaacaatgtaattttaggccaggtgcagtggctcatgcctacagtcctagcactttggaaggttgagggaggatgatcgcttaagctcagttgttcaaggctatgtactaaaaataaaactagccaggcatggtggtacacgcctgcagtcccagctacttggagggctgaggcaagaggatcgtgaggtggcagtgagttatgatcgagccactgtactccagcctgggtgacagagcaagaccttgtctcaaaattatacatgttaatatattctagtttaatattgcaaacatctttagaatttcatcagaaacgtgattttttctaagaaatgcaaaaggattttaggatttttaacacagaggacatgtttaacaaatgaatcctgacagacacctgcagtttagaataaatttgtgaacatccatgcgtataaagtgtcctcttgggacaagacatgttcacactgacttggggaatatgcccccaaggtgagagctgtcttttgaactgtgatctgactctgaaaagtagtgaatgccccaggtgatagactgtaactgtgagtggaattaatgctgcttgcatgccttttaatccaaaaccaaattcttttaaaaaatttttaaataaaatttcacctttgtattctttcattacagatatccatttggggatgaagtctactttgacagctagcaaggcgacatgcaactgttgttgaatgatgacagcaattcaggaaagacttaaatatgaaagcaaattgaacacatcgggtgtttgttatcagaaaagagatgagatgagataagacttgtttattgactagccaatatgtcattaaaattaaggtttatattgtgaagcttttttgaaattttacttttttttgagagttttgctctgtcacccaggctggagtgaggtggtacaatctcggctcactgcaacctccacctcccaggttcaagagattctcctgcctcagtctcccgagtagctaggattacagatgtgcatcaccatgcctggctaatttttgtattttttagtagagatggggtttcaccatgttggtcaggctggtctcgaactcctgacctcaagtgacccgcccttgtcggcctcccaaagtgctgggattacaggcatgagccattgtgcccagcctatatagtgtgaagcttttaggaaaatcagaacagggtagacagctgttaaaaacaatgtttaaatggaataatgttgaatgtttacaggctgtaagaactattgtatacacaaaataatacacaaagtttgtactttgtgtacaaatacaaatttgtactttgtgtacaaataatacaaaaagtttgtatacacaaactttttacgttgtggtttggtatattgtcttaactgaattttcttataagaaccccatgaaacttacctgagtttttaaaatgctatccaggacatcataccttatagtatacatgaaacataatgtaatccaggttgtaatttagaacttttttttttttttagctgagcacttaatgtaattaattccaggttatgactcttaaaaaacattggccattagagaaatagttctatttgcccatccaaatcacctgaatgactttttgaaagaataggggtccacatccccagatcccatcccagctgtgcacagtctgaagcaagcagagtgaaacaagttggcaacttgttccaagcgtgggcctttgcagtctgtgatccagtgttactccaggtcccagtctgtcccatacttgtcttttgctacagttagttagttactttgttatcatccccttgtaaactgccttcaatatctgggataaggaagacaaagcttaatgacaactaaggttctagctgacatctttctttcatatttaatttttgtgagttttcatctgttttctgtttgtttatgtgtcctaggttcttgacctaaccacatgggttttgttttttgtttttatattagaacttagaaaagtttgttttacagcagtattatggaacagaagagaccattttaaataatttttttaaacagcccaaaacacacaaaagatacttgttttctagagacagggtcttgctctgtcacccaggctggagtgcagtggcacgatcatagctcagtgcagcctccacctcctgggctcaagtggtcctcctgcctcagcctcttaagcagttgggactacaggtgtgtgccagcatgcttgctttttttttttttttgagacagagtcttgctctgtcactcaggctggagtccagtggcttggtctcagctcactgcaatctctgcctcccaggggttcaagtgattctcctgcctcagcctcccaagtagctgaaactacaggcgcatgccaccatgcccagctaatttttgtatttttagtagagacagggtttcactatgttggccaggctggtctcaaactcccgacctcaagtgatccgcccgcttcggcctcccaaagtgctgggattacaggtgtgagccactgcgcctggctgctgatttatttttcatagacacgggggtctatgttgcccaggttggtcttgaactcctagcctcaagcgatcctcctgcctcagcctcccaatgtgctgggattacaggaatgagccaccatgcccagcccaagaagtagagtttcttttatactgactttggcctaaaaaaacagattttcatggaggaaaaaaaaacctagatttttagtaagactattttatatacttttttacattgatcaagtacattatttttaccaaacaacattgtttcccactacatccatggttatgtataaaaaaacgccattgtcaattaagatgttaaaaaattatttccataagagtattaaattctaatctatgattcacttaacttcctactttataaacactaggtaaagtaatctcacaagctgccaaagaacacatcccaagcagtaatcacagacgatgaagcaccttacaggacccctccaccctcaaacgcgcatgtccagagaagtattaatgccttaatagactactgaaggttaactatttacatcattctaaaaatattttaagctgtattacagtgctataaattctccttttaaggaaaaaagtaatagattgtttccttaccgtgtttgaaaggaaaaaaaataaatccatagtaactaatggtctgccgattttttccctgaatttttaaactccaacaaagcattattttgcaaaaagtcctttagcccaaagtcagtgtctctgttttgatctctttgtaaaagaactctctgttcatccattctctttccctgggaccgtaaaataaggctgaaaaagtcttcatctggtactgtcggaccctttgtggtagcaggtggtggagcacatctttgatcatctaatctggatccctagaagtttatgagagagattaaaagacatactgtgggaaagaaagcaccaagctatgttaaatctctcagtcacaacaagaaaacgcagttgtaaacttttatttggggcttctcagaaattaatctttgtttttatattgttctctttagttcccagcctgatttctgaaagaaataatctttaaacctg

SEQ ID NO: 377709 - DNA, 2964 bp, Homo sapiens
aaaacaattcttaataaagtttgggataatatacagaccttgatcacaaacttcaaaatctcttgaggtgatacaactaaaagtcctgtgtagggaatcctacctacacgggccacttttttccttcatgtttttatccttcaaaaattttctgaaagacagcttactgttttgaattgtgaatgtaaatttaattttttaaagatgaagtgggttgataaaacagttactataatcagagtaacttgtggctagtagtcttttaataaagacaaaataaatgcaacatgttcttcccatgaagcccatgatgcaaaataatagctaacagcatatgcaaagttagtttccaatactgtatttttcagggcctttcctctaaatcaacagattgtttgtcaccaggactatttattatttcacttaatagattaacagtgaattcacagacatcaagtggggatatcaaagctttagccaaaagggtaaaaaccaatagtgttttggtcatctagaacattaaaaagaaaaaagagccatccttcaaacacaaacaaatgaaacagaaaataggtttataagaggtggaagagtcagaaaaattacatacacacattaacaacatagaacatggattacctttggaaagaatcatactgaaatgtttgcttttaataaattgaagatttttcatgtttacagatgtttgggtatgttcaataggagcttccaaaaatgtcaaactaattcagtcttgtgcaaataaaacctaaaaatagttttcagcagattttacagtgatattcttaggtatgagaagaatgcacacactctaaaaacaatgaaacagacaaaagtttgacaaatgattgcaccataaaacagtgttttatatacagtttacaagatacgatttcctgctataaattaatactgtactatatagtacttattatagtgaccttttttaaaagcaactgcggacagttgtctatcttttcacttataggatttatagaaatctatatgaatgaatccatttcaatgtctggtctgcaagagtacgaagacttgacttcacatactacttgatgggatggtttaatcctgggttagagtgctgactggctagagggagttttcccccatcagccctgtatgcactggacctccaagacaacaatgaaattaaagacaatttaatggtttgggtaatagatacaaataaaaccttaaattttgtaatcttaaatgcaataccaccataagtgaaagaagtaaacagtggggaaattcttagcagctgagaaactttctctccccatgctcatgatccagttaaaaatattttgagaaactatttacaatacaattcatcttttggaagagaaaagctcttggtcatgtcataagttaatttgaaccatactttgctaacactttatctcagtggtatataacggtgacaaccaaagctttccttcaaagtgatccatttgactgaggaccaatcaaatcagaatagcaactgcaatcccaaatgtccatagaacatgtccagtggtattcttagacttgactagacatcatcatacttggggagaaacagtctccctcaggatctcccaaaggtttcttttactctgggaaggaaaagtatgacattctcccagaacacttaagaaatgcaccacagtggtggtccatctctctccccaattcctgagtgagctcaaacactggggttttctttcacaataaaatactgctgaattaacagtaagatagaagactgtcaaacaagccagtgtgaaacacatcaagcacctccatttcatagtgtgaatatctgaggaggtagctcccatctttgaagtaatcattctagaactgataatctagccttaaaaacagtgcgttcatttctgcttgtgtgaagcatgggccacatgggactctactgacagggagtcatttgggtcatcagttcactataaatgacagggacatttgggtcaccagttcactataaagaggagaaacttagctccactgccatgaaacaccctgtcccacatttcaaacaggagattatctatagtgttcaccaggaaaaacaagcattgatgcgaaggcatggagatgtggagaagagaaatactgtattttaaaactgtgagttcaagggttagctgcaatgcttcttttagggaagaacttaaagctgtgggtttagtacagccctttaaagtaaatgcaaaaatattagcttttagcaaacaaaggcatataacatataaagaaaatattgtattgctcaggttttggtaaagatgtattaataatgcttacagataaaaataatgaaattagtgttgtaaatagccaaaatagccagatatttactagcgaactttgtatttatgtaaagtgtgcctgaacatataaaatgcattattaatgtaacagactgagccagtagaaaaagaatctctgtacaacagacaacagttgccaataatttaaatagtgtcagattccccaaattataaggtttgacatgatcttaccttctactatcatatacaaataaattaaccctacaaataatttttagcttaacttaaaatcgcacctagaaaggtatgggattatctgtacctattacaaaaacctgttaaaatcaagggctgctacaaagaatgaggtaaactgaagactctctccactatgcagccttcagataaatggcttttttttctattgggttctaggtttgcacaccacagtgttttgctagcaaagcattcagaattctcttccaggaactgtttgcatgtgtgtgtatataaatttacacacacatacacacacacacacacacacatatatacacactgtatactgcatcagcaaaatatatatattatatatatttatataatataaggaagatttccccca

SEQ ID NO: 377710 - DNA, 2131 bp, Homo sapiens
ccagcagtaccaaacttttccttacaacttagcaactctattccagcaaagtcccaggctagtcacatgccatgctaatttctgaatctgtcaccatgactctgtccaagtctggcttctgtcgagctctgaagccagaacgtgaaattggccccatgaaaccacatggcccgaaggatttatagaaatctatatgaatgaatccatttcaatgtctggtctgcaagagtacgaagacttgacttcacatactacttgatgggatggtttaatcctgggttagagtgctgactggctagagggagttttcccccatcagccctgtatgcactggacctccaagacaacaatgaaattaaagacaatttaatggtttgggtaatagatacaaataaaaccttaaattttgtaatcttaaatgcaataccaccataagtgaaagaagtaaacagtggggaaattcttagcagctgagaaactttctctccccatgctcatgatccagttaaaaatattttgagaaactatttacaatacaattcatcttttggaagagaaaagctcttggtcatgtcataagttaatttgaaccatactttgctaacactttatctcagtggtatataacggtgacaaccaaagctttccttcaaagtgatccatttgactgaggaccaatcaaatcagaatagcaactgcaatcccaaatgtccatagaacatgtccagtggtattcttagacttgactagacatcatcatacttggggagaaacagtctccctcaggatctcccaaaggtttcttttactctgggaaggaaaagtatgacattctcccagaacacttaagaaatgcaccacagtggtggtccatctctctccccaattcctgagtgagctcaaacactggggttttctttcacaataaaatactgctgaattaacagtaagatagaagactgtcaaacaagccagtgtgaaacacatcaagcacctccatttcatagtgtgaatatctgaggaggtagctcccatctttgaagtaatcattctagaactgataatctagccttaaaaacagtgcgttcatttctgcttgtgtgaagcatgggccacatgggactctactgacagggagtcatttgggtcatcagttcactataaatgacagggacatttgggtcaccagttcactataaagaggagaaacttagctccactgccatgaaacaccctgtcccacatttcaaacaggagattatctatagtgttcaccaggaaaaacaagcattgatgcgaaggcatggagatgtggagaagagaaatactgtattttaaaactgtgagttcaagggttagctgcaatgcttcttttagggaagaacttaaagctgtgggtttagtacagccctttaaagtaaatgcaaaaatattagcttttagcaaacaaaggcatataacatataaagaaaatattgtattgctcaggttttggtaaagatgtattaataatgcttacagataaaaataatgaaattagtgttgtaaatagccaaaatagccagatatttactagcgaactttgtatttatgtaaagtgtgcctgaacatataaaatgcattattaatgtaacagactgagccagtagaaaaagaatctctgtacaacagacaacagttgccaataatttaaatagtgtcagattccccaaattataaggtttgacatgatcttaccttctactatcatatacaaataaattaaccctacaaataatttttagcttaacttaaaatcgcacctagaaaggtatgggattatctgtacctattacaaaaacctgttaaaatcaagggctgctacaaagaatgaggtaaactgaagactctctccactatgcagccttcagataaatggcttttttttctattgggttctaggtttgcacaccacagtgttttgctagcaaagcattcagaattctcttccaggaactgtttgcatgtgtgtgtatataaatttacacacacatacacacacacacacacacacatatatacacactgtatactgcatcagcaaaatatatatattatatatatttatataatataaggaagatttccccca

SEQ ID NO: 377711 - DNA, 1023 bp, Homo sapiens
ccagcagtaccaaacttttccttacaacttagcaactctattccagcaaagtcccaggctagtcacatgccatgctaatttctgaatctgtcaccatgactctgtccaagtctggcttctgtcgagctctgaagccagaacgtgaaattggccccatgaaaccacatggcccgaaggaccaagtctttgcaaaacctatcaaatggatggatggcttcaagacagcagagaacccacaagcttgaagaggcctccggagagttcactcaggataaacggggtgctggcatcgtcctggtcctctctgtacagtaacagtgttacagccctgtgagttcagtagtaaaggatctggagtccatggggaaattctaaggagatcaatggaactgatatattatatagccaaatacttattaataaagtaaccatccttataaaggctgatttaggcaagcctctgccttcaggaggaagttcactgaaacaaacctggcagattgatgactctgtctttcaaatctccaggaaatatggtttcataatttttctttatcacctagccccaactttaattttcataattcagtgtgtaaagcactgtgccaggtttctagtgagtacacaatgaggaagccatactctttgcattcaagagtttatatagttatacaaaagcacttactaatgacaatatcagcaactaacatttgaatgcttactatgtgcttggaactttatctcctttaaaccaacaatagccccattaagtgggtaatattattagtcccattctacagatgaaaaaaccaaggctcacgtaagttacatgatttactaagggtcacacaactggaatggtggaattgagatttaatccaggcagtctatgcctgtttagcaagttctgttacagaagcataagaaaaagagacacaaagcacaaaagattagatatatttcaaatatgggaggactttaaaactgagaggaggtggtacagacacaaccggggcagggagc

SEQ ID NO: 377712 - DNA, 2910 bp, Homo sapiens
aaaacaattcttaataaagtttgggataatatacagaccttgatcacaaacttcaaaatctcttgaggtgatacaactaaaagtcctgtgtagggaatcctacctacacgggccacttttttccttcatgtttttatccttcaaaaattttctgaaagacagcttactgttttgaattgtgaatgtaaatttaattttttaaagatgaagtgggttgataaaacagttactataatcagagtaacttgtggctagtagtcttttaataaagacaaaataaatgcaacatgttcttcccatgaagcccatgatgcaaaataatagctaacagcatatgcaaagttagtttccaatactgtatttttcagggcctttcctctaaatcaacagattgtttgtcaccaggactatttattatttcacttaatagattaacagtgaattcacagacatcaagtggggatatcaaagctttagccaaaagggtaaaaaccaatagtgttttggtcatctagaacattaaaaagaaaaaagagccatccttcaaacacaaacaaatgaaacagaaaataggtttataagaggtggaagagtcagaaaaattacatacacacattaacaacatagaacatggattacctttggaaagaatcatactgaaatgtttgcttttaataaattgaagatttttcatgtttacagatgtttgggtatgttcaataggagcttccaaaaatgtcaaactaattcagtcttgtgcaaataaaacctaaaaatagttttcagcagattttacagtgatattcttaggtatgagaagaatgcacacactctaaaaacaatgaaacagacaaaagtttgacaaatgattgcaccataaaacagtgttttatatacagtttacaagatacgatttcctgctataaattaatactgtactatatagtacttattatagtgaccttttttaaaagcaactgcggacagttgtctatcttttcacttataggatttatagaaatctatatgaatgaatccatttcaatgtctggtctgcaagagtacgaagacttgacttcacatactatcccccatcagccctgtatgcactggacctccaagacaacaatgaaattaaagacaatttaatggtttgggtaatagatacaaataaaaccttaaattttgtaatcttaaatgcaataccaccataagtgaaagaagtaaacagtggggaaattcttagcagctgagaaactttctctccccatgctcatgatccagttaaaaatattttgagaaactatttacaatacaattcatcttttggaagagaaaagctcttggtcatgtcataagttaatttgaaccatactttgctaacactttatctcagtggtatataacggtgacaaccaaagctttccttcaaagtgatccatttgactgaggaccaatcaaatcagaatagcaactgcaatcccaaatgtccatagaacatgtccagtggtattcttagacttgactagacatcatcatacttggggagaaacagtctccctcaggatctcccaaaggtttcttttactctgggaaggaaaagtatgacattctcccagaacacttaagaaatgcaccacagtggtggtccatctctctccccaattcctgagtgagctcaaacactggggttttctttcacaataaaatactgctgaattaacagtaagatagaagactgtcaaacaagccagtgtgaaacacatcaagcacctccatttcatagtgtgaatatctgaggaggtagctcccatctttgaagtaatcattctagaactgataatctagccttaaaaacagtgcgttcatttctgcttgtgtgaagcatgggccacatgggactctactgacagggagtcatttgggtcatcagttcactataaatgacagggacatttgggtcaccagttcactataaagaggagaaacttagctccactgccatgaaacaccctgtcccacatttcaaacaggagattatctatagtgttcaccaggaaaaacaagcattgatgcgaaggcatggagatgtggagaagagaaatactgtattttaaaactgtgagttcaagggttagctgcaatgcttcttttagggaagaacttaaagctgtgggtttagtacagccctttaaagtaaatgcaaaaatattagcttttagcaaacaaaggcatataacatataaagaaaatattgtattgctcaggttttggtaaagatgtattaataatgcttacagataaaaataatgaaattagtgttgtaaatagccaaaatagccagatatttactagcgaactttgtatttatgtaaagtgtgcctgaacatataaaatgcattattaatgtaacagactgagccagtagaaaaagaatctctgtacaacagacaacagttgccaataatttaaatagtgtcagattccccaaattataaggtttgacatgatcttaccttctactatcatatacaaataaattaaccctacaaataatttttagcttaacttaaaatcgcacctagaaaggtatgggattatctgtacctattacaaaaacctgttaaaatcaagggctgctacaaagaatgaggtaaactgaagactctctccactatgcagccttcagataaatggcttttttttctattgggttctaggtttgcacaccacagtgttttgctagcaaagcattcagaattctcttccaggaactgtttgcatgtgtgtgtatataaatttacacacacatacacacacacacacacacacatatatacacactgtatactgcatcagcaaaatatatatattatatatatttatataatataaggaagatttccccca

SEQ ID NO: 377713 - DNA, 2950 bp, Homo sapiens
aaaacaattcttaataaagtttgggataatatacagaccttgatcacaaacttcaaaatctcttgaggtgatacaactaaaagtcctgtgtagggaatcctacctacacgggccacttttttccttcatgtttttatccttcaaaaattttctgaaagacagcttactgttttgaattgtgaatgtaaatttaattttttaaagatgaagtgggttgataaaacagttactataatcagagtaacttgtggctagtagtcttttaataaagacaaaataaatgcaacatgttcttcccatgaagcccatgatgcaaaataatagctaacagcatatgcaaagttagtttccaatactgtatttttcagggcctttcctctaaatcaacagattgtttgtcaccaggactatttattatttcacttaatagattaacagtgaattcacagacatcaagtggggatatcaaagctttagccaaaagggtaaaaaccaatagtgttttggtcatctagaacattaaaaagaaaaaagagccatccttcaaacacaaacaaatgaaacagaaaataggtttataagaggtggaagagtcagaaaaattacatacacacattaacaacatagaacatggattacctttggaaagaatcatactgaaatgtttgcttttaataaattgaagatttttcatgtttacagatgtttgggtatgttcaataggagcttccaaaaatgtcaaactaattcagtcttgtgcaaataaaacctaaaaatagttttcagcagattttacagtgatattcttaggtatgagaagaatgcacacactctaaaaacaatgaaacagacaaaagtttgacaaatgattgcaccataaaacagtgttttatatacagtttacaagatacgatttcctgctataaattaatactttattatagtgaccttttttaaaagcaactgcggacagttgtctatcttttcacttataggatttatagaaatctatatgaatgaatccatttcaatgtctggtctgcaagagtacgaagacttgacttcacatactacttgatgggatggtttaatcctgggttagagtgctgactggctagagggagttttcccccatcagccctgtatgcactggacctccaagacaacaatgaaattaaagacaatttaatggtttgggtaatagatacaaataaaaccttaaattttgtaatcttaaatgcaataccaccataagtgaaagaagtaaacagtggggaaattcttagcagctgagaaactttctctccccatgctcatgatccagttaaaaatattttgagaaactatttacaatacaattcatcttttggaagagaaaagctcttggtcatgtcataagttaatttgaaccatactttgctaacactttatctcagtggtatataacggtgacaaccaaagctttccttcaaagtgatccatttgactgaggaccaatcaaatcagaatagcaactgcaatcccaaatgtccatagaacatgtccagtggtattcttagacttgactagacatcatcatacttggggagaaacagtctccctcaggatctcccaaaggtttcttttactctgggaaggaaaagtatgacattctcccagaacacttaagaaatgcaccacagtggtggtccatctctctccccaattcctgagtgagctcaaacactggggttttctttcacaataaaatactgctgaattaacagtaagatagaagactgtcaaacaagccagtgtgaaacacatcaagcacctccatttcatagtgtgaatatctgaggaggtagctcccatctttgaagtaatcattctagaactgataatctagccttaaaaacagtgcgttcatttctgcttgtgtgaagcatgggccacatgggactctactgacagggagtcatttgggtcatcagttcactataaatgacagggacatttgggtcaccagttcactataaagaggagaaacttagctccactgccatgaaacaccctgtcccacatttcaaacaggagattatctatagtgttcaccaggaaaaacaagcattgatgcgaaggcatggagatgtggagaagagaaatactgtattttaaaactgtgagttcaagggttagctgcaatgcttcttttagggaagaacttaaagctgtgggtttagtacagccctttaaagtaaatgcaaaaatattagcttttagcaaacaaaggcatataacatataaagaaaatattgtattgctcaggttttggtaaagatgtattaataatgcttacagataaaaataatgaaattagtgttgtaaatagccaaaatagccagatatttactagcgaactttgtatttatgtaaagtgtgcctgaacatataaaatgcattattaatgtaacagactgagccagtagaaaaagaatctctgtacaacagacaacagttgccaataatttaaatagtgtcagattccccaaattataaggtttgacatgatcttaccttctactatcatatacaaataaattaaccctacaaataatttttagcttaacttaaaatcgcacctagaaaggtatgggattatctgtacctattacaaaaacctgttaaaatcaagggctgctacaaagaatgaggtaaactgaagactctctccactatgcagccttcagataaatggcttttttttctattgggttctaggtttgcacaccacagtgttttgctagcaaagcattcagaattctcttccaggaactgtttgcatgtgtgtgtatataaatttacacacacatacacacacacacacacacacatatatacacactgtatactgcatcagcaaaatatatatattatatatatttatataatataaggaagatttccccca

SEQ ID NO: 377714 - DNA, 733 bp, Homo sapiens
ccagcagtaccaaacttttccttacaacttagcaactctattccagcaaagtcccaggctagtcacatgccatgctaatttctgaatctgtcaccatgactctgtccaagtctggcttctgtcgagctctgaagccagaacgtgaaattggccccatgaaaccacatggcccgaaggaccaagtctttgcaaaacctatcaaatggatggatggcttcaagacagcagagaacccacaagcttgaagaggcctccggagagttcactcaggataaacggggtgctggcatcgtcctggtcctctctgtacagtaacagtgttacagcccttatcttggcagaattgatttggatggatcagagtgaatggagaccagttgaaggaagactggttcaatggctagagaatatgaatgttggtcttaagtccaaggcccacatgtcaaagacgagtgctctgctgatatctagttgagtgactttggaaaagtctgaggcctcgatttcctcacctggaaagtgaaaacactggacatgctctttgacatttcatccagcactgaaattttatagtcttgtgaaaaatctcttcttgaaatgttatcttgggtggtcttagattgtgtgtgactggaactggggctgatttgtaaaacccttgaatgtgcttgaaaataccaacccacagtgttttcttctcctgggaaaagaaccaaaactcttaaaaaatata

SEQ ID NO: 377715 - DNA, 758 bp, Homo sapiens
gccttagacaatattaaatatttaaacaacatgagaaagagtgccagaggtcagaacatagtatttagttcactgagttgccctgacagataatgaatggggattgatttaatagtgaccaaatacactggccatatttactaaagtgctgtaaaatggccaagtgaggacaactgcatctaaaatgagatcaaatcctcgagtccattccttttagcagaaatgattaaaaccatcttggcaggaccaagtctttgcaaaacctatcaaatggatggatggcttcaagacagcagagaacccacaagcttgaagaggcctccggagagttcactcaggataaacggggtgctggcatcgtcctggtcctctctgtacagtaacagtgttacagccctgtgagttcagtagtaaaggatctggagtccatggggaaattctaaggagatcaatggaactgatatattatatagccaaatacttattaataaagtaaccatccttataaaggctgatttaggcaagcctctgccttcaggaggaagttcactgaaacaaacctggcagattgatgactctgtctttcaaatctccaggaaatatggtttcataatttttctttatcacctagccccaactttaattttcataattcagtgtgtaaagcactgtgccaggtttctagtgagtacacaatgaggaagccatactctttgcattcaagagtttatatagttatacaaaagcacttactaatg

SEQ ID NO: 377716 - DNA, 196 bp, Homo sapiens
tcagtttccccaacgctcaccaggtatctgctgtgtgttggggaaactgaaaaacaagcagatacctggtgagctcagatagtctctttctctgacactgtgtaagaagctgtgaatattcctaacttacccagatgttgcttttgaaaagttgaaatgtgtaattgttttggaataaagagggtaacaataggaa

SEQ ID NO: 377717 - DNA, 2515 bp, Homo sapiens
aaccgcgtcccggtagctcccggaataggagcgttgcgagacggtcggttccaagtgggcctgggcgcgggggagaggcgggtctgtcctcgggaactgcaaggccctgtgagcgggaggactgggatcccggccgcggctgctggaagcgtcgaagctcagcggggccgcggacactgacctgtgcttagaactcatcctggcccgcagagcctgccgcgagtccctggcgtcccctgtggcgggctcttggagccactttcccgagcggaagtcagcccgcggctcggactccggcgggacctgctcggaggaatggcgccgccgggttcaagcactgtcttcctgttggccctgacaatcatagccagcacctgggctctgacgcccactcactacctcaccaagcatgacgtggagagactaaaagcctcgctggatcgccctttcacaaatttggaatctgccttctactccatcgtgggactcagcagccttggtgctcaggtgccagatgcaaagaaagcatgtacctacatcagatctaaccttgatcccagcaatgtggattccctcttctacgctgcccaggccagccaggccctctcaggatgtgagatctctatttcaaatgagaccaaagatctgcttctggcagctgtcagtgaggactcatctgttacccagatctaccatgcagttgcagctctaagtggctttggccttcccttggcatcccaagaagcactcagtgcccttactgctcgtctcagcaaggaggagactgtgctggcaacagtccaggctctgcagacagcatcccacctgtcccagcaggctgacctgaggagcatcgtggaggagattgaggaccttgttgctcgcctggatgaactcgggggcgtgtatctccagtttgaagaaggactggaaacaacagcgttatttgtggctgccacctacaagctcatggatcatgtggggactgagccatccattaaggaggatcaggtcatccagctgatgaacgcgatcttcagcaagaagaactttgagtccctctccgaagccttcagcgtggcctctgcagctgctgtgctctcgcataatcgctaccacgtgccagttgtggttgtgcctgagggctctgcttccgacactcatgaacaggctatcttgcggttgcaagtcaccaatgttctgtctcagcctctgactcaggccactgttaaactagaacatgctaaatctgttgcttccagagccactgtcctccagaagacatccttcacccctgtaggggatgtttttgaactaaatttcatgaacgtcaaattttccagtggttattatgacttccttgtcgaagttgaaggtgacaaccggtatattgcaaataccgtagagctcagagtcaagatctccactgaagttggcatcacaaatgttgatctttccaccgtggataaggatcagagcattgcacccaaaactacccgggtgacatacccagccaaagccaagggcacattcatcgcagacagccaccagaacttcgccttgttcttccagctggtagatgtgaacactggtgctgaactcactcctcaccagacatttgtccgactccataaccagaagactggccaggaagtggtgtttgttgccgagccagacaacaagaacgtgtacaagtttgaactggatacctctgaaagaaagattgaatttgactctgcctctggcacctacactctctacttaatcattggagatgccactttgaagaacccaatcctctggaatgtggctgatgtggtcatcaagttccctgaggaagaagctccctcgactgtcttgtcccagaaccttttcactccaaaacaggaaattcagcacctgttccgcgagcctgagaagaggccccccaccgtggtgtccaatacattcactgccctgatcctctcgccgttgcttctgctcttcgctctgtggatccggattggtgccaatgtctccaacttcacttttgctcctagcacgattatatttcacctgggacatgctgctatgctgggactcatgtatgtctactggactcagctcaacatgttccagaccttgaagtacctggccatcttgggcagtgtgacgtttctggctggcaatcggatgctggcccagcaggcagtcaagagaacagcacattagttccagaagaaagatggaaattctgaaaactgaatgtcaagaaaaggagtcaagaacaattcacagtatgagaagaaaaatggaaaaaaaaaactttatttaaaaaagaaaaaagtccagattgtagttatacttttgcttgtttttcagtttccccaacacacagcagatacctggtgagctcagatagtctctttctctgacactgtgtaagaagctgtgaatattcctaacttacccagatgttgcttttgaaaagttgaaatgtgtaattgttttggaataaagagggtaacaataggaa

SEQ ID NO: 377718 - DNA, 2483 bp, Homo sapiens
ccaactaaggctagtacgaggcgggtgttaatcggccgagggagagcgggtctgtcctcgggaactgcaaggccctgtgagcgggaggactgggatcccggccgcggctgctggaagcgtcgaagctcagcggggccgcggacactgacctgtgcttagaactcatcctggcccgcagagcctgccgcgagtccctggcgtcccctgtggcgggctcttggagccactttcccgagcggaagtcagcccgcggctcggactccggcgggacctgctcggaggaatggcgccgccgggttcaagcactgtcttcctgttggccctgacaatcatagccagcacctgggctctgacgcccactcactacctcaccaagcatgacgtggagagactaaaagcctcgctggatcgccctttcacaaatttggaatctgccttctactccatcgtgggactcagcagccttggtgctcaggtgccagatgcaaagaaagcatgtacctacatcagatctaaccttgatcccagcaatgtggattccctcttctacgctgcccaggccagccaggccctctcaggatgtgagatctctatttcaaatgagaccaaagatctgcttctggcagctgtcagtgaggactcatctgttacccagatctaccatgcagttgcagctctaagtggctttggccttcccttggcatcccaagaagcactcagtgcccttactgctcgtctcagcaaggaggagactgtgctggcaacagtccaggctctgcagacagcatcccacctgtcccagcaggctgacctgaggagcatcgtggaggagattgaggaccttgttgctcgcctggatgaactcgggggcgtgtatctccagtttgaagaaggactggaaacaacagcgttatttgtggctgccacctacaagctcatggatcatgtggggactgagccatccattaaggaggatcaggtcatccagctgatgaacgcgatcttcagcaagaagaactttgagtccctctccgaagccttcagcgtggcctctgcagctgctgtgctctcgcataatcgctaccacgtgccagttgtggttgtgcctgagggctctgcttccgacactcatgaacaggctatcttgcggttgcaagtcaccaatgttctgtctcagcctctgactcaggccactgttaaactagaacatgctaaatctgttgcttccagagccactgtcctccagaagacatccttcacccctgtaggggatgtttttgaactaaatttcatgaacgtcaaattttccagtggttattatgacttccttgtcgaagttgaaggtgacaaccggtatattgcaaataccgtagagctcagagtcaagatctccactgaagttggcatcacaaatgttgatctttccaccgtggataaggatcagagcattgcacccaaaactacccgggtgacatacccagccaaagccaagggcacattcatcgcagacagccaccagaacttcgccttgttcttccagctggtagatgtgaacactggtgctgaactcactcctcaccagacatttgtccgactccataaccagaagactggccaggaagtggtgtttgttgccgagccagacaacaagaacgtgtacaagtttgaactggatacctctgaaagaaagattgaatttgactctgcctctggcacctacactctctacttaatcattggagatgccactttgaagaacccaatcctctggaatgtggctgatgtggtcatcaagttccctgaggaagaagctccctcgactgtcttgtcccagaaccttttcactccaaaacaggaaattcagcacctgttccgcgagcctgagaagaggccccccaccgtggtgtccaatacattcactgccctgatcctctcgccgttgcttctgctcttcgctctgtggatccggattggtgccaatgtctccaacttcacttttgctcctagcacgattatatttcacctgggacatgctgctatgctgggactcatgtatgtctactggactcagctcaacatgttccagaccttgaagtacctggccatcttgggcagtgtgacgtttctggctggcaatcggatgctggcccagcaggcagtcaagagaacagcacattagttccagaagaaagatggaaattctgaaaactgaatgtcaagaaaaggagtcaagaacaattcacagtatgagaagaaaaatggaaaaaaaaaactttatttaaaaaagaaaaaagtccagattgtagttatacttttgcttgtttttcagtttccccaacacacagcagatacctggtgagctcagatagtctctttctctgacactgtgtaagaagctgtgaatattcctaacttacccagatgttgcttttgaaaagttgaaatgtgtaattgttttggaataaagagggtaacaataggaa

SEQ ID NO: 377719 - DNA, 2742 bp, Homo sapiens
ccaactaaggctagtacgaggcgggtgttaatcggccgagggagagcgggtctgtcctcgggaactgcaaggccctgtgagcgggaggactgggatcccggccgcggctgctggaagcgtcgaagctcagcggggccgcggacactgacctgtgcttagaactcatcctggcccgcagagcctgccgcgagtccctggcgtcccctgtggcgggctcttggagccactttcccgagcggaagtcagcccgcggctcggactccggcgggacctgctcggaggaatggcgccgccgggttcaagcactgtcttcctgttggccctgacaatcatagccagcacctgggctctgacgcccactcactacctcaccaagcatgacgtggagagactaaaagcctcgctggatcgccctttcacaaatttggaatctgccttctactccatcgtgggactcagcagccttggtgctcaggtgccagatgcaaagaaagcatgtacctacatcagatctaaccttgatcccagcaatgtggattccctcttctacgctgcccaggccagccaggccctctcaggatgtgagatctctatttcaaatgagaccaaagatctgcttctggcagctgtcagtgaggactcatctgttacccagatctaccatgcagttgcagctctaagtggctttggccttcccttggcatcccaagaagcactcagtgcccttactgctcgtctcagcaaggaggagactgtgctggcaacagtccaggctctgcagacagcatcccacctgtcccagcaggctgacctgaggagcatcgtggaggagattgaggaccttgttgctcgcctggatgaactcgggggcgtgtatctccagtttgaagaaggactggaaacaacagcgttatttgtggctgccacctacaagctcatggatcatgtggggactgagccatccattaaggaggatcaggtcatccagctgatgaacgcgatcttcagcaagaagaactttgagtccctctccgaagccttcagcgtggcctctgcagctgctgtgctctcgcataatcgctaccacgtgccagttgtggttgtgcctgagggctctgcttccgacactcatgaacaggctatcttgcggttgcaagtcaccaatgttctgtctcagcctctgactcaggccactgttaaactagaacatgctaaatctgttgcttccagagccactgtcctccagaagacatccttcacccctgtaggggatgtttttgaactaaatttcatgaacgtcaaattttccagtggttattatgacttccttgtcgaagttgaaggtgacaaccggtatattgcaaataccgtagagctcagagtcaagatctccactgaagttggcatcacaaatgttgatctttccaccgtggataaggatcagagcattgcacccaaaactacccgggtgacatacccagccaaagccaagggcacattcatcgcagacagccaccagaacttcgccttgttcttccagctggtagatgtgaacactggtgctgaactcactcctcaccagacatttgtccgactccataaccagaagactggccaggaagtggtgtttgttgccgagccagacaacaagaacgtgtacaagtttgaactggatacctctgaaagaaagattgaatttgactctgcctctggcacctacactctctacttaatcattggagatgccactttgaagaacccaatcctctggaatgtggctgatgtggtcatcaagttccctgaggaagaagctccctcgactgtcttgtcccagaaccttttcactccaaaacaggaaattcagcacctgttccgcgagcctgagaagaggccccccaccgtggtgtccaatacattcactgccctgatcctctcgccgttgcttctgctcttcgctctgtggatccggattggtgccaatgtctccaacttcacttttgctcctagcacgattatatttcacctgggacatgctgctatgctgggactcatgtatgtctactggactcagctcaacatgttccagaccttgaagtacctggccatcttgggcagtgtgacgtttctggctggcaatcggatgctggcccagcaggcagtcaagagaacagcacattagttccagaagaaagatggaaattctgaaaactgaatgtcaagaaaaggagtcaagaacaattcacagtatgagaagaaaaatggaaaaaaaaaactttatttaaaaaagaaaaaagtccagattgtagttatacttttgcttgtttttcagtttccccaacacacagcagatacctggtgagctcagatagtctctttctctgacactgtgtaagaagctgtgaatattcctaacttacccagatgttgcttttgaaaagttgaaatgtgtaattgttttggaataaagagggtaacaataggaaaacaccacacaacaaacagaccaccacgccgacacacaccctcccagaaaaacggggcgccgcacaaaaacacccgagggcgcaagacggacccccccgctgagctagacggccccaagggagccgcacgcacagagcccgaaacaacggagcggcgtaaatcaggcacaggaacacaacagaggcgatgaacaccagaaaaccaggcataactgcttggtaacaacccgcaaccccgatagtatcagcgaccggcata

SEQ ID NO: 377720 - DNA, 2827 bp, Homo sapiens
ccaactaaggctagtacgaggcgggtgttaatcggccgagggagagcgggtctgtcctcgggaactgcaaggccctgtgagcgggaggactgggatcccggccgcggctgctggaagcgtcgaagctcagcggggccgcggacactgacctgtgcttagaactcatcctggcccgcagagcctgccgcgagtccctggcgtcccctgtggcgggctcttggagccactttcccgagcggaagtcagcccgcggctcggactccggcgggacctgctcggaggaatggcgccgccgggttcaagcactgtcttcctgttggccctgacaatcatagccagcacctgggctctgacgcccactcactacctcaccaagcatgacgtggagagactaaaagcctcgctggatcgccctttcacaaatttggaatctgccttctactccatcgtgggactcagcagccttggtgctcaggtgccagatgcaaagaaagcatgtacctacatcagatctaaccttgatcccagcaatgtggattccctcttctacgctgcccaggccagccaggccctctcaggatgtgagatctctatttcaaatgagaccaaagatctgcttctggcagctgtcagtgaggactcatctgttacccagatctaccatgcagttgcagctctaagtggctttggccttcccttggcatcccaagaagcactcagtgcccttactgctcgtctcagcaaggaggagactgtgctggcaacagtccaggctctgcagacagcatcccacctgtcccagcaggctgacctgaggagcatcgtggaggagattgaggaccttgttgctcgcctggatgaactcgggggcgtgtatctccagtttgaagaaggactggaaacaacagcgttatttgtggctgccacctacaagctcatggatcatgtggggactgagccatccattaaggaggatcaggtcatccagctgatgaacgcgatcttcagcaagaagaactttgagtccctctccgaagccttcagcgtggcctctgcagctgctgtgctctcgcataatcgctaccacgtgccagttgtggttgtgcctgagggctctgcttccgacactcatgaacaggctatcttgcggttgcaagtcaccaatgttctgtctcagcctctgactcaggccactgttaaactagaacatgctaaatctgttgcttccagagccactgtcctccagaagacatccttcacccctgtaggggatgtttttgaactaaatttcatgaacgtcaaattttccagtggttattatgacttccttgtcgaagttgaaggtgacaaccggtatattgcaaataccgtagagctcagagtcaagatctccactgaagttggcatcacaaatgttgatctttccaccgtggataaggatcagagcattgcacccaaaactacccgggtgacatacccagccaaagccaagggcacattcatcgcagacagccaccagaacttcgccttgttcttccagctggtagatgtgaacactggtgctgaactcactcctcaccagacatttgtccgactccataaccagaagactggccaggaagtggtgtttgttgccgagccagacaacaagaacgtgtacaagtttgaactggatacctctgaaagaaagattgaatttgactctgcctctggcacctacactctctacttaatcattggagatgccactttgaagaacccaatcctctggaatgtggctgatgtggtcatcaagttccctgaggaagaagctccctcgactgtcttgtcccagaaccttttcactccaaaacaggaaattcagcacctgttccgcgagcctgagaagaggccccccaccgtggtgtccaatacattcactgccctgatcctctcgccgttgcttctgctcttcgctctgtggatccggattggtgccaatgtctccaacttcacttttgctcctagcacgattatatttcacctgggacatgctgctatgctgggactcatgtatgtctactggactcagctcaacatgttccagaccttgaagtacctggccatcttgggcagtgtgacgtttctggctggcaatcggatgctggcccagcaggcagtcaagagaacagcacattagttccagaagaaagatggaaattctgaaaactgaatgtcaagaaaaggagtcaagaacaattcacagtatgagaagaaaaatggaaaaaaaaaactttatttaaaaaagaaaaaagtccagattgtagttatacttttgcttgtttttcagtttccccaacacacagcagatacctggtgagctcagatagtctctttctctgacactgtgtaagaagctgtgaatattcctaacttacccagatgttgcttttgaaaagttgaaatgtgtaattgttttggaataaagagggtaacaataggaaaaaaaaacaaaaaaaaaaaaacaaaacaacaaaaacaaaaaaaaaacaaaaaaaaaaaaaaaaaaaagaaaaacgtaggggagagcgcagcgcacggcgcgcggcgagagaagacagttgaacacacaccgcgccgtggggggcggcgccgcccgacaggagaggagcacacagcagccgcgaaaaaggcagcacgacgagggaaccacaagacgggcacaaccaacagagggcgagggtagcaacacacacaataaaaaacaccccgccggcggcgaccaaaacggagggcaaagaaacaaccaccagacgaagatcaacggagagaaaaagcgggggccccc

SEQ ID NO: 377721 - DNA, 2424 bp, Homo sapiens
ccaactaaggctagtacgaggcgggtgttaatcggccgagggagagcgggtctgtcctcgggaactgcaaggccctgtgagcgggaggactgggatcccggccgcggctgctggaagcgtcgaagctcagcggggccgcggacactgacctgtgcttagaactcatcctggcccgcagagcctgccgcgagtccctggcgtcccctgtggcgggctcttggagccactttcccgagcggaagtcagcccgcggctcggactccggcgggacctgctcggaggaatggcgccgccgggttcaagcactgtcttcctgttggccctgacaatcatagccagcacctgggctctgacgcccactcactacctcaccaagcatgacgtggagagactaaaagcctcgctggatcgccctttcacaaatttggaatctgccttctactccatcgtgggactcagcagccttggtgctcaggtgccagatgcaaagaaagcatgtacctacatcagatctaaccttgatcccagcaatgtggattccctcttctacgctgcccaggccagccaggccctctcaggatgtgagatctctatttcaaatgagaccaaagatctgcttctggcagctgtcagtgaggactcatctgttacccagatctaccatgcagttgcagctctaagtggctttggccttcccttggcatcccaagaagcactcagtgcccttactgctcgtctcagcaaggaggagactgtgctggcaacagtccaggctctgcagacagcatcccacctgtcccagcaggctgacctgaggagcatcgtggaggagattgaggaccttgttgctcgcctggatgaactcgggggcgtgtatctccagtttgaagaaggactggaaacaacagcgttatttgtggctgccacctacaagctcatggatcatgtggggactgagccatccattaaggaggatcaggtcatccagctgatgaacgcgatcttcagcaagaagaactttgagtccctctccgaagccttcagcgtggcctctgcagctgctgtgctctcgcataatcgctaccacgtgccagttgtggttgtgcctgagggctctgcttccgacactcatgaacaggctatcttgcggttgcaagtcaccaatgttctgtctcagcctctgactcaggccactgttaaactagaacatgctaaatctgttgcttccagagccactgtcctccagaagacatccttcacccctgtaggggatgtttttgaactaaatttcatgaacgtcaaattttccagtggttattatgacttccttgtcgaagttgaaggtgacaaccggtatattgcaaataccgtagagctcagagtcaagatctccactgaagttggcatcacaaatgttgatctttccaccgtggataaggatcagagcattgcacccaaaactacccgggtgacatacccagccaaagccaagggcacattcatcgcagacagccaccagaacttcgccttgttcttccagctggtagatgtgaacactggtgctgaactcactcctcaccagacatttgtccgactccataaccagaagactggccaggaagtggtgtttgttgccgagccagacaacaagaacgtgtacaagtttgaactggatacctctgaaagaaagattgaatttgactctgcctctggcacctacactctctacttaatcattggagatgccactttgaagaacccaatcctctggaatgtggctgatgtggtcatcaagttccctgaggaagaagctccctcgactgtcttgtcccagaaccttttcactccaaaacaggaaattcagcacctgttccgcgagcctgagaagaggccccccaccgtggtgtccaatacattcactgccctgatcctctcgccgttgcttctgctcttcgctctgtggatccggattggtgccaatgtctccaacttcacttttgctcctagcacgattatatttcacctgggacatgctgctatgctgggactcatgtatgtctactggactcagctcaacatgttccagaccttgaagtacctggccatcttgggcagtgtgacgtttctggctggcaatcggatgctggcccagcaggcagtcaagagaacagcacattagttccagaagaaagatggaaattctgaaaactgaatgtcaagaaaaggagtcaagaacaattcacagtatgagaagaaaaatggaaaaaaaaaactttatttaaaaaagaaaaaagggggggggctaaattcctcgggggccaagttagggtcccggttttgttcaaggggcccatagggggattaaagaggaaggggggttaaacgtgggtggaaagggtggattgtggaggacccttggggtga

SEQ ID NO: 377722 - DNA, 2430 bp, Homo sapiens
ccaactaaggctagtacgaggcgggtgttaatcggccgagggagagcgggtctgtcctcgggaactgcaaggccctgtgagcgggaggactgggatcccggccgcggctgctggaagcgtcgaagctcagcggggccgcggacactgacctgtgcttagaactcatcctggcccgcagagcctgccgcgagtccctggcgtcccctgtggcgggctcttggagccactttcccgagcggaagtcagcccgcggctcggactccggcgggacctgctcggaggaatggcgccgccgggttcaagcactgtcttcctgttggccctgacaatcatagccagcacctgggctctgacgcccactcactacctcaccaagcatgacgtggagagacatcgtgggactcagcagccttggtgctcaggtgccagatgcaaagaaagcatgtacctacatcagatctaaccttgatcccagcaatgtggattccctcttctacgctgcccaggccagccaggccctctcaggatgtgagatctctatttcaaatgagaccaaagatctgcttctggcagctgtcagtgaggactcatctgttacccagatctaccatgcagttgcagctctaagtggctttggccttcccttggcatcccaagaagcactcagtgcccttactgctcgtctcagcaaggaggagactgtgctggcaacagtccaggctctgcagacagcatcccacctgtcccagcaggctgacctgaggagcatcgtggaggagattgaggaccttgttgctcgcctggatgaactcgggggcgtgtatctccagtttgaagaaggactggaaacaacagcgttatttgtggctgccacctacaagctcatggatcatgtggggactgagccatccattaaggaggatcaggtcatccagctgatgaacgcgatcttcagcaagaagaactttgagtccctctccgaagccttcagcgtggcctctgcagctgctgtgctctcgcataatcgctaccacgtgccagttgtggttgtgcctgagggctctgcttccgacactcatgaacaggctatcttgcggttgcaagtcaccaatgttctgtctcagcctctgactcaggccactgttaaactagaacatgctaaatctgttgcttccagagccactgtcctccagaagacatccttcacccctgtaggggatgtttttgaactaaatttcatgaacgtcaaattttccagtggttattatgacttccttgtcgaagttgaaggtgacaaccggtatattgcaaataccgtagagctcagagtcaagatctccactgaagttggcatcacaaatgttgatctttccaccgtggataaggatcagagcattgcacccaaaactacccgggtgacatacccagccaaagccaagggcacattcatcgcagacagccaccagaacttcgccttgttcttccagctggtagatgtgaacactggtgctgaactcactcctcaccagacatttgtccgactccataaccagaagactggccaggaagtggtgtttgttgccgagccagacaacaagaacgtgtacaagtttgaactggatacctctgaaagaaagattgaatttgactctgcctctggcacctacactctctacttaatcattggagatgccactttgaagaacccaatcctctggaatgtggctgatgtggtcatcaagttccctgaggaagaagctccctcgactgtcttgtcccagaaccttttcactccaaaacaggaaattcagcacctgttccgcgagcctgagaagaggccccccaccgtggtgtccaatacattcactgccctgatcctctcgccgttgcttctgctcttcgctctgtggatccggattggtgccaatgtctccaacttcacttttgctcctagcacgattatatttcacctgggacatgctgctatgctgggactcatgtatgtctactggactcagctcaacatgttccagaccttgaagtacctggccatcttgggcagtgtgacgtttctggctggcaatcggatgctggcccagcaggcagtcaagagaacagcacattagttccagaagaaagatggaaattctgaaaactgaatgtcaagaaaaggagtcaagaacaattcacagtatgagaagaaaaatggaaaaaaaaaactttatttaaaaaagaaaaaagtccagattgtagttatacttttgcttgtttttcagtttccccaacacacagcagatacctggtgagctcagatagtctctttctctgacactgtgtaagaagctgtgaatattcctaacttacccagatgttgcttttgaaaagttgaaatgtgtaattgttttggaataaagagggtaacaataggaa

SEQ ID NO: 377723 - DNA, 2038 bp, Homo sapiens
ccaactaaggctagtacgaggcgggtgttaatcggccgagggagaaaagcatgtacctacatcagatctaaccttgatcccagcaatgtggattccctcttctacgctgcccaggccagccaggccctctcaggatgtgagatctctatttcaaatgagaccaaagatctgcttctggcagctgtcagtgaggactcatctgttacccagatctaccatgcagttgcagctctaagtggctttggccttcccttggcatcccaagaagcactcagtgcccttactgctcgtctcagcaaggaggagactgtgctggcaacagtccaggctctgcagacagcatcccacctgtcccagcaggctgacctgaggagcatcgtggaggagattgaggaccttgttgctcgcctggatgaactcgggggcgtgtatctccagtttgaagaaggactggaaacaacagcgttatttgtggctgccacctacaagctcatggatcatgtggggactgagccatccattaaggaggatcaggtcatccagctgatgaacgcgatcttcagcaagaagaactttgagtccctctccgaagccttcagcgtggcctctgcagctgctgtgctctcgcataatcgctaccacgtgccagttgtggttgtgcctgagggctctgcttccgacactcatgaacaggctatcttgcggttgcaagtcaccaatgttctgtctcagcctctgactcaggccactgttaaactagaacatgctaaatctgttgcttccagagccactgtcctccagaagacatccttcacccctgtaggggatgtttttgaactaaatttcatgaacgtcaaattttccagtggttattatgacttccttgtcgaagttgaaggtgacaaccggtatattgcaaataccgtagagctcagagtcaagatctccactgaagttggcatcacaaatgttgatctttccaccgtggataaggatcagagcattgcacccaaaactacccgggtgacatacccagccaaagccaagggcacattcatcgcagacagccaccagaacttcgccttgttcttccagctggtagatgtgaacactggtgctgaactcactcctcaccagacatttgtccgactccataaccagaagactggccaggaagtggtgtttgttgccgagccagacaacaagaacgtgtacaagtttgaactggatacctctgaaagaaagattgaatttgactctgcctctggcacctacactctctacttaatcattggagatgccactttgaagaacccaatcctctggaatgtggctgatgtggtcatcaagttccctgaggaagaagctccctcgactgtcttgtcccagaaccttttcactccaaaacaggaaattcagcacctgttccgcgagcctgagaagaggccccccaccgtggtgtccaatacattcactgccctgatcctctcgccgttgcttctgctcttcgctctgtggatccggattggtgccaatgtctccaacttcacttttgctcctagcacgattatatttcacctgggacatgctgctatgctgggactcatgtatgtctactggactcagctcaacatgttccagaccttgaagtacctggccatcttgggcagtgtgacgtttctggctggcaatcggatgctggcccagcaggcagtcaagagaacagcacattagttccagaagaaagatggaaattctgaaaactgaatgtcaagaaaaggagtcaagaacaattcacagtatgagaagaaaaatggaaaaaaaaaactttatttaaaaaagaaaaaagtccagattgtagttatacttttgcttgtttttcagtttccccaacacacagcagatacctggtgagctcagatagtctctttctctgacactgtgtaagaagctgtgaatattcctaacttacccagatgttgcttttgaaaagttgaaatgtgtaattgttttggaataaagagggtaacaataggaa

SEQ ID NO: 377724 - DNA, 2125 bp, Homo sapiens
gggacagtacaatggaggagctggaagatacaagccgaatggactaagccccacagtcttttactgaagtccttggcagagtctatcagaagttgaaatgtctcccttggtgctcaggtgccagatgcaaagaaagcatgtacctacatcagatctaaccttgatcccagcaatgtggattccctcttctacgctgcccaggccagccaggccctctcaggatgtgagatctctatttcaaatgagaccaaagatctgcttctggcagctgtcagtgaggactcatctgttacccagatctaccatgcagttgcagctctaagtggctttggccttcccttggcatcccaagaagcactcagtgcccttactgctcgtctcagcaaggaggagactgtgctggcaacagtccaggctctgcagacagcatcccacctgtcccagcaggctgacctgaggagcatcgtggaggagattgaggaccttgttgctcgcctggatgaactcgggggcgtgtatctccagtttgaagaaggactggaaacaacagcgttatttgtggctgccacctacaagctcatggatcatgtggggactgagccatccattaaggaggatcaggtcatccagctgatgaacgcgatcttcagcaagaagaactttgagtccctctccgaagccttcagcgtggcctctgcagctgctgtgctctcgcataatcgctaccacgtgccagttgtggttgtgcctgagggctctgcttccgacactcatgaacaggctatcttgcggttgcaagtcaccaatgttctgtctcagcctctgactcaggccactgttaaactagaacatgctaaatctgttgcttccagagccactgtcctccagaagacatccttcacccctgtaggggatgtttttgaactaaatttcatgaacgtcaaattttccagtggttattatgacttccttgtcgaagttgaaggtgacaaccggtatattgcaaataccgtagagctcagagtcaagatctccactgaagttggcatcacaaatgttgatctttccaccgtggataaggatcagagcattgcacccaaaactacccgggtgacatacccagccaaagccaagggcacattcatcgcagacagccaccagaacttcgccttgttcttccagctggtagatgtgaacactggtgctgaactcactcctcaccagacatttgtccgactccataaccagaagactggccaggaagtggtgtttgttgccgagccagacaacaagaacgtgtacaagtttgaactggatacctctgaaagaaagattgaatttgactctgcctctggcacctacactctctacttaatcattggagatgccactttgaagaacccaatcctctggaatgtggctgatgtggtcatcaagttccctgaggaagaagctccctcgactgtcttgtcccagaaccttttcactccaaaacaggaaattcagcacctgttccgcgagcctgagaagaggccccccaccgtggtgtccaatacattcactgccctgatcctctcgccgttgcttctgctcttcgctctgtggatccggattggtgccaatgtctccaacttcacttttgctcctagcacgattatatttcacctgggacatgctgctatgctgggactcatgtatgtctactggactcagctcaacatgttccagaccttgaagtacctggccatcttgggcagtgtgacgtttctggctggcaatcggatgctggcccagcaggcagtcaagagaacagcacattagttccagaagaaagatggaaattctgaaaactgaatgtcaagaaaaggagtcaagaacaattcacagtatgagaagaaaaatggaaaaaaaaaactttatttaaaaaagaaaaaagtccagattgtagttatacttttgcttgtttttcagtttccccaacacacagcagatacctggtgagctcagatagtctctttctctgacactgtgtaagaagctgtgaatattcctaacttacccagatgttgcttttgaaaagttgaaatgtgtaattgttttggaataaagagggtaacaataggaa

SEQ ID NO: 377725 - DNA, 2479 bp, Homo sapiens
ccaactaaggctagtacgaggcgggtgttaatcggccgagggagagcgggtctgtcctcgggaactgcaaggccctgtgagcgggaggactgggatcccggccgcggctgctggaagcgtcgaagctcagcggggccgcggacactgacctgtgcttagaactcatcctggcccgcagagcctgccgcgagtccctggcgtcccctgtggcgggctcttggagccactttcccgagcggaagtcagcccgcggctcggactccggcgggacctgctcggaggaatggcgccgccgggttcaagcactgtcttcctgttggccctgacaatcatagccagcacctgggctctgacgcccactcactacctcaccaagcatgacgtggagagactaaaagcctcgctggatcgccctttcacaaatttggaatctgccttctactccatcgtgggactcagcagccttggtgctcaggtgccagatgcaaagaaagcatgtacctacatcagatctaaccttgatcccagcaatgtggattccctcttctacgctgcccaggccagccaggccctctcaggatgtgagatctctatttcaaatgagaccaaagatctgcttctggcagctgtcagtgaggactcatctgttacccagatctaccatgcagttgcagctctaagtggctttggccttcccttggcatcccaagaagcactcagtgcccttactgctcgtctcagcaaggaggagactgtgctggcaacagtccaggctctgcagacagcatcccacctgtcccagcaggctgacctgaggagcatcgtggaggagattgaggaccttgttgctcgcctggatgaactcgggggcgtgtatctccagtttgaagaaggactggaaacaacagcgttatttgtggctgccacctacaagctcatggatcatgtggggactgagccatccattaaggaggatcaggtcatccagctgatgaacgcgatcttcagcaagaagaactttgagtccctctccgaagccttcagcgtggcctctgcagctgctgtgctctcgcataatcgctaccacgtgccagttgtggttgtgcctgagggctctgcttccgacactcatgaacaggctatcttgcggttgcaagtcaccaatgttctgtctcagcctctgactcaggccactgttaaactagaacatgctaaatctgttgcttccagagccactgtcctccagaagacatccttcacccctgtaggggatgtttttgaactaaatttcatgaacgtcaaattttccagtggttattatgacttccttgtcgaagttgaaggtgacaaccggtatattgcaaataccgtagagctcagagtcaagatctccactgaagttggcatcacaaatgttgatctttccaccgtggataaggatcagagcattgcacccaaaactacccgggtgacatacccagccaaagccaagggcacattcatcgcagacagccaccagaacttcgccttgttcttccagctggtagatgtgaacactggtgctgaactcactcctcaccagacatttgtccgactccataaccagaagactggccaggaagtggtgtttgttgccgagccagacaacaagaacgtgtacaagtttgaactggatacctctgaaagaaagattgaatttgactctgcctctggcacctacactctctacttaatcattggagatgccactttgaagaacccaatcctctggaatgtggctgatgtggtcatcaagttccctgaggaagaagctccctcgactgtcttgtcccagaaccttttcactccaaaacaggaaattcagcacctgttccgcgagcctgagaagaggccccccaccgtggtgtccaatacattcactgccctgatcctctcgccgttgcttctgctcttcgctctgtggatccggattggtgccaatgtctccaacttcacttttgctcctagcacgattatatttcacctgggacatgctgctatgctgggactcatgtatgtctactggactcagctcaacatgttccagaccttgaagtacctggccatcttgggcagtgtgacgtttctggctggcaatcggatgctggcccagcaggcagtcaagaggagaacagcacatagtgccagaagaaagatggcacttctgaaaacctgaattgttcaccgccaaacgggagtcccaggaaccaatccaacaggtatggagaaaggaacaacttgggaacaacagaaacgttttatttcacacacagaacaaacaggggcggcccccctttaactatgacgagcccgccgctcccttccgtctaacagcgctcctttctacaggagccgcattacgcgcaaatcaccacaacggcgcaacacaagaggacacgcgctctccctctaacaggcgcccttcacccaagtggccaca

SEQ ID NO: 377726 - DNA, 1922 bp, Homo sapiens
ccaactaaggctagtacgaggcgggtgttaatcggccgagggagacaaagatctgcttctggcagctgtcagtgaggactcatctgttacccagatctaccatgcagttgcagctctaagtggctttggccttcccttggcatcccaagaagcactcagtgcccttactgctcgtctcagcaaggaggagactgtgctggcaacagtccaggctctgcagacagcatcccacctgtcccagcaggctgacctgaggagcatcgtggaggagattgaggaccttgttgctcgcctggatgaactcgggggcgtgtatctccagtttgaagaaggactggaaacaacagcgttatttgtggctgccacctacaagctcatggatcatgtggggactgagccatccattaaggaggatcaggtcatccagctgatgaacgcgatcttcagcaagaagaactttgagtccctctccgaagccttcagcgtggcctctgcagctgctgtgctctcgcataatcgctaccacgtgccagttgtggttgtgcctgagggctctgcttccgacactcatgaacaggctatcttgcggttgcaagtcaccaatgttctgtctcagcctctgactcaggccactgttaaactagaacatgctaaatctgttgcttccagagccactgtcctccagaagacatccttcacccctgtaggggatgtttttgaactaaatttcatgaacgtcaaattttccagtggttattatgacttccttgtcgaagttgaaggtgacaaccggtatattgcaaataccgtagagctcagagtcaagatctccactgaagttggcatcacaaatgttgatctttccaccgtggataaggatcagagcattgcacccaaaactacccgggtgacatacccagccaaagccaagggcacattcatcgcagacagccaccagaacttcgccttgttcttccagctggtagatgtgaacactggtgctgaactcactcctcaccagacatttgtccgactccataaccagaagactggccaggaagtggtgtttgttgccgagccagacaacaagaacgtgtacaagtttgaactggatacctctgaaagaaagattgaatttgactctgcctctggcacctacactctctacttaatcattggagatgccactttgaagaacccaatcctctggaatgtggctgatgtggtcatcaagttccctgaggaagaagctccctcgactgtcttgtcccagaaccttttcactccaaaacaggaaattcagcacctgttccgcgagcctgagaagaggccccccaccgtggtgtccaatacattcactgccctgatcctctcgccgttgcttctgctcttcgctctgtggatccggattggtgccaatgtctccaacttcacttttgctcctagcacgattatatttcacctgggacatgctgctatgctgggactcatgtatgtctactggactcagctcaacatgttccagaccttgaagtacctggccatcttgggcagtgtgacgtttctggctggcaatcggatgctggcccagcaggcagtcaagagaacagcacattagttccagaagaaagatggaaattctgaaaactgaatgtcaagaaaaggagtcaagaacaattcacagtatgagaagaaaaatggaaaaaaaaaactttatttaaaaaagaaaaaagtccagattgtagttatacttttgcttgtttttcagtttccccaacacacagcagatacctggtgagctcagatagtctctttctctgacactgtgtaagaagctgtgaatattcctaacttacccagatgttgcttttgaaaagttgaaatgtgtaattgttttggaataaagagggtaacaataggaa

SEQ ID NO: 377727 - DNA, 2575 bp, Homo sapiens
ccaactaaggctagtacgaggcgggtgttaatcggccgagggagagcgggtctgtcctcgggaactgcaaggccctgtgagcgggaggactgggatcccggccgcggctgctggaagcgtcgaagctcagcggggccgcggacactgacctgtgcttagaactcatcctggcccgcagagcctgccgcgagtccctggcgtcccctgtggcgggctcttggagccactttcccgagcggaagtcagcccgcggctcggactccggcgggacctgctcggaggaatggcgccgccgggttcaagcactgtcttcctgttggccctgacaatcatagccagcacctgggctctgacgcccactcactacctcaccaagcatgacgtggagagactaaaagcctcgctggatcgccctttcacaaatttggaatctgccttctactccatcgtgggactcagcagccttggtgctcaggtgccagatgcaaagaaagcatgtacctacatcagatctaaccttgatcccagcaatgtggattccctcttctacgctgcccaggccagccaggccctctcaggatgtgagatctctatttcaaatgagaccaaagatctgcttctggcagctgtcagtgaggactcatctgttacccagatctaccatgcagttgcagctctaagtggctttggccttcccttggcatcccaagaagcactcagtgcccttactgctcgtctcagcaaggaggagactgtgctggcaacagtccaggctctgcagacagcatcccacctgtcccagcaggctgacctgaggagcatcgtggaggagattgaggaccttgttgctcgcctggatgaactcgggggcgtgtatctccagtttgaagaaggactggaaacaacagcgttatttgtggctgccacctacaagctcatggatcatgtggggactgagccatccattaaggaggatcaggtcatccagctgatgaacgcgatcttcagcaagaagaactttgagtccctctccgaagccttcagcgtggcctctgcagctgctgtgctctcgcataatcgctaccacgtgccagttgtggttgtgcctgagggctctgcttccgacactcatgaacaggctatcttgcggttgcaagtcaccaatgttctgtctcagcctctgactcaggccactgttaaactagaacatgctaaatctgttgcttccagagccactgtcctccagaagacatccttcacccctgtaggggatgtttttgaactaaatttcatgaacgtcaaattttccagtggttattatgacttccttgtcgaagttgaaggtgacaaccggtatattgcaaataccgtagagctcagagtcaagatctccactgaagttggcatcacaaatgttgatctttccaccgtggataaggatcagagcattgcacccaaaactacccgggtgacatacccagccaaagccaagggcacattcatcgcagacagccaccagaacttcgccttgttcttccagctggtagatgtgaacactggtgctgaactcactcctcaccagacatttgtccgactccataaccagaagactggccaggaagtggtgtttgttgccgagccagacaacaagaacgtgtacaagtttgaactggatacctctgaaagaaagattgaatttgactctgcctctggcacctacactcttcctcactttattccattgggaggaattggcccctttggaaagaaacccaatcccttcctgggaaattggtgggttgttggttggcttgaattgtaccccgaacccagggttgatgtgggtccattcaaggttctccctgtgaaggaagaaaggctcccctcgaactggtctttgttccccagaaacctttttcattcccaaaaccgggaaatttcaggcacctgtttccgcggaagccttggaggaaagagggggcgccccccaccgtggtgtccaatacattcactgccctgatcctctcgccgttgcttctgctcttcgctctgtggatccggattggtgccaatgtctccaacttcacttttgctcctagcacgattatatttcacctgggacatgctgctatgctgggactcatgtatgtctactggactcagctcaacatgttccagaccttgaagtacctggccatcttgggcagtgtgacgtttctggctggcaatcggatgctggcccagcaggcagtcaagagaacagcacattagttccagaagaaagatggaaattctgaaaactgaatgtcaagaaaaggagtcaagaacaattcacagtatgagaagaaaaatggaaaaaaaaaactttatttaaaaaagaaaaaagtccagattgtagttatacttttgcttgtttttcagtttccccaacacacagcagatacctggtgagctcagatagtctctttctctgacactgtgtaagaagctgtgaatattcctaacttacccagatgttgcttttgaaaagttgaaatgtgtaattgttttggaataaagagggtaacaataggaa

SEQ ID NO: 377728 - DNA, 2407 bp, Homo sapiens
ccaactaaggctagtacgaggcgggtgttaatcggccgagggagagcgggtctgtcctcgggaactgcaaggccctgtgagcgggaggactgggatcccggccgcggctgctggaagcgtcgaagctcagcggggccgcggacactgacctgtgcttagaactcatcctggcccgcagagcctgccgcgagtccctggcgtcccctgtggcgggctcttggagccactttcccgagcggaagtcagcccgcggctcggactccggcgggacctgctcggaggaatggcgccgccgggttcaagcactgtcttcctgttggccctgacaatcatagccagcacctgggctctgacgcccactcactacctcaccaagcatgacgtggagagactaaaagcctcgctggatcgccctttcacaaatttggaatctgccttctactccatcgtgggactcagcagccttggtgctcaggtgccagatgcaaagaaagcatgtacctacatcagatctaaccttgatcccagcaatgtggattccctcttctacgctgcccaggccagccaggccctctcaggatgtgagatctctatttcaaatgagaccaaagatctgcttctggcagctgtcagtgaggactcatctgttacccagatctaccatgcagttgcagctctaagtggctttggccttcccttggcatcccaagaagcactcagtgcccttactgctcgtctcagcaaggaggagactgtgctggcaacagtccaggctctgcagacagcatcccacctgtcccagcaggctgacctgaggagcatcgtggaggagattgaggaccttgttgctcgcctggatgaactcgggggcgtgtatctccagtttgaagaaggactggaaacaacagcgttatttgtggctgccacctacaagctcatggatcatgtggggactgagccatccattaaggaggatcaggtcatccagctgatgaacgcgatcttcagcaagaagaactttgagtccctctccgaagccttcagcgtggcctctgcagctgctgtgctctcgcataatcgctaccacgtgccagttgtggttgtgcctgagggctctgcttccgacactcatgaacaggctatcttgcggttgcaagtcaccaatgttctgtctcagcctctgactcaggccactgttaaactagaacatgctaaatctgttgcttccagagccactgtcctccagaagacatccttcacccctgtaggggatgtttttgaactaaatttcatgaacgtcaaattttccagtggttattatgacttccttgtcgaagttgaaggtgacaaccggtatattgcaaataccgtagagctcagagtcaagatctccactgaagttggcatcacaaatgttgatctttccaccgtggataaggatcagagcattgcacccaaaactacccgggtgacatacccagccaaagccaagggcacattcatcgcagacagccaccagaacttcgccttgttcttccagctggtagatgtgaacactggtgctgaactcactcctcaccagacatttgtccgactccataaccagaagactggccaggaagtggtgtttgttgccgagccagacaacaagaacgtgtacaagtttgaactggatacctctgaaagaaagattgaatttgactctgcctctggcacctacactctctacttaatcattggagatgccactttgaagaacccaatcctctggaatgtggctgatgtggtcatcaagttccctgaggaagaagctccctcgactgtcttgtcccagaaccttttcactccaaaacaggaaattcagcacctgttccgcgagcctgagaagaggccccccaccgtggtgtccaatacattcactgccctgatcctctcgccgttgcttctgctcttcgctctgctatgctgggactcatgtatgtctactggactcagctcaacatgttccagaccttgaagtacctggccatcttgggcagtgtgacgtttctggctggcaatcggatgctggcccagcaggcagtcaagagaacagcacattagttccagaagaaagatggaaattctgaaaactgaatgtcaagaaaaggagtcaagaacaattcacagtatgagaagaaaaatggaaaaaaaaaactttatttaaaaaagaaaaaagtccagattgtagttatacttttgcttgtttttcagtttccccaacacacagcagatacctggtgagctcagatagtctctttctctgacactgtgtaagaagctgtgaatattcctaacttacccagatgttgcttttgaaaagttgaaatgtgtaattgttttggaataaagagggtaacaataggaa

SEQ ID NO: 377729 - DNA, 2531 bp, Homo sapiens
ccaactaaggctagtacgaggcgggtgttaatcggccgagggagagcgggtctgtcctcgggaactgcaaggccctgtgagcgggaggactgggatcccggccgcggctgctggaagcgtcgaagctcagcggggccgcggacactgacctgtgcttagaactcatcctggcccgcagagcctgccgcgagtccctggcgtcccctgtggcgggctcttggagccactttcccgagcggaagtcagcccgcggctcggactccggcgggacctgctcggaggaatggcgccgccgggttcaagcactgtcttcctgttggccctgacaatcatagccagcacctgggctctgacgcccactcactacctcaccaagcatgacgtggagagactaaaagcctcgctggatcgccctttcacaaatttggaatctgccttctactccatcgtgggactcagcagccttggtgctcaggtgccagatgcaaagaaagcatgtacctacatcagatctaaccttgatcccagcaatgtggattccctcttctacgctgcccaggccagccaggccctctcaggatgtgagatctctatttcaaatgagaccaaagatctgcttctggcagctgtcagtgaggactcatctgttacccagatctaccatgcagttgcagctctaagtggctttggccttcccttggcatcccaagaagcactcagtgcccttactgctcgtctcagcaaggaggagactgtgctggcgagggtgtggagcaccgttctggaatcccgttcgttgtttagcaagagaacagtccaggctctgcagacagcatcccacctgtcccagcaggctgacctgaggagcatcgtggaggagattgaggaccttgttgctcgcctggatgaactcgggggcgtgtatctccagtttgaagaaggactggaaacaacagcgttatttgtggctgccacctacaagctcatggatcatgtggggactgagccatccattaaggaggatcaggtcatccagctgatgaacgcgatcttcagcaagaagaactttgagtccctctccgaagccttcagcgtggcctctgcagctgctgtgctctcgcataatcgctaccacgtgccagttgtggttgtgcctgagggctctgcttccgacactcatgaacaggctatcttgcggttgcaagtcaccaatgttctgtctcagcctctgactcaggccactgttaaactagaacatgctaaatctgttgcttccagagccactgtcctccagaagacatccttcacccctgtaggggatgtttttgaactaaatttcatgaacgtcaaattttccagtggttattatgacttccttgtcgaagttgaaggtgacaaccggtatattgcaaataccgtagagctcagagtcaagatctccactgaagttggcatcacaaatgttgatctttccaccgtggataaggatcagagcattgcacccaaaactacccgggtgacatacccagccaaagccaagggcacattcatcgcagacagccaccagaacttcgccttgttcttccagctggtagatgtgaacactggtgctgaactcactcctcaccagacatttgtccgactccataaccagaagactggccaggaagtggtgtttgttgccgagccagacaacaagaacgtgtacaagtttgaactggatacctctgaaagaaagattgaatttgactctgcctctggcacctacactctctacttaatcattggagatgccactttgaagaacccaatcctctggaatgtggctgatgtggtcatcaagttccctgaggaagaagctccctcgactgtcttgtcccagaaccttttcactccaaaacaggaaattcagcacctgttccgcgagcctgagaagaggccccccaccgtggtgtccaatacattcactgccctgatcctctcgccgttgcttctgctcttcgctctgtggatccggattggtgccaatgtctccaacttcacttttgctcctagcacgattatatttcacctgggacatgctgctatgctgggactcatgtatgtctactggactcagctcaacatgttccagaccttgaagtacctggccatcttgggcagtgtgacgtttctggctggcaatcggatgctggcccagcaggcagtcaagagaacagcacattagttccagaagaaagatggaaattctgaaaactgaatgtcaagaaaaggagtcaagaacaattcacagtatgagaagaaaaatggaaaaaaaaaactttatttaaaaaagaaaaaagtccagattgtagttatacttttgcttgtttttcagtttccccaacacacagcagatacctggtgagctcagatagtctctttctctgacactgtgtaagaagctgtgaatattcctaacttacccagatgttgcttttgaaaagttgaaatgtgtaattgttttggaataaagagggtaacaataggaa

SEQ ID NO: 377730 - DNA, 2000 bp, Homo sapiens
ccaactaaggctagtacgaggcgggtgttaatcggccgagggagagcgggtctgtcctcgggaactgcaaggccctgtgagcgggaggactgggatcccggccgcggctgctggaagcgtcgaagctcagcggggccgcggacactgacctgtgcttagaactcatcctggcccgcagagcctgccgcgagtccctggcgtcccctgtggcgggctcttggagccactttcccgagcggaagtcagcccgcggctcggactccggcgggacctgctcggaggaatggcgccgccgggttcaagcactgtcttcctgttggccctgacaatcatagccagcacctgggctctgacgcccactcactacctcaccaagcatgacgtggagagactaaaagcctcgctggatcgccctttcacaaatttggaatctgccttctactccatcgtgggactcagcagccttggtgctcaggtgccagatgcaaagaaagcatgtacctacatcagatctaaccttgatcccagcaatgtggattccctcttctacgctgcccaggccagccaggccctctcaggatgtgagatctctatttcaaatgagaccaaagatctgcttctggcagctgtcagtgaggactcatctgttacccagatctaccatgcagttgcagctctaagtggctttggccttcccttggcatcccaagaagcactcagtgcccttactgctcgtctcagcaaggaggagactgtgctggcaacagtccaggctctgcagacagcatcccacctgtcccagcaggctgacctgaggagcatcgtggaggagattgaggaccttgttgctcgcctggatgaactcgggggcgtgtatctccagtttgaagaaggactggaaacaacagcgttatttgtggctgccacctacaagctcatggatcatgtggggactgagccatccattaaggaggatcaggtcatccagctgatgaacgcgatcttcagcaagaagaactttgagtccctctccgaagccttcagcgtggcctctgcagctgctgtgctctcgcataatcgctaccacgtgccagttgtggttgtgcctgagggctctgcttccgacactcatgaacaggctatcttgcggttgcaagtcaccaatgttctgtctcagcctctgactcaggccactgttaaactagaacatgctaaatctgttgcttccagagccactgtcctccagaagacatccttcacccctgtaggggatgtttttgaactaaatttcatgaacgtcaaattttccagtggttattatgacttccttgtcgaagttgaaggtgacaaccggtatattgcaaataccgtagagctcagagtcaagatctccactgaagttggcatcacaaatgttgatctttccaccgtggataaggatcagagcattgcacccaaaactacccgggtgacatacccagccaaagccaagggcacattcatcgcagacagccaccagaacttcgccttgttcttccagctggtagatgtgaacactggtgctgaactcactcctcaccagacatttgtccgactccataaccagaagactggccaggaagtggtgtttgttgccgagccagacaacaagaacgtgtacaagtttgaactggatacctctgaaacagcacattagttccagaagaaagatggaaattctgaaaactgaatgtcaagaaaaggagtcaagaacaattcacagtatgagaagaaaaatggaaaaaaaaaactttatttaaaaaagaaaaaagtccagattgtagttatacttttgcttgtttttcagtttccccaacacacagcagatacctggtgagctcagatagtctctttctctgacactgtgtaagaagctgtgaatattcctaacttacccagatgttgcttttgaaaagttgaaatgtgtaattgttttggaataaagagggtaacaataggaa

SEQ ID NO: 377731 - DNA, 1550 bp, Homo sapiens
ccagctaacctacataaacggttcctcaagggtaggacggagggacccatgggatggccctgcagcgatcttcagcaagaagaactttgagtccctctccgaagccttcagcgtggcctctgcagctgctgtgctctcgcataatcgctaccacgtgccagttgtggttgtgcctgagggctctgcttccgacactcatgaacaggctatcttgcggttgcaagtcaccaatgttctgtctcagcctctgactcaggccactgttaaactagaacatgctaaatctgttgcttccagagccactgtcctccagaagacatccttcacccctgtaggggatgtttttgaactaaatttcatgaacgtcaaattttccagtggttattatgacttccttgtcgaagttgaaggtgacaaccggtatattgcaaataccgtagagctcagagtcaagatctccactgaagttggcatcacaaatgttgatctttccaccgtggataaggatcagagcattgcacccaaaactacccgggtgacatacccagccaaagccaagggcacattcatcgcagacagccaccagaacttcgccttgttcttccagctggtagatgtgaacactggtgctgaactcactcctcaccagacatttgtccgactccataaccagaagactggccaggaagtggtgtttgttgccgagccagacaacaagaacgtgtacaagtttgaactggatacctctgaaagaaagattgaatttgactctgcctctggcacctacactctctacttaatcattggagatgccactttgaagaacccaatcctctggaatgtggctgatgtggtcatcaagttccctgaggaagaagctccctcgactgtcttgtcccagaaccttttcactccaaaacaggaaattcagcacctgttccgcgagcctgagaagaggccccccaccgtggtgtccaatacattcactgccctgatcctctcgccgttgcttctgctcttcgctctgtggatccggattggtgccaatgtctccaacttcacttttgctcctagcacgattatatttcacctgggacatgctgctatgctgggactcatgtatgtctactggactcagctcaacatgttccagaccttgaagtacctggccatcttgggcagtgtgacgtttctggctggcaatcggatgctggcccagcaggcagtcaagagaacagcacattagttccagaagaaagatggaaattctgaaaactgaatgtcaagaaaaggagtcaagaacaattcacagtatgagaagaaaaatggaaaaaaaaaactttatttaaaaaagaaaaaagtccagattgtagttatacttttgcttgtttttcagtttccccaacacacagcagatacctggtgagctcagatagtctctttctctgacactgtgtaagaagctgtgaatattcctaacttacccagatgttgcttttgaaaagttgaaatgtgtaattgttttggaataaagagggtaacaataggaa

SEQ ID NO: 377732 - DNA, 1427 bp, Homo sapiens
cgctctagagtatccccacctcctaccccacgtgccagttgtggttgtgcctgagggctctgcttccgacactcatgaacaggctatcttgcggttgcaagtcaccaatgttctgtctcagcctctgactcaggccactgttaaactagaacatgctaaatctgttgcttccagagccactgtcctccagaagacatccttcacccctgtaggggatgtttttgaactaaatttcatgaacgtcaaattttccagtggttattatgacttccttgtcgaagttgaaggtgacaaccggtatattgcaaataccgtagagctcagagtcaagatctccactgaagttggcatcacaaatgttgatctttccaccgtggataaggatcagagcattgcacccaaaactacccgggtgacatacccagccaaagccaagggcacattcatcgcagacagccaccagaacttcgccttgttcttccagctggtagatgtgaacactggtgctgaactcactcctcaccagacatttgtccgactccataaccagaagactggccaggaagtggtgtttgttgccgagccagacaacaagaacgtgtacaagtttgaactggatacctctgaaagaaagattgaatttgactctgcctctggcacctacactctctacttaatcattggagatgccactttgaagaacccaatcctctggaatgtggctgatgtggtcatcaagttccctgaggaagaagctccctcgactgtcttgtcccagaaccttttcactccaaaacaggaaattcagcacctgttccgcgagcctgagaagaggccccccaccgtggtgtccaatacattcactgccctgatcctctcgccgttgcttctgctcttcgctctgtggatccggattggtgccaatgtctccaacttcacttttgctcctagcacgattatatttcacctgggacatgctgctatgctgggactcatgtatgtctactggactcagctcaacatgttccagaccttgaagtacctggccatcttgggcagtgtgacgtttctggctggcaatcggatgctggcccagcaggcagtcaagagaacagcacattagttccagaagaaagatggaaattctgaaaactgaatgtcaagaaaaggagtcaagaacaattcacagtatgagaagaaaaatggaaaaaaaaaactttatttaaaaaagaaaaaagtccagattgtagttatacttttgcttgtttttcagtttccccaacacacagcagatacctggtgagctcagatagtctctttctctgacactgtgtaagaagctgtgaatattcctaacttacccagatgttgcttttgaaaagttgaaatgtgtaattgttttggaataaagagggtaacaataggaa

SEQ ID NO: 377733 - DNA, 1531 bp, Homo sapiens
  misc_feature (1425)..(1425): n is a, c, g, or t
  misc_feature (1447)..(1448): n is a, c, g, or t
  misc_feature (1454)..(1454): n is a, c, g, or t
  misc_feature (1458)..(1458): n is a, c, g, or t
  misc_feature (1467)..(1467): n is a, c, g, or t
  misc_feature (1469)..(1470): n is a, c, g, or t
ccaactaaggctagtacgaggcgggtgttaatcggccgagggagagcgggtctgtcctcgggaactgcaaggccctgtgagcgggaggactgggatcccggccgcggctgctggaagcgtcgaagctcagcggggccgcggacactgacctgtgcttagaactcatcctggcccgcagagcctgccgcgagtccctggcgtcccctgtggcgggctcttggagccactttcccgagcggaagtcagcccgcggctcggactccggcgggacctgctcggaggaatggcgccgccgggttcaagcactgtcttcctgttggccctgacaatcatagccagcacctgggctctgacgcccactcactacctcaccaagcatgacgtggagagactaaaagcctcgctggatcgccctttcacaaatttggaatctgccttctactccatcgtgggactcagcagccttggtgctcaggtgccagatgcaaagaaagcatgtacctacatcagatctaaccttgatcccagcaatgtggattccctcttctacgctgcccaggccagccaggccctctcaggatgtgagatctctatttcaaatgagaccaaagatctgcttctggcagctgtcagtgaggactcatctgttacccagatctaccatgcagttgcagctctaagtggctttggccttcccttggcatcccaagaagcactcagtgcccttactgctcgtctcagcaaggaggagactgtgctggcaacagtccaggctctgcagacagcatcccacctgtcccagcaggctgacctgaggagcatcgtggaggagattgaggaccttgttgctcgcctggatgaactcgggggcgtgtatctccagtttgaagaaggactggaaacaacagcgttatttgtggctgccacctacaagctcatggatcatgtggggactgagccatccattaaggaggatcaggtcatccagctgatgaacgcgatcttcagcaagaagaactttgagtccctctccgaagccttcagcgtggcctctgcagctgctgtgctctcgcataatcgctaccacgtgccagttgtggttgtgcctgagggctctgcttccgacactcatgaacaggctatcttgcggttgcaagtcaccaatgttctgtctcagcctctgactcaggccactgttaaactagaacatgctaaatctgttgcttccagagccactgtcctccagaagacatccttcacccctgtaggggatgtttttgaactaaatttcatgaacgtcaaattttccagtggttattatgacttccttgtcgaagttgaaggtgacaaccggtatattgcaaataccgtagagctcagagtcaagatctccactgagtggctcccatgtgtcttcccgggtanggtcggtggcccaataccgggnnccccancggntttggagcnannctgtccgggatgcggggcccctttctcctacgcgggttgtcccatggcgacagtgcgctcg

SEQ ID NO: 377734 - DNA, 1775 bp, Homo sapiens
ccaactaaggctagtacgaggcgggtgttaatcggccgagggagagcgggtctgtcctcgggaactgcaaggccctgtgagcgggaggactgggatcccggccgcggctgctggaagcgtcgaagctcagcggggccgcggacactgacctgtgcttagaactcatcctggcccgcagagcctgccgcgagtccctggcgtcccctgtggcgggctcttggagccactttcccgagcggaagtcagcccgcggctcggactccggcgggacctgctcggaggaatggcgccgccgggttcaagcactgtcttcctgttggccctgacaatcatagccagcacctgggctctgacgcccactcactacctcaccaagcatgacgtggagagactaaaagcctcgctggatcgccctttcacaaatttggaatctgccttctactccatcgtgggactcagcagccttggtgctcaggtgccagatgcaaagaaagcatgtacctacatcagatctaaccttgatcccagcaatgtggattccctcttctacgctgcccaggccagccaggccctctcaggatgtgagatctctatttcaaatgagaccaaagatctgcttctggcagctgtcagtgaggactcatctgttacccagatctaccatgcagttgcagctctaagtggctttggccttcccttggcatcccaagaagcactcagtgcccttactgctcgtctcagcaaggaggagactgtgctggcaacagtccaggctctgcagacagcatcccacctgtcccagcaggctgacctgaggagcatcgtggaggagattgaggaccttgttgctcgcctggatgaactcgggggcgtgtatctccagtttgaagaaggactggaaacaacagcgttatttgtggctgccacctacaagctcatggatcatgtggggactgagccatccattaaggaggatcaggtcatccagctgatgaacgcgatcttcagcaagaagaactttgagtccctctccgaagccttcagcgtggcctctgcagctgctgtgctctcgcataatcgctaccacgtgccagttgtggttgtgcctgagggctctgcttccgacactcatgaacaggctatcttgcggttgcaagtcaccaatgttctgtctcagcctctgactcaggccactgttaaactagaacatgctaaatctgttgcttccagagccactgtcctccagaagacatccttcacccctgtaggggatgtttttgaactaaatttcatgaacgtcaaattttccagtggttattatgacttccttgtcgaagttgaaggtgacaaccggtatattgcaaataccgtagagctcagagtcaagatctccactgaagttggcagtgtgacgtttctggctggcaatcggatgctggcccagcaggcagtcaagagaacagcacattagttccagaagaaagatggaaattctgaaaactgaatgtcaagaaaaggagtcaagaacaattcacagtatgagaagaaaaatggaaaaaaaaaactttatttaaaaaagaaaaaagtccagattgtagttatacttttgcttgtttttcagtttccccaacacacagcagatacctggtgagctcagatagtctctttctctgacactgtgtaagaagctgtgaatattcctaacttacccagatgttgcttttgaaaagttgaaatgtgtaattgttttggaataaagagggtaacaataggaa

SEQ ID NO: 377735 - DNA, 1500 bp, Homo sapiens
ccaactaaggctagtacgaggcgggtgttaatcggccgagggagagcgggtctgtcctcgggaactgcaaggccctgtgagcgggaggactgggatcccggccgcggctgctggaagcgtcgaagctcagcggggccgcggacactgacctgtgcttagaactcatcctggcccgcagagcctgccgcgagtccctggcgtcccctgtggcgggctcttggagccactttcccgagcggaagtcagcccgcggctcggactccggcgggacctgctcggaggaatggcgccgccgggttcaagcactgtcttcctgttggccctgacaatcatagccagcacctgggctctgacgcccactcactacctcaccaagcatgacgtggagagactaaaagcctcgctggatcgccctttcacaaatttggaatctgccttctactccatcgtgggactcagcagccttggtgctcaggtgccagatgcaaagaaagcatgtacctacatcagatctaaccttgatcccagcaatgtggattccctcttctacgctgcccaggccagccaggccctctcaggatgtgagatctctatttcaaatgagaccaaagatctgcttctggcagctgtcagtgaggactcatctgttacccagatctaccatgcagttgcagctctaagtggctttggccttcccttggcatcccaagaagcactcagtgcccttactgctcgtctcagcaaggaggagactgtgctggcaacagtccaggctctgcagacagcatcccacctgtcccagcaggctgacctgaggagcatcgtggaggagattgaggaccttgttgctcgcctggatgaactcgggggcgtgtatctccagtttgaagaaggactggaaacaacagcgttatttgtggctgccacctacaagctcatggatcatgtggggactgagccatccattaaggaggatcaggtcatccagctgatgaacgcgatcttcagcaagaagaactttgagtccctctccgaagccttcagcgtggcctctgcagctgctgtgctctcgcataatcgctaccacgtgccagttgtggttgtgcctgagggctctgcttccgacactcatgaacaggctatcttgcggcaatcggatgctggcccagcaggcagtcaagagaacagcacattagttccagaagaaagatggaaattctgaaaactgaatgtcaagaaaaggagtcaagaacaattcacagtatgagaagaaaaatggaaaaaaaaaactttatttaaaaaagaaaaaagtccagattgtagttatacttttgcttgtttttcagtttccccaacacacagcagatacctggtgagctcagatagtctctttctctgacactgtgtaagaagctgtgaatattcctaacttacccagatgttgcttttgaaaagttgaaatgtgtaattgttttggaataaagagggtaacaataggaa

SEQ ID NO: 377736 - DNA, 1232 bp, Homo sapiens
ccaactaaggctagtacgaggcgggtgttaatcggccgagggagagcgggtctgtcctcgggaactgcaaggccctgtgagcgggaggactgggatcccggccgcggctgctggaagcgtcgaagctcagcggggccgcggacactgacctgtgcttagaactcatcctggcccgcagagcctgccgcgagtccctggcgtcccctgtggcgggctcttggagccactttcccgagcggaagtcagcccgcggctcggactccggcgggacctgctcggaggaatggcgccgccgggttcaagcactgtcttcctgttggccctgacaatcatagccagcacctgggctctgacgcccactcactacctcaccaagcatgacgtggagagactaaaagcctcgctggatcgccctttcacaaatttggaatctgccttctactccatcgtgggactcagcagccttggtgctcaggtgccagatgcaaagaaagcatgtacctacatcagatctaaccttgatcccagcaatgtggattccctcttctacgctgcccaggccagccaggccctctcaggatgtgagatctctatttcaaatgagaccaaagatctgcttctggcagctgtcagtgaggactcatctgttacccagatctaccatgcagttgcagctctaagtggctttggccttcccttggcatcccaagaagcactcagtgcccttactgctcgtctcagcaaggaggagactgtgctggcaacagtccaggctctgcagacagcatcccacctgtcccagcaggctgacctgaggagcatcgtggaggagattgaggacctgttgctcctcaggtcagcctgctgggacgagaaacgtggggacctcattattgagtttgaagtgatcttccccgaaaggattccccagacatcaagaaccgtacttgagcaggttcttccaatatagctatctgagctccccaaggactgaccagggacctttccagagctcaaggcatcctggaccatactaccacgtcgcggaccatgcagagggcgcggagggcccagggcaggcgcctcgcaccgctgaccgtccaccagagcatatatcacaacctcccaaagctcgcacactagaccccagggctcccgagctactcgggcatcaggtggtgggcccagcacgcacacaggcatcccgtctgcccacggcccggccgccctcc

SEQ ID NO: 377737 - DNA, 899 bp, Homo sapiens
ccaactaaggctagtacgaggcgggtgttaatcggccgagggagagcgggtctgtcctcgggaactgcaaggccctgtgagcgggaggactgggatcccggccgcggctgctggaagcgtcgaagctcagcggggccgcggacactgacctgtgcttagaactcatcctggcccgcagagcctgccgcgagtccctggcgtcccctgtggcgggctcttggagccactttcccgagcggaagtcagcccgcggctcggactccggcgggacctgctcggaggaatggcgccgccgggttcaagcactgtcttcctgttggccctgacaatcatagccagcacctgggctctgacgcccactcactacctcaccaagcatgacgtggagagactaaaagcctcgctggatcgccctttcacaaatttggaatctgccttctactccatcgtgggactcagcagccttggtgctcaggtgccagatgcaaagaaagcatgtacctacatcagatctaaccttgatcccagcaatgtggattccctcttctacgctgcccaggccagccaggccctctcaggatgtgagatctctatttcaaatgagaccaaagatctgcttctggcagctgtcagtgaggactcatctgttacccagatctaccatgcagttgcagctctaagtggctttggccttcccttggcatcccaagaagcactcagtgcccttactgctcgtctcagcaaggaggagactgtgctggcaacagtccaggctctgcagtcagcatcgggtataggccgaaggagagactggaggcgtgcatcatctcttcaacctgtgcagaaatgactttgggcattcccataccgccatatgcgggatccccaccgacgccgac

SEQ ID NO: 377738 - DNA, 1037 bp, Homo sapiens
ccaactaaggctagtacgaggcgggtgttaatcggccgagggagagcgggtctgtcctcgggaactgcaaggccctgtgagcgggaggactgggatcccggccgcggctgctggaagcgtcgaagctcagcggggccgcggacactgacctgtgcttagaactcatcctggcccgcagagcctgccgcgagtccctggcgtcccctgtggcgggctcttggagccactttcccgagcggaagtcagcccgcggctcggactccggcgggacctgctcggaggaatggcgccgccgggttcaagcactgtcttcctgttggccctgacaatcatagccagcacctgggctctgacgcccactcactacctcaccaagcatgacgtggagagactaaaagcctcgctggatcgccctttcacaaatttggaatctgccttctactccatcgtgggactcagcagccttggtgctcaggtgccagatgcaaagaaagcatgtacctacatcagatctaaccttgatcccagcaatgtggattccctcttctacgctgcccaggccagccaggccctctcaggatgtgagatctctatttcaaatgagaccaaagatctgcttctggcagctgtcagtgaggactcatctgttacccagatctaccatgcagttgcagctctaagtggctttggccttcccttggcatcccaagaagcactcagtgcccttactgctcgtctcagcaaggaggagactgtgctggcgtgagttgtcatctcgagcatttctcaggcttcatttgtctcgggtcctatccgaagagggctcattcattggttcagcaaatactttctgggcaagtacttgcagtaaatacttccgtgtgccaggtgctctgcaaggcaccgcagacatgattgcatgaaggcaagtaaggtccgtgtcctcgtggagctcacatggacacagtcttctgcaagcctcgcagacagaaggcaagcgctgagccagagcatgagcacaccaccacctagagatc

SEQ ID NO: 377739 - DNA, 735 bp, Homo sapiens
ccaactaaggctagtacgaggcgggtgttaatcggccgagggagagcgggtctgtcctcgggaactgcaaggccctgtgagcgggaggactgggatcccggccgcggctgctggaagcgtcgaagctcagcggggccgcggacactgacctgtgcttagaactcatcctggcccgcagagcctgccgcgagtccctggcgtcccctgtggcgggctcttggagccactttcccgagcggaagtcagcccgcggctcggactccggcgggacctgctcggaggaatggcgccgccgggttcaagcactgtcttcctgttggccctgacaatcatagccagcacctgggctctgacgcccactcactacctcaccaagcatgacgtggagagactaaaagcctcgctggatcgccctttcacaaatttggaatctgccttctactccatcgtgggactcagcagccttggtgctcaggtgccagatgcaaagaaagcatgtacctacatcagatcaaccaaggcagatgtgacagcaagggccacggaccccatggcaggggtggcgtcttcatgagggagggcccaaaacccttgtgggcggacctcccctgagcctgtctgagggccagcccttagtgcattcaggctaaggcccctgggcagggatgccacccctgtccttcggaggacgtgccctcacccctcactggtccactggcttgagactcaccccgt

SEQ ID NO: 377740 - DNA, 356 bp, Homo sapiens
ctggtgagctcagatagtctctttctctgacactgtgtaagaagctgtgaatattcctaacttacccagatgttgcttttgaaaagttgaaatgtgtaattgttttggaataaagagggtaacaataggaaaggcctgattgagagcttattctcatacttttgggtggtggggtccttgggtatatgacatgaggacttagttggaaatgctgttgatgccagcatatttctccaggcctttcttggtccttcttgccccttgctcctaacagaactgagaactgcctggaaaggccagcttccttttttcttctccagcagtgagcaccagctgtctgcataggagccctgttg

SEQ ID NO: 377741 - DNA, 507 bp, Homo sapiens
gagctggggttaatgtagtctctgtggaagggagacctctgggatcaaaagccagcattgagaagaggcaaaaggccccatgcccacttgttgccaagaggttttagcctctgggcggcatatcctcttcatgactgacattgatgctttggtccccggtatacatggctgcccctactgggaagggcacattcttaagtcttcttggtgtgtctttcggcagcacctgttccgcgagcctgagaagaggccccccaccgtggtgtccaatacattcactgccctgatcctctcgccgttgcttctgctcttcgctctggtgagtggctgtaattagcgtgggcagcatgcgtctggcgccagacccagcagatgcattccttccaaaggaggctgtgttgtctggcctcagtaaagctccagaggggtccagcagctgtgacctgaattgatgctcaagacattttagaatgaccaaaagttcccactgtggaggagtggccaaat

SEQ ID NO: 377742 - DNA, 985 bp, Homo sapiens
ccaactaaggctagtacgaggcgggtgttaatcggccgagggagacaaagatctgcttctggcagctgtcagtgaggactcatctgttacccagatctaccatgcagttgcagctctaagtggctttggccttcccttggcatcccaagaagcactcagtgcccttactgctcgtctcagcaaggaggagactgtgctggcaacagtccaggctctgcagacagcatcccacctgtcccagcaggctgacctgaggagcatcgtggaggagattgaggaccttgttgctcgcctggatgaactcgggggcgtgtatctccagtttgaagaaggactggaaacaacagcgttatttgtggctgccacctacaagctcatggatcatgtggggactgagccatccattaaggaggatcaggtcatccagctgatgaacgcgatcttcagcaagaagaactttgagtccctctccgaagccttcagcgtggcctctgcagctgctgtgctctcgcataatcgctaccacgtgccagttgtggttgtgcctgagggctctgcttccgacactcatgaacaggctatcttgcggttgcaagtcaccaatgttctgtctcagcctctgactcaggccactgttaaactagaacatgctaaatctgttgcttccagagccactgtcctccagaagacatccttcacccctgtaggggatgtttttgaactaaatttcatgaacgtcaaattttccagtggttattatgacttccttgtcgaagttgaaggtgacaaccggtatattgcaaataccgtagagctcagagtcaagatctccactgaagttggcatcacaaatgttgatctttccaccgtggataaggatcagagcattgcacccaaaactacccggtgacataccagcaagcagggcgatcaagcgaaagccacagaacttgcagtctcccggcgtatgaacgggggacaaccc

SEQ ID NO: 377743 - DNA, 506 bp, Homo sapiens
  misc_feature (22)..(22): n is a, c, g, or t
  misc_feature (31)..(32): n is a, c, g, or t
  misc_feature (491)..(491): n is a, c, g, or t
aatcacgtgatcctcgatggangaatggcgnnccgggttcaagcactgtcttcctgttggccctgacaatcatagccagcacctgggctctgacgcccactcactacctcaccaagcatgacgtggagagactaaaagcctcgctggatcgccctttcacaaatttggaatctgccttctactccatcgtgggactcagcagccttggtgctcaggtgccagatgcaaagaaagcatgtacctacatcagatctaaccttgatcccagcaatgtggattccctcttctacgctgcccaggccagccaggccctctcaggatgtgagatctctatttcaaatgagaccaaagatctgcttctggcagctgtcagtgaggactcatctgttacccagatctaccatgcagttgcagctctaagcccataagttgtgtctttgtgtccttcccattgtgtcaatcccaaataaatcaaatctattgtcccgttnactgtctcgttcatc

SEQ ID NO: 377744 - DNA, 2401 bp, Homo sapiens
gggcttgcgccgaaactttctggtcaaccgaagtgtcttcacgactgtgtgtgccgcggacactgacctgtgcttagaactcatcctggcccgcagagcctgccgcgagtccctggcgtcccctgtggcgggctcttggagccactttcccgagcggaagtcagcccgcggctcggactccggcgggacctgctcggaggaatggcgccgccgggttcaagcactgtcttcctgttggccctgacaatcatagccagcacctgggctctgacgcccactcactacctcaccaagcatgacgtggagagactaaaagcctcgctggatcgccctttcacaaatttggaatctgccttctactccatcgtgggactcagcagccttggtgctcaggtgccagatgcaaagaaagcatgtacctacatcagatctaaccttgatcccagcaatgtggattccctcttctacgctgcccaggccagccaggccctctcaggatgtgagatctctatttcaaatgagaccaaagatctgcttctggcagctgtcagtgaggactcatctgttacccagatctaccatgcagttgcagctctaagtggctttggccttcccttggcatcccaagaagcactcagtgcccttactgctcgtctcagcaaggaggagactgtgctggcaacagtccaggctctgcagacagcatcccacctgtcccagcaggctgacctgaggagcatcgtggaggagattgaggaccttgttgctcgcctggatgaactcgggggcgtgtatctccagtttgaagaaggactggaaacaacagcgttatttgtggctgccacctacaagctcatggatcatgtggggactgagccatccattaaggaggatcaggtcatccagctgatgaacgcgatcttcagcaagaagaactttgagtccctctccgaagccttcagcgtggcctctgcagctgctgtgctctcgcataatcgctaccacgtgccagttgtggttgtgcctgagggctctgcttccgacactcatgaacaggctatcttgcggttgcaagtcaccaatgttctgtctcagcctctgactcaggccactgttaaactagaacatgctaaatctgttgcttccagagccactgtcctccagaagacatccttcacccctgtaggggatgtttttgaactaaatttcatgaacgtcaaattttccagtggttattatgacttccttgtcgaagttgaaggtgacaaccggtatattgcaaataccgtagagctcagagtcaagatctccactgaagttggcatcacaaatgttgatctttccaccgtggataaggatcagagcattgcacccaaaactacccgggtgacatacccagccaaagccaagggcacattcatcgcagacagccaccagaacttcgccttgttcttccagctggtagatgtgaacactggtgctgaactcactcctcaccagacatttgtccgactccataaccagaagactggccaggaagtggtgtttgttgccgagccagacaacaagaacgtgtacaagtttgaactggatacctctgaaagaaagattgaatttgactctgcctctggcacctacactctctacttaatcattggagatgccactttgaagaacccaatcctctggaatgtggctgatgtggtcatcaagttccctgaggaagaagctccctcgactgtcttgtcccagaaccttttcactccaaaacaggaaattcagcacctgttccgcgagcctgagaagaggccccccaccgtggtgtccaatacattcactgccctgatcctctcgccgttgcttctgctcttcgctctgtggatccggattggtgccaatgtctccaacttcacttttgctcctagcacgattatatttcacctgggacatgctgctatgctgggactcatgtatgtctactggactcagctcaacatgttccagaccttgaagtacctggccatcttgggcagtgtgacgtttctggctggcaatcggatgctggcccagcaggcagtcaagagaacagcacattagttccagaagaaagatggaaattctgaaaactgaatgtcaagaaaaggagtcaagaacaattcacagtatgagaagaaaaatggaaaaaaaaaactttatttaaaaaagaaaaaagtccagattgtagttatacttttgcttgtttttcagtttccccaacacacagcagatacctggtgagctcagatagtctctttctctgacactgtgtaagaagctgtgaatattcctaacttacccagatgttgcttttgaaaagttgaaatgtgtaattgttttggaataaagagggtaacaataggaa

SEQ ID NO: 377745 - DNA, 2850 bp, Homo sapiens
ccaactaaggctagtacgaggcgggtgttaatcggccgagggagagcgggtctgtcctcgggaactgcaaggccctgtgagcgggaggactgggatcccggccgcggctgctggaagcgtcgaagctcagcggggccgcggacactgacctgtgcttagaactcatcctggcccgcagagcctgccgcgagtccctggcgtcccctgtggcgggctcttggagccactttcccgagcggaagtcagcccgcggctcggactccggcgggacctgctcggaggaatggcgccgccgggttcaagcactgtcttcctgttggccctgacaatcatagccagcacctgggctctgacgcccactcactacctcaccaagcatgacgtggagagactaaaagcctcgctggatcgccctttcacaaatttggaatctgccttctactccatcgtgggactcagcagccttggtgctcaggtgccagatgcaaagaaagcatgtacctacatcagatctaaccttgatcccagcaatgtggattccctcttctacgctgcccaggccagccaggccctctcaggatgtgagatctctatttcaaatgagaccaaagatctgcttctggcagctgtcagtgaggactcatctgttacccagatctaccatgcagttgcagctctaagtggctttggccttcccttggcatcccaagaagcactcagtgcccttactgctcgtctcagcaaggaggagactgtgctggcaacagtccaggctctgcagacagcatcccacctgtcccagcaggctgacctgaggagcatcgtggaggagattgaggaccttgttgctcgcctggatgaactcgggggcgtgtatctccagtttgaagaaggactggaaacaacagcgttatttgtggctgccacctacaagctcatggatcatgtggggactgagccatccattaaggaggatcaggtcatccagctgatgaacgcgatcttcagcaagaagaactttgagtccctctccgaagccttcagcgtggcctctgcagctgctgtgctctcgcataatcgctaccacgtgccagttgtggttgtgcctgagggctctgcttccgacactcatgaacaggctatcttgcggttgcaagtcaccaatgttctgtctcagcctctgactcaggccactgttaaactagaacatgctaaatctgttgcttccagagccactgtcctccagaagacatccttcacccctgtaggggatgtttttgaactaaatttcatgaacgtcaaattttccagtggttattatgacttccttgtcgaagttgaaggtgacaaccggtatattgcaaataccgtagagctcagagtcaagatctccactgaagttggcatcacaaatgttgatctttccaccgtggataaggatcagagcattgcacccaaaactacccgggtgacatacccagccaaagccaagggcacattcatcgcagacagccaccagaacttcgccttgttcttccagctggtagatgtgaacactggtgctgaactcactcctcaccagacatttgtccgactccataaccagaagactggccaggaagtggtgtttgttgccgagccagacaacaagaacgtgtacaagtttgaactggatacctctgaaagaaagattgaatttgactctgcctctggcacctacactctctacttaatcattggagatgccactttgaagaacccaatcctctggaatgtggctgatgtggtcatcaagttccctgaggaagaagctccctcgactgtcttgtcccagaaccttttcactccaaaacaggaaattcagcacctgttccgcgagcctgagaagaggccccccaccgtggtgtccaatacattcactgccctgatcctctcgccgttgcttctgctcttcgctctgtggatccggattggtgccaatgtctccaacttcacttttgctcctagcacgattatatttcacctgggacatgctgctatgctgggactcatgtatgtctactggactcagctcaacatgttccagaccttgaagtacctggccatcttgggcagtgtgacgtttctggctggcaatcggatgctggcccagcaggcagtcaagagaacagcacattagttccagaagaaagatggaaattctgaaaactgaatgtcaagaaaaggagtcaagaacaattcacagtatgagaagaaaaatggaaaaaaaaaactttatttaaaaaagaaaaaagtccagattgtagttatacttttgcttgtttttcagtttccccaacacacagcagatacctggtgagctcagatagtctctttctctgacactgtgtaagaagctgtgaatattcctaacttacccagatgttgcttttgaaaagttgaaatgtgtaattgttttggaataaagagggtaacaataggaaaaaaaaaaaaaaaaaaaaaaaaaaaaaaaacaaaaaaaaaaaaacaaaacaacaaaaacaaaaaaaaaacaaaaaaaaaaaaaaaaaaaagaaaaacgtaggggagagcgcagcgcacggcgcgcggcgagagaagacagttgaacacacaccgcgccgtggggggcggcgccgcccgacaggagaggagcacacagcagccgcgaaaaaggcagcacgacgagggaaccacaagacgggcacaaccaacagagggcgagggtagcaacacacacaataaaaaacaccccgccggcggcgaccaaaacggagggcaaagaaacaaccaccagacgaagatcaacggagagaaaaagcgggggccccc

SEQ ID NO: 377746 - DNA, 2601 bp, Homo sapiens
ccaactaaggctagtacgaggcgggtgttaatcggccgagggagagcgggtctgtcctcgggaactgcaaggccctgtgagcgggaggactgggatcccggccgcggctgctggaagcgtcgaagctcagcggggccgcggacactgacctgtgcttagaactcatcctggcccgcagagcctgccgcgagtccctggcgtcccctgtggcgggctcttggagccactttcccgagcggaagtcagcccgcggctcggactccggcgggacctgctcggaggaatggcgccgccgggttcaagcactgtcttcctgttggccctgacaatcatagccagcacctgggctctgacgcccactcactacctcaccaagcatgacgtggagagactaaaagcctcgctggatcgccctttcacaaatttggaatctgccttctactccatcgtgggactcagcagccttggtgctcaggtgccagatgcaaagaaagcatgtacctacatcagatctaaccttgatcccagcaatgtggattccctcttctacgctgcccaggccagccaggccctctcaggatgtgagatctctatttcaaatgagaccaaagatctgcttctggcagctgtcagtgaggactcatctgttacccagatctaccatgcagttgcagctctaagtggctttggccttcccttggcatcccaagaagcactcagtgcccttactgctcgtctcagcaaggaggagactgtgctggcaacagtccaggctctgcagacagcatcccacctgtcccagcaggctgacctgaggagcatcgtggaggagattgaggaccttgttgctcgcctggatgaactcgggggcgtgtatctccagtttgaagaaggactggaaacaacagcgttatttgtggctgccacctacaagctcatggatcatgtggggactgagccatccattaaggaggatcaggtcatccagctgatgaacgcgatcttcagcaagaagaactttgagtccctctccgaagccttcagcgtggcctctgcagctgctgtgctctcgcataatcgctaccacgtgccagttgtggttgtgcctgagggctctgcttccgacactcatgaacaggctatcttgcggttgcaagtcaccaatgttctgtctcagcctctgactcaggccactgttaaactagaacatgctaaatctgttgcttccagagccactgtcctccagaagacatccttcacccctgtaggggatgtttttgaactaaatttcatgaacgtcaaattttccagtggttattatgacttccttgtcgaagttgaaggtgacaaccggtatattgcaaataccgtagagctcagagtcaagatctccactgaagttggcatcacaaatgttgatctttccaccgtggataaggatcagagcattgcacccaaaactacccgggtgacatacccagccaaagccaagggcacattcatcgcagacagccaccagaacttcgccttgttcttccagctggtagatgtgaacactggtgctgaactcactcctcaccagacatttgtccgactccataaccagaagactggccaggaagtggtgtttgttgccgagccagacaacaagaacgtgtacaagtttgaactggatacctctgaaagaaagattgaatttgactctgcctctggcacctacactctctacttaatcattggagatgccactttgaagaacccaatcctctggaatgtggctgatgtggtcatcaagttccctgaggaagaagctccctcgactgtcttgtcccagaaccttttcactccaaaacaggaaattcagcacctgttccgcgagcctgagaagaggccccccaccgtggtgtccaatacattcactgccctgatcctctcgccgttgcttctgctcttcgctctgtggatccggattggtgccaatgtctccaacttcacttttgctcctagcacgattatatttcacctgggacatgctgctatgctgggactcatgtatgtctactggactcagctcaacatgttccagaccttgaagtacctggccatcttgggcagtgtgacgtttctggctggcaatcggatgctggcccagcaggcagtcaagagaacagcacattagttccagaagaaagatggaaattctgaaaactgaatgtcaagaaaaggagtcaagaacaattcacagtatgagaagaaaaaaaaaacaaaaaaaaaaaaacaaaacaacaaaaacaaaaaaaaaacaaaaaaaaaaaaaaaaaaaagaaaaacgtaggggagagcgcagcgcacggcgcgcggcgagagaagacagttgaacacacaccgcgccgtggggggcggcgccgcccgacaggagaggagcacacagcagccgcgaaaaaggcagcacgacgagggaaccacaagacgggcacaaccaacagagggcgagggtagcaacacacacaataaaaaacaccccgccggcggcgaccaaaacggagggcaaagaaacaaccaccagacgaagatcaacggagagaaaaagcgggggccccc

SEQ ID NO: 377747 - DNA, 2531 bp, Homo sapiens
ccaactaaggctagtacgaggcgggtgttaatcggccgagggagagcgggtctgtcctcgggaactgcaaggccctgtgagcgggaggactgggatcccggccgcggctgctggaagcgtcgaagctcagcggggccgcggacactgacctgtgcttagaactcatcctggcccgcagagcctgccgcgagtccctggcgtcccctgtggcgggctcttggagccactttcccgagcggaagtcagcccgcggctcggactccggcgggacctgctcggaggaatggcgccgccgggttcaagcactgtcttcctgttggccctgacaatcatagccagcacctgggctctgacgcccactcactacctcaccaagcatgacgtggagagactaaaagcctcgctggatcgccctttcacaaatttggaatctgccttctactccatcgtgggactcagcagccttggtgctcaggtgccagatgcaaagaaagcatgtacctacatcagatctaaccttgatcccagcaatgtggattccctcttctacgctgcccaggccagccaggccctctcaggatgtgagatctctatttcaaatgagaccaaagatctgcttctggcagctgtcagtgaggactcatctgttacccagatctaccatgcagttgcagctctaagtggctttggccttcccttggcatcccaagaagcactcagtgcccttactgctcgtctcagcaaggaggagactgtgctggcaacagtccaggctctgcagacagcatcccacctgtcccagcaggctgacctgaggagcatcgtggaggagattgaggaccttgttgctcgcctggatgaactcgggggcgtgtatctccagtttgaagaaggactggaaacaacagcgttatttgtggctgccacctacaagctcatggatcatgtggggactgagccatccattaaggaggatcaggtcatccagctgatgaacgcgatcttcagcaagaagaactttgagtccctctccgaagccttcagcgtggcctctgcagctgctgtgctctcgcataatcgctaccacgtgccagttgtggttgtgcctgagggctctgcttccgacactcatgaacaggctatcttgcggttgcaagtcaccaatgttctgtctcagcctctgactcaggccactgttaaactagaacatgctaaatctgttgcttccagagccactgtcctccagaagacatccttcacccctgtaggggatgtttttgaactaaatttcatgaacgtcaaattttccagtggttattatgacttccttgtcgaagttgaaggtgacaaccggtatattgcaaataccgtagagctcagagtcaagatctccactgaagttggcatcacaaatgttgatctttccaccgtggataaggatcagagcattgcacccaaaactacccgggtgacatacccagccaaagccaagggcacattcatcgcagacagccaccagaacttcgccttgttcttccagctggtagatgtgaacactggtgctgaactcactcctcaccagacatttgtccgactccataaccagaagactggccaggaagtggtgtttgttgccgagccagacaacaagaacgtgtacaagtttgaactggatacctctgaaagaaagattgaatttgactctgcctctggcacctacactctctacttaatcattggagatgccactttgaagaacccaatcctctggaatgtggctgatgtggtcatcaagttccctgaggaagaagctccctcgactgtcttgtcccagaaccttttcactccaaaacaggaaattcagcacctgttccgcgagcctgagaagaggccccccaccgtggtgtccaatacattcactgccctgatcctctcgccgttgcttctgctcttcgctctgtggatccggattggtgccaatgtctccaacttcacttttgctcctagcacgattatatttcacctgggacatgctgctatgctgggactcatgtatgtctactggactcagctcaacatgttccagaccttgaagtacctggccatcttgggcagtgtgacgtttctggctggcaatcggatgctggcccagcaggcagtcaagaggatcgctgcagagcagagcagtagattggcaaaatataggacactacgaacagcacattagttccagaagaaagatggaaattctgaaaactgaatgtcaagaaaaggagtcaagaacaattcacagtatgagaagaaaaatggaaaaaaaaaactttatttaaaaaagaaaaaagtccagattgtagttatacttttgcttgtttttcagtttccccaacacacagcagatacctggtgagctcagatagtctctttctctgacactgtgtaagaagctgtgaatattcctaacttacccagatgttgcttttgaaaagttgaaatgtgtaattgttttggaataaagagggtaacaataggaa

SEQ ID NO: 377748 - DNA, 2387 bp, Homo sapiens
ccaactaaggctagtacgaggcgggtgttaatcggccgagggagagcgggtctgtcctcgggaactgcaaggccctgtgagcgggaggactgggatcccggccgcggctgctggaagcgtcgaagctcagcggggccgcggacactgacctgtgcttagaactcatcctggcccgcagagcctgccgcgagtccctggcgtcccctgtggcgggctcttggagccactttcccgagcggaagtcagcccgcggctcggactccggcgggacctgctcggaggaatggcgccgccgggttcaagcactgtcttcctgttggccctgacaatcatagccagcacctgggctctgacgcccactcactacctcaccaagcatgacgtggagagactaaaagcctcgctggatcgccctttcacaaatttggaatctgccttctactccatcgtgggactcagcagccttggtgctcaggtgccagatgcaaagatctctatttcaaatgagaccaaagatctgcttctggcagctgtcagtgaggactcatctgttacccagatctaccatgcagttgcagctctaagtggctttggccttcccttggcatcccaagaagcactcagtgcccttactgctcgtctcagcaaggaggagactgtgctggcaacagtccaggctctgcagacagcatcccacctgtcccagcaggctgacctgaggagcatcgtggaggagattgaggaccttgttgctcgcctggatgaactcgggggcgtgtatctccagtttgaagaaggactggaaacaacagcgttatttgtggctgccacctacaagctcatggatcatgtggggactgagccatccattaaggaggatcaggtcatccagctgatgaacgcgatcttcagcaagaagaactttgagtccctctccgaagccttcagcgtggcctctgcagctgctgtgctctcgcataatcgctaccacgtgccagttgtggttgtgcctgagggctctgcttccgacactcatgaacaggctatcttgcggttgcaagtcaccaatgttctgtctcagcctctgactcaggccactgttaaactagaacatgctaaatctgttgcttccagagccactgtcctccagaagacatccttcacccctgtaggggatgtttttgaactaaatttcatgaacgtcaaattttccagtggttattatgacttccttgtcgaagttgaaggtgacaaccggtatattgcaaataccgtagagctcagagtcaagatctccactgaagttggcatcacaaatgttgatctttccaccgtggataaggatcagagcattgcacccaaaactacccgggtgacatacccagccaaagccaagggcacattcatcgcagacagccaccagaacttcgccttgttcttccagctggtagatgtgaacactggtgctgaactcactcctcaccagacatttgtccgactccataaccagaagactggccaggaagtggtgtttgttgccgagccagacaacaagaacgtgtacaagtttgaactggatacctctgaaagaaagattgaatttgactctgcctctggcacctacactctctacttaatcattggagatgccactttgaagaacccaatcctctggaatgtggctgatgtggtcatcaagttccctgaggaagaagctccctcgactgtcttgtcccagaaccttttcactccaaaacaggaaattcagcacctgttccgcgagcctgagaagaggccccccaccgtggtgtccaatacattcactgccctgatcctctcgccgttgcttctgctcttcgctctgtggatccggattggtgccaatgtctccaacttcacttttgctcctagcacgattatatttcacctgggacatgctgctatgctgggactcatgtatgtctactggactcagctcaacatgttccagaccttgaagtacctggccatcttgggcagtgtgacgtttctggctggcaatcggatgctggcccagcaggcagtcaagagaacagcacattagttccagaagaaagatggaaattctgaaaactgaatgtcaagaaaaggagtcaagaacaattcacagtatgagaagaaaaatggaaaaaaaaaactttatttaaaaaagaaaaaagtccagattgtagttatacttttgcttgtttttcagtttccccaacacacagcagatacctggtgagctcagatagtctctttctctgacactgtgtaagaagctgtgaatattcctaacttacccagatgttgcttttgaaaagttgaaatgtgtaattgttttggaataaagagggtaacaataggaa

SEQ ID NO: 377749 - DNA, 2404 bp, Homo sapiens
ccaactaaggctagtacgaggcgggtgttaatcggccgagggagagcgggtctgtcctcgggaactgcaaggccctgtgagcgggaggactgggatcccggccgcggctgctggaagcgtcgaagctcagcggggccgcggacactgacctgtgcttagaactcatcctggcccgcagagcctgccgcgagtccctggcgtcccctgtggcgggctcttggagccactttcccgagcggaagtcagcccgcggctcggactccggcgggacctgctcggaggaatggcgccgccgggttcaagcactgtcttcctgttggccctgacaatcatagccagcacctgggctctgacgcccactcactacctcaccaagcatgacgtggagagactaaaagcctcgctggatcgccctttcacaaatttggaatctgccttctactccatcgtgggactcagcagccttggtgctcaggtgccagatgcaaagaaagcatgtacctacatcagatctaaccttgatcccagcaatgtggattccctcttctacgctgcccaggccagccaggccctctcaggatgtgagatctctatttcaaatgagaccaaagatctgcttctggcagctgtcagtgaggactcatctgttacccagatctaccatgcagttgcagctctaagtggctttggccttcccttggcatcccaagaagcactcagtgcccttactgctcgtctcagcaaggaggagactgtgctggcaacagtccaggctctgcagacagcatcccacctgtcccagcaggctgacctgaggagcatcgtggaggagattgaggaccttgttgctcgcctggatgaactcgggggcgtgtatctccagtttgaagaaggactggaaacaacagcgttatttgtggctgccacctacaagctcatggatcatgtggggactgagccatccattaaggaggatcaggtcatccagctgatgaacgcgatcttcagcaagaagaactttgagtccctctccgaagccttcagcgtggcctctgcagctgctgtgctctcgcataatcgctaccacgtgccagttgtggttgtgcctgagggctctgcttccgacactcatgaacaggctatcttgcggttgcaagtcaccaatgttctgtctcagcctctgactcaggccactgttaaactagaacatgctaaatctgttgcttccagagccactgtcctccagaagacatccttcacccctgtaggggatgtttttgaactaaatttcatgaacgtcaaattttccagtggttattatgacttccttgtcgaagttgaaggtgacaaccggtatattgcaaataccgtagagctcagagtcaagatctccactgaagttggcatcacaaatgttgatctttccaccgtggataaggatcagagcattgcacccaaaactacccgggtgacatacccagccaaagccaagggcacattcatcgcagacagccaccagaacttcgccttgttcttccagctggtagatgtgaacactggtgctgaactcactcctcaccagacatttgtccgactccataaccagaagactggccaggaagtggtgtttgttgccgagccagacaacaagaacgtgtacaagtttgaactggatacctctgaaagaaagattgaatttgactctgcctctggcacctacactctctacttaatcattggagatgccactttgaagaacccaatcctctggaatgtggctgatgtggtcatcaagttccctgaggaagaagctccctcgactgtcttgtcccagaaccttttcactccaaaacaggaaattcagcacctgttccgcgagcctgagaagaggccccccaccgtggtgtccaatacattcactgccctgatcctctcgccgttgcttctgctcttcgctctgtggatccggattggtgccaatgtctccaacttcacttttgctcctagcacgattatatttcacctgggacatgctgctatgctgggactcatgtatgtctactggactcagctcaacatgttccagaccttgaagtacctggccatcttgggcagtgtgacgtttctggctggcaatcggatgctggcccagcaggcagtcaagagggtaaggccagacatgagccagggatctagagtagggttagaaatactcagctctgccggcctagctctttgaagggtaggtggcaaaatgatttgtgttcttaggggcaagtctgacaccctaatctagcccagtacagaagccagaagcactttgaagtcagaaaagagccttagtggtcagctttgaatgtattacaaccattgtaattgatgccccaatacaatagaatgagag

SEQ ID NO: 377750 - DNA, 2447 bp, Homo sapiens
ccaactaaggctagtacgaggcgggtgttaatcggccgagggagagcgggtctgtcctcgggaactgcaaggccctgtgagcgggaggactgggatcccggccgcggctgctggaagcgtcgaagctcagcggggccgcggacactgacctgtgcttagaactcatcctggcccgcagagcctgccgcgagtccctggcgtcccctgtggcgggctcttggagccactttcccgagcggaagtcagcccgcggctcggactccggcgggacctgctcggaggaatggcgccgccgggttcaagcactgtcttcctgttggccctgacaatcatagccagcacctgggctctgacgcccactcactacctcaccaagcatgacgtggagagactaaaagcctcgctggatcgccctttcacaaatttggaatctgccttctactccatcgtgggactcagcagccttggtgctcaggtgccagatgcaaagaaagcatgtacctacatcagatctaaccttgatcccagcaatgtggattccctcttctacgctgcccaggccagccaggccctctcaggatgtgagatctctatttcaaatgagaccaaagatctgcttctggcagctgtcagtgaggactcatctgttacccagatctaccatgcagttgcagctctaagtggctttggccttcccttggcatcccaagaagcactcagtgcccttactgctcgtctcagcaaggaggagactgtgctggcaacagtccaggctctgcagacagcatcccacctgtcccagcaggctgacctgaggagcatcgtggaggagattgaggaccttgttgctcgcctggatgaactcgggggcgtgtatctccagtttgaagaaggactggaaacaacagcgttatttgtggctgccacctacaagctcgatcaggtcatccagctgatgaacgcgatcttcagcaagaagaactttgagtccctctccgaagccttcagcgtggcctctgcagctgctgtgctctcgcataatcgctaccacgtgccagttgtggttgtgcctgagggctctgcttccgacactcatgaacaggctatcttgcggttgcaagtcaccaatgttctgtctcagcctctgactcaggccactgttaaactagaacatgctaaatctgttgcttccagagccactgtcctccagaagacatccttcacccctgtaggggatgtttttgaactaaatttcatgaacgtcaaattttccagtggttattatgacttccttgtcgaagttgaaggtgacaaccggtatattgcaaataccgtagagctcagagtcaagatctccactgaagttggcatcacaaatgttgatctttccaccgtggataaggatcagagcattgcacccaaaactacccgggtgacatacccagccaaagccaagggcacattcatcgcagacagccaccagaacttcgccttgttcttccagctggtagatgtgaacactggtgctgaactcactcctcaccagacatttgtccgactccataaccagaagactggccaggaagtggtgtttgttgccgagccagacaacaagaacgtgtacaagtttgaactggatacctctgaaagaaagattgaatttgactctgcctctggcacctacactctctacttaatcattggagatgccactttgaagaacccaatcctctggaatgtggctgatgtggtcatcaagttccctgaggaagaagctccctcgactgtcttgtcccagaaccttttcactccaaaacaggaaattcagcacctgttccgcgagcctgagaagaggccccccaccgtggtgtccaatacattcactgccctgatcctctcgccgttgcttctgctcttcgctctgtggatccggattggtgccaatgtctccaacttcacttttgctcctagcacgattatatttcacctgggacatgctgctatgctgggactcatgtatgtctactggactcagctcaacatgttccagaccttgaagtacctggccatcttgggcagtgtgacgtttctggctggcaatcggatgctggcccagcaggcagtcaagagaacagcacattagttccagaagaaagatggaaattctgaaaactgaatgtcaagaaaaggagtcaagaacaattcacagtatgagaagaaaaatggaaaaaaaaaactttatttaaaaaagaaaaaagtccagattgtagttatacttttgcttgtttttcagtttccccaacacacagcagatacctggtgagctcagatagtctctttctctgacactgtgtaagaagctgtgaatattcctaacttacccagatgttgcttttgaaaagttgaaatgtgtaattgttttggaataaagagggtaacaataggaa

SEQ ID NO: 377751 - DNA, 2387 bp, Homo sapiens
ccaactaaggctagtacgaggcgggtgttaatcggccgagggagagcgggtctgtcctcgggaactgcaaggccctgtgagcgggaggactgggatcccggccgcggctgctggaagcgtcgaagctcagcggggccgcggacactgacctgtgcttagaactcatcctggcccgcagagcctgccgcgagtccctggcgtcccctgtggcgggctcttggagccactttcccgagcggaagtcagcccgcggctcggactccggcgggacctgctcggaggaatggcgccgccgggttcaagcactgtcttcctgttggccctgacaatcatagccagcacctgggctctgacgcccactcactacctcaccaagcatgacgtggagagactaaaagcctcgctggatcgccctttcacaaatttggaatctgccttctactccatcgtgggactcagcagccttggtgctcaggtgccagatgcaaagaaagcatgtacctacatcagatctaaccttgatcccagcaatgtggattccctcttctacgctgcccaggccagccaggccctctcaggatgtgagatctctatttcaaatgagaccaaagatctgcttctggcagctgtcagtgaggactcatctgttacccagatctaccatgcagttgcagctctaagtggctttggccttcccttggcatcccaagaagcactcagtgcccttactgctcgtctcagcaaggaggagactgtgctggcaacagtccaggctctgcagacagcatcccacctgtcccagcaggctgacctgaggagcatcgtggaggagattgaggaccttgttgctcgcctggatgaactcgggggcgtgtatctccagtttgaagaaggactggaaacaacagcgttatttgtggctgccacctacaagctcatggatcatgtggggactgagccatccattaaggaggatcaggtcatccagctgatgaacgcgatcttcagcaagaagaactttgagtccctctccgaagccttcagcgtggcctctgcagctgctgtgctctcgcataatcgctaccacgtgccagttgtggttgtgcctgagggctctgcttccgacactcatgaacaggctatcttgcggttgcaagtcaccaatgttctgtctcagcctctgactcaggccactgttaaactagaacatgctaaatctgttgcttccagagccactgtcctccagaagacatccttcacccctgtaggggatgtttttgaactaaatttcatgaacgtcaaattttccagtggttattatgacttccttgtcgaagttgaaggtgacaaccggtatattgcaaataccgtagagctcagagtcaagatctccactgaagttggcatcacaaatgttgatctttccaccgtggataaggatcagagcattgcacccaaaactacccgggtgacatacccagccaaagccaagggcacattcatcgcagacagccaccagaacttcgccttgttcttccagctggtagatgtgaacactggtgctgaactcactcctcaccagacatttgtccgactccataaccagaagactggccaggaagtggtgtttgttgccgagccagacaacaagaacgtgtacaagtttgaactggatacctctgaaagaaagattgaatttgactctgcctctggcacctacactctctacttaatcattggagatgccactttgaagaacccaatcctctggaatgtggctgatgtggtcatcaagttccctgaggaagaagctccctcgactgtcttgtcccagaaccttttcactccaaaacaggaaattcagtggatccggattggtgccaatgtctccaacttcacttttgctcctagcacgattatatttcacctgggacatgctgctatgctgggactcatgtatgtctactggactcagctcaacatgttccagaccttgaagtacctggccatcttgggcagtgtgacgtttctggctggcaatcggatgctggcccagcaggcagtcaagagaacagcacattagttccagaagaaagatggaaattctgaaaactgaatgtcaagaaaaggagtcaagaacaattcacagtatgagaagaaaaatggaaaaaaaaaactttatttaaaaaagaaaaaagtccagattgtagttatacttttgcttgtttttcagtttccccaacacacagcagatacctggtgagctcagatagtctctttctctgacactgtgtaagaagctgtgaatattcctaacttacccagatgttgcttttgaaaagttgaaatgtgtaattgttttggaataaagagggtaacaataggaa

SEQ ID NO: 377752 - DNA, 2307 bp, Homo sapiens
ccaactaaggctagtacgaggcgggtgttaatcggccgagggagagcgggtctgtcctcgggaactgcaaggccctgtgagcgggaggactgggatcccggccgcggctgctggaagcgtcgaagctcagcggggccgcggacactgacctgtgcttagaactcatcctggcccgcagagcctgccgcgagtccctggcgtcccctgtggcgggctcttggagccactttcccgagcggaagtcagcccgcggctcggactccggcgggacctgctcggaggaatggcgccgccgggttcaagcactgtcttcctgttggccctgacaatcatagccagcacctgggctctgacgcccactcactacctcaccaagcatgacgtggagagactaaaagcctcgctggatcgccctttcacaaatttggaatctgccttctactccatcgtgggactcagcagccttggtgctcaggtgccagatgcaaagaaagcatgtacctacatcagatctaaccttgatcccagcaatgtggattccctcttctacgctgcccaggccagccaggccctctcaggatgtgagaacagtccaggctctgcagacagcatcccacctgtcccagcaggctgacctgaggagcatcgtggaggagattgaggaccttgttgctcgcctggatgaactcgggggcgtgtatctccagtttgaagaaggactggaaacaacagcgttatttgtggctgccacctacaagctcatggatcatgtggggactgagccatccattaaggaggatcaggtcatccagctgatgaacgcgatcttcagcaagaagaactttgagtccctctccgaagccttcagcgtggcctctgcagctgctgtgctctcgcataatcgctaccacgtgccagttgtggttgtgcctgagggctctgcttccgacactcatgaacaggctatcttgcggttgcaagtcaccaatgttctgtctcagcctctgactcaggccactgttaaactagaacatgctaaatctgttgcttccagagccactgtcctccagaagacatccttcacccctgtaggggatgtttttgaactaaatttcatgaacgtcaaattttccagtggttattatgacttccttgtcgaagttgaaggtgacaaccggtatattgcaaataccgtagagctcagagtcaagatctccactgaagttggcatcacaaatgttgatctttccaccgtggataaggatcagagcattgcacccaaaactacccgggtgacatacccagccaaagccaagggcacattcatcgcagacagccaccagaacttcgccttgttcttccagctggtagatgtgaacactggtgctgaactcactcctcaccagacatttgtccgactccataaccagaagactggccaggaagtggtgtttgttgccgagccagacaacaagaacgtgtacaagtttgaactggatacctctgaaagaaagattgaatttgactctgcctctggcacctacactctctacttaatcattggagatgccactttgaagaacccaatcctctggaatgtggctgatgtggtcatcaagttccctgaggaagaagctccctcgactgtcttgtcccagaaccttttcactccaaaacaggaaattcagcacctgttccgcgagcctgagaagaggccccccaccgtggtgtccaatacattcactgccctgatcctctcgccgttgcttctgctcttcgctctgtggatccggattggtgccaatgtctccaacttcacttttgctcctagcacgattatatttcacctgggacatgctgctatgctgggactcatgtatgtctactggactcagctcaacatgttccagaccttgaagtacctggccatcttgggcagtgtgacgtttctggctggcaatcggatgctggcccagcaggcagtcaagagaacagcacattagttccagaagaaagatggaaattctgaaaactgaatgtcaagaaaaggagtcaagaacaattcacagtatgagaagaaaaatggaaaaaaaaaactttatttaaaaaagaaaaaagtccagattgtagttatacttttgcttgtttttcagtttccccaacacacagcagatacctggtgagctcagatagtctctttctctgacactgtgtaagaagctgtgaatattcctaacttacccagatgttgcttttgaaaagttgaaatgtgtaattgttttggaataaagagggtaacaataggaa

SEQ ID NO: 377753 - DNA, 2053 bp, Homo sapiens
ccaactaaggctagtacgaggcgggtgttaatcggccgagggagagcgggtctgtcctcgggaactgcaaggccctgtgagcgggaggactgggatcccggccgcggctgctggaagcgtcgaagctcagcggggccgcggacactgacctgtgcttagaactcatcctggcccgcagagcctgccgcgagtccctggcgtcccctgtggcgggctcttggagccactttcccgagcggaagtcagcccgcggctcggactccggcgggacctgctcggaggaatggcgccgccgggttcaagcactgtcttcctgttggccctgacaatcatagccagcacctgggctctgacgcccactcactacctcaccaagcatgacgtggagagactaaaagcctcgctggatcgccctttcacaaatttggaatctgccttctactccatcgtgggactcagcagccttggtgctcaggtgccagatgcaaagaaagcatgtacctacatcagatctaaccttgatcccagcaatgtggattccctcttctacgctgcccaggccagccaggccctctcaggatgtgagatctctatttcaaatgagaccaaagatctgcttctggcagctgtcagtgaggactcatctgttacccagatctaccatgcagttgcagctctaagtggctttggccttcccttggcatcccaagaagcactcagtgcccttactgctcgtctcagcaaggaggagactgtgctggcaacagtccaggctctgcagacagcatcccacctgtcccagcaggctgacctgaggagcatcgtggaggagattgaggaccttgttgctcgcctggatgaactcgggggcgtgtatctccagtttgaagaaggactggaaacaacagcgttatttgtggctgccacctacaagctcatggatcatgtggggactgagccatccattaaggaggatcaggtcatccagctgatgaacgcgatcttcagcaagaagaactttgagtccctctccgaagccttcagcgtggcctctgcagctgctgtgctctcgcataatcgctaccacgtgccagttgtggttgtgcctgagggctctgcttccgacactcatgaacaggctatcttgcggttgcaagtcaccaatgttctgtctcagcctctgactcaggccactgttaaactagaacatgctaaatctgttgcttccagagccactgtcctccagaagacatccttcacccctgtaggggatgtttttgaactaaatttcatgaacgtcaaattttccagtggttattatgacttccttgtcgaagttgaaggtgacaaccggtatattgcaaataccgtagagctcagagtcaagatctccactgaagttggcatcacaaatgttgatctttccaccgtggataaggatcagagcattgcacccaaaactacccgggtgacatacccagccaaagccaagggcacattcatcgcagacagccaccagaacttcgcctttggatccggattggtgccaatgtctccaacttcacttttgctcctagcacgattatatttcacctgggacatgctgctatgctgggactcatgtatgtctactggactcagctcaacatgttccagaccttgaagtacctggccatcttgggcagtgtgacgtttctggctggcaatcggatgctggcccagcaggcagtcaagagaacagcacattagttccagaagaaagatggaaattctgaaaactgaatgtcaagaaaaggagtcaagaacaattcacagtatgagaagaaaaatggaaaaaaaaaactttatttaaaaaagaaaaaagtccagattgtagttatacttttgcttgtttttcagtttccccaacacacagcagatacctggtgagctcagatagtctctttctctgacactgtgtaagaagctgtgaatattcctaacttacccagatgttgcttttgaaaagttgaaatgtgtaattgttttggaataaagagggtaacaataggaa

SEQ ID NO: 377754 - DNA, 1826 bp, Homo sapiens
ccaactaaggctagtacgaggcgggtgttaatcggccgagggagagcgggtctgtcctcgggaactgcaaggccctgtgagcgggaggactgggatcccggccgcggctgctggaagcgtcgaagctcagcggggccgcggacactgacctgtgcttagaactcatcctggcccgcagagcctgccgcgagtccctggcgtcccctgtggcgggctcttggagccactttcccgagcggaagtcagcccgcggctcggactccggcgggacctgctcggaggaatggcgccgccgggttcaagcactgtcttcctgttggccctgacaatcatagccagcacctgggctctgacgcccactcactacctcaccaagcatgacgtggagagactaaaagcctcgctggatcgccctttcacaaatttggaatctgccttctactccatcgtgggactcagcagccttggtgctcaggtgccagatgcaaagaaagcatgtacctacatcagatctaaccttgatcccagcaatgtggattccctcttctacgctgcccaggccagccaggccctctcaggatgtgagatctctatttcaaatgagaccaaagatctgcttctggcagctgtcagtgaggactcatctgttacccagatctaccatgcagttgcagctctaagtggctttggccttcccttggcatcccaagaagcactcagtgcccttactgctcgtctcagcaaggaggagactgtgctggcaacagtccaggctctgcagacagcatcccacctgtcccagcaggctgacctgaggagcatcgtggaggagattgaggaccttgttgctcgcctggatgaactcgggggcgtgtatctccagtttgaagaaggactggaaacaacagcgttatttgtggctgccacctacaagctcatggatcatgtggggactgagccatccattaaggaggatcaggtcatccagctgatgaacgcgatcttcagcaagaagaactttgagtccctctccgaagccttcagcgtggcctctgcagctgctgtgctctcgcataatcgctaccacgtgccagttgtggttgtgcctgagggctctgcttccgacactcatgaacaggctatcttgcggttgcaagtcaccaatgttctgtctcagcctctgactcaggccactgttaaactagaacatgctaaatctgttgcttccagagccactgtcctccagaagacatccttcacccctgtaggggatgtttttgaactaaatttcatgaacgtcaaattttccagtggttattatgacttccttgtcgaagttgaaggtgacaaccggtatattgcaaataccgtagagctcagagtcaagatctccactgaagttggcatcacaaatgttgatctttccaccgtggataaggatcagagcattgcacccaaaactacccgggtgacatacccagccaaagccaagggcacattcatcgcagacagccaccagaacttcgccttgttcttccagctggtagatgtgaacactggtgctgaactcactcctcaccagcaaggagcattttgtcccgacttcccattaaccaggaaagaactgcgccagggacaggtgggtgttatggtaggccggaggccaagacgaacaacgaaacgtttgtaccacacgtttcgaaccttgggagatacgcgtcttgcagagcaaacgatttgcagttttggaactctttgccgtcttgggagccttaaaatcttacacgtttactcatcggagtatggcacacttgagagagaacgca

SEQ ID NO: 377755 - DNA, 1546 bp, Homo sapiens
ccaactaaggctagtacgaggcgggtgttaatcggccgagggagagcgggtctgtcctcgggaactgcaaggccctgtgagcgggaggactgggatcccggccgcggctgctggaagcgtcgaagctcagcggggccgcggacactgacctgtgcttagaactcatcctggcccgcagagcctgccgcgagtccctggcgtcccctgtggcgggctcttggagccactttcccgagcggaagtcagcccgcggctcggactccggcgggacctgctcggaggaatggcgccgccgggttcaagcactgtcttcctgttggccctgacaatcatagccagcacctgggctctgacgcccactcactacctcaccaagcatgacgtggagagactaaaagcctcgctggatcgccctttcacaaatttggaatctgccttctactccatcgtgggactcagcagccttggtgctcaggtgccagatgcaaagaaagcatgtacctacatcagatctaaccttgatcccagcaatgtggattccctcttctacgctgcccaggccagccaggccctctcaggatgtgagatctctatttcaaatgagaccaaagatctgcttctggcagctgtcagtgaggactcatctgttacccagatctaccatgcagttgcagctctaagtggctttggccttcccttggcatcccaagaagcactcagtgcccttactgctcgtctcagcaaggaggagactgtgctggcaacagtccaggctctgcagacagcatcccacctgtcccagcaggctgacctgaggagcatcgtggaggagattgaggaccttgttgctcgcctggatgaactcgggggcgtgtatctccagtttgaagaaggactggaaacaacagcgttatttgtggctgccacctacaagctcatggatcatgtggggactgagccatccattaaggaggatcaggtcatccagctgatgaacgcgatcttcagcaagaagaactttgagtccctctccgaagccttcagcgtggcctctgcagctgctgtgctctcgcataatcgctaccacgtgccagttgtggttgtgcctgagggctctgcttccgacactcatgaacaggctatcttgcggttgcaagtcaccaatgttctgtctcagcctctgactcaggccactgttaaactagaacatgctaaatctgttgcttccagagccactgtcctccagaagacatccttcacccctgtaggggatgtttttgaactaaatttcatgaacgtcaaattttccagtggttattatgacttccttgtcgaagttgaaggtgacaaccggtatattgcaaataccgtagagctcagagtcaagatctccactgaagttggcatcacaaatgttgatctttccaccgtggataaggatcagagcattgcacccaaaactacccggtgacataccagcaagcagggcgatcaagcgaaagccacagaacttgcagtctcccggcgtatgaacgggggacaaccc

SEQ ID NO: 377756 - DNA, 1606 bp, Homo sapiens
  misc_feature (1477)..(1477): n is a, c, g, or t
  misc_feature (1488)..(1489): n is a, c, g, or t
  misc_feature (1491)..(1491): n is a, c, g, or t
  misc_feature (1493)..(1493): n is a, c, g, or t
  misc_feature (1499)..(1499): n is a, c, g, or t
  misc_feature (1506)..(1506): n is a, c, g, or t
ccaactaaggctagtacgaggcgggtgttaatcggccgagggagagcgggtctgtcctcgggaactgcaaggccctgtgagcgggaggactgggatcccggccgcggctgctggaagcgtcgaagctcagcggggccgcggacactgacctgtgcttagaactcatcctggcccgcagagcctgccgcgagtccctggcgtcccctgtggcgggctcttggagccactttcccgagcggaagtcagcccgcggctcggactccggcgggacctgctcggaggaatggcgccgccgggttcaagcactgtcttcctgttggccctgacaatcatagccagcacctgggctctgacgcccactcactacctcaccaagcatgacgtggagagactaaaagcctcgctggatcgccctttcacaaatttggaatctgccttctactccatcgtgggactcagcagccttggtgctcaggtgccagatgcaaagaaagcatgtacctacatcagatctaaccttgatcccagcaatgtggattccctcttctacgctgcccaggccagccaggccctctcaggatgtgagatctctatttcaaatgagaccaaagatctgcttctggcagctgtcagtgaggactcatctgttacccagatctaccatgcagttgcagctctaagtggctttggccttcccttggcatcccaagaagcactcagtgcccttactgctcgtctcagcaaggaggagactgtgctggcaacagtccaggctctgcagacagcatcccacctgtcccagcaggctgacctgaggagcatcgtggaggagattgaggaccttgttgctcgcctggatgaactcgggggcgtgtatctccagtttgaagaaggactggaaacaacagcgttatttgtggctgccacctacaagctcatggatcatgtggggactgagccatccattaaggaggatcaggtcatccagctgatgaacgcgatcttcagcaagaagaactttgagtccctctccgaagccttcagcgtggcctctgcagctgctgtgctctcgcataatcgctaccacgtgccagttgtggttgtgcctgagggctctgcttccgacactcatgaacaggctatcttgcggttgcaagtcaccaatgttctgtctcagcctctgactcaggccactgttaaactagaacatgctaaatctgttgcttccagagccactgtcctccagaagacatccttcacccctgtaggggatgtttttgaactaaatttcatgaacgtcaaattttccagtggttattatgacttccttgtcgaagttgaaggtgacaaccggtatattgcaaataccgtagagctcagagtcaagatctccactgaagttggcatcacaaatgttgatctttccaccgtggataaggatcagagcattgcacccaaaactacccggtgaataccngcaagcagggnntntnggaagnccagaantgccgtttcacgggagttaccggggggccccccacaatgcgcctctccaaagcgctggttttctcgcacaaagcttcggggtcccaaaagtgcctaccca

SEQ ID NO: 377757 - DNA, 1259 bp, Homo sapiens
  misc_feature (17)..(17): n is a, c, g, or t
  misc_feature (21)..(21): n is a, c, g, or t
  misc_feature (38)..(38): n is a, c, g, or t
cgagctcgataccctanctgngaaagacatccttaccnctgtaggggatgtttttgaactaaatttcatgaacgtcaaattttccagtggttattatgacttccttgtcgaagttgaaggtgacaaccggtatattgcaaataccgtagagctcagagtcaagatctccactgaagttggcatcacaaatgttgatctttccaccgtggataaggatcagagcattgcacccaaaactacccgggtgacatacccagccaaagccaagggcacattcatcgcagacagccaccagaacttcgccttgttcttccagctggtagatgtgaacactggtgctgaactcactcctcaccagacatttgtccgactccataaccagaagactggccaggaagtggtgtttgttgccgagccagacaacaagaacgtgtacaagtttgaactggatacctctgaaagaaagattgaatttgactctgcctctggcacctacactctctacttaatcattggagatgccactttgaagaacccaatcctctggaatgtggctgatgtggtcatcaagttccctgaggaagaagctccctcgactgtcttgtcccagaaccttttcactccaaaacaggaaattcagcacctgttccgcgagcctgagaagaggccccccaccgtggtgtccaatacattcactgccctgatcctctcgccgttgcttctgctcttcgctctgtggatccggattggtgccaatgtctccaacttcacttttgctcctagcacgattatatttcacctgggacatgctgctatgctgggactcatgtatgtctactggactcagctcaacatgttccagaccttgaagtacctggccatcttgggcagtgtgacgtttctggctggcaatcggatgctggcccagcaggcagtcaagagaacagcacattagttccagaagaaagatggaaattctgaaaactgaatgtcaagaaaaggagtcaagaacaattcacagtatgagaagaaaaatggaaaaaaaaaactttatttaaaaaagaaaaaagtccagattgtagttatacttttgcttgtttttcagtttccccaacacacagcagatacctggtgagctcagatagtctctttctctgacactgtgtaagaagctgtgaatattcctaacttacccagatgttgcttttgaaaagttgaaatgtgtaattgttttggaataaagagggtaacaataggaa

SEQ ID NO: 377758 - DNA, 1237 bp, Homo sapiens
ccaactaaggctagtacgaggcgggtgttaatcggccgagggagagcgggtctgtcctcgggaactgcaaggccctgtgagcgggaggactgggatcccggccgcggctgctggaagcgtcgaagctcagcggggccgcggacactgacctgtgcttagaactcatcctggcccgcagagcctgccgcgagtccctggcgtcccctgtggcgggctcttggagccactttcccgagcggaagtcagcccgcggctcggactccggcgggacctgctcggaggaatggcgccgccgggttcaagcactgtcttcctgttggccctgacaatcatagccagcacctgggctctgacgcccactcactacctcaccaagcatgacgtggagagactaaaagcctcgctggatcgccctttcacaaatttggaatctgccttctactccatcgtgggactcagcagccttggtgctcaggtgccagatgcaaagaaagcatgtacctacatcagatctaaccttgatcccagcaatgtggattccctcttctacgctgcccaggccagccaggccctctcaggatgtgagatctctatttcaaatgagaccaaagatctgcttctggcagctgtcagtgaggactcatctgttacccagatctaccatgcagttgcagctctaagtggctttggccttcccttggcatcccaagaagctggatccggattggtgccaatgtctccaacttcacttttgctcctagcacgattatatttcacctgggacatgctgctatgctgggactcatgtatgtctactggactcagctcaacatgttccagaccttgaagtacctggccatcttgggcagtgtgacgtttctggctggcaatcggatgctggcccagcaggcagtcaagagaacagcacattagttccagaagaaagatggaaattctgaaaactgaatgtcaagaaaaggagtcaagaacaattcacagtatgagaagaaaaatggaaaaaaaaaactttatttaaaaaagaaaaaagtccagattgtagttatacttttgcttgtttttcagtttccccaacacacagcagatacctggtgagctcagatagtctctttctctgacactgtgtaagaagctgtgaatattcctaacttacccagatgttgcttttgaaaagttgaaatgtgtaattgttttggaataaagagggtaacaataggaa

SEQ ID NO: 377759 - DNA, 1214 bp, Homo sapiens
cccgcggggagtggaggccgcgggctctgagcggcccctgcccggatggcaacagtagttctaggaggagacaccatgggccctgagcgtatcttccccaatcagactgaggaactgggacatcagggcccttcagaaggcactggggattggagcagtgaggagcctgaggaagagcaggaggaaacggggtcgggcccagctggctactcctaccagcccctgaaccaagatcctgaacaagaggaggtggaactggcaccagtgggggatggagatgtagttgctgacatccaggatcgaatccaggccctggggcttcatttgccagacccaccattagagagtgaagatgaagatgaggagggagctacagcgttgaacaaccacagctctattcccatggacccagaacatgtagagctggtgaaaaggacaatggctggagtaagcctgcctgcgccaggggttcctgcctgggctcgggagatatcggatgcccagtgggaagatgtggtacagaaagccctccaagcccggcaggcatcccctgcctggaagtgaccacagtgagagctgccttatattcctacattccaggccagaaccagcacaggactgaacacatccctggttgtaatgtccatttccatcttccccgtctccctttccacatcaaggcacatcagacttctcagagacccactttattcagttctgtacatatggggacatcggtccaagcccaacccaccttagcatgtatcactctgtggagaataaagcaccctatgtacacagccaaaagccgcactgcctgcgcccctggaacctgggtccggccttcctcagcccctggcccctccaaggtacctataagggacaagagaaggcctgcccagcatagcacaaacaaggaaataaataggtgttggcaggagccatgcttggggcaccgctccctgcttccttctttctagttttgggaaccaacagcacagaaaagcagtcagccccagggtggtcccttccatgtctgtgaccccagggctgctgctcaccaaagacagggcacggggtagggtgtttattcatccctccccggccccacttggtccatctgggccctatattcatcagttattgtccacagcctatacttttctccttttgacctcccttggtcaggcatggggtaagaagaaataatacaa

SEQ ID NO: 377760 - DNA, 1214 bp, Homo sapiens
  misc_feature (11)..(11): n is a, c, g, or t
aattcggcacnaggggaggccgcggctctgagcgcccctgcccggatggcaacagtagttctaggaggagacaccatgggccctgagcgtatcttccccaatcagactgaggaactgggacatcagggcccttcagaaggcactggggattggagcagtgaggagcctgaggaagagcaggaggaaacggggtcgggcccagctggctactcctaccagcccctgaaccaagatcctgaacaagaggaggtggaactggcaccagtgggggatggagatgtagttgctgacatccaggatcgaatccaggccctggggcttcatttgccagacccaccattagagagtgaagatgaagatgaggagggagctacagcgttgaacaaccacagctctattcccatggacccagaacatgtagagctggtgaaaaggacaatggctggagtaagcctgcctgcgccaggggttcctgcctgggctcgggagatatcggatgcccagtgggaagatgtggtacagaaagccctccaagcccggcaggcatcccctgcctggaagtgaccacagtgagagctgccttatattcctacattccaggccagaaccagcacaggactgaacacatccctggttgtaatgtccatttccatcttccccgtctccctttccacatcaaggcacatcagacttctcagagacccactttattcagttctgtacatatggggacatcggtccaagcccaacccaccttagcatgtatcactctgtggagaataaagcaccctatgtacacagccaaaagccgcactgcctgcgcccctggaacctgggtccggccttcctcagcccctggcccctccaaggtacctataagggacaagagaaggcctgcccagcatagcacaaacaaggaaataaataggtgttggcaggagccatgcttggggcaccgctccctgcttccttctttctagttttgggaaccaacagcacagaaaagcagtcagccccagggtggtcccttccatgtctgtgaccccagggctgctgctcaccaaagacagggcacggggtagggtgtttattcatccctccccggccccacttggtccatctgggccctatattcatcagttattgtccacagcctatacttttctccttttgacctcccttggtcaggcatggggtaagaagaaataatacaa

SEQ ID NO: 377761 - DNA, 1283 bp, Homo sapiens
gcgggaacaccggcgccgggattcggatgggggcgggtgggggacgctgcagctggggccatttgaggggagcccatggggcctgaaaggcatctgtcaggcgcccctgcccggatggcaacagtagttctaggaggagacaccatgggccctgagcgtatcttccccaatcagactgaggaactgggacatcagggcccttcagaaggcactggggattggagcagtgaggagcctgaggaagagcaggaggaaacggggtcgggcccagctggctactcctaccagcccctgaaccaagatcctgaacaagaggaggtggaactggcaccagtgggggatggagatgtagttgctgacatccaggatcgaatccaggccctggggcttcatttgccagacccaccattagagagtgaagatgaagatgaggagggagctacagcgttgaacaaccacagctctattcccatggacccagaacatgtagagctggtgaaaaggacaatggctggagtaagcctgcctgcgccaggggttcctgcctgggctcgggagatatcggatgcccagtgggaagatgtggtacagaaagccctccaagcccggcaggcatcccctgcctggaagtgaccacagtgagagctgccttatattcctacattccaggccagaaccagcacaggactgaacacatccctggttgtaatgtccatttccatcttccccgtctccctttccacatcaaggcacatcagacttctcagagacccactttattcagttctgtacatatggggacatcggtccaagcccaacccaccttagcatgtatcactctgtggagaataaagcaccctatgtacacagccaaaagccgcactgcctgcgcccctggaacctgggtccggccttcctcagcccctggcccctccaaggtacctataagggacaagagaaggcctgcccagcatagcacaaacaaggaaataaataggtgttggcaggagccatgcttggggcaccgctccctgcttccttctttctagttttgggaaccaacagcacagaaaagcagtcagccccagggtggtcccttccatgtctgtgaccccagggctgctgctcaccaaagacagggcacggggtagggtgtttattcatccctccccggccccacttggtccatctgggccctatattcatcagttattgtccacagcctatacttttctccttttgacctcccttggtcaggcatggggtaagaagaaataatacaa

SEQ ID NO: 377762 - DNA, 801 bp, Homo sapiens
cccgcggggagtggaggccgcgggctctgagcggcccctgcccggatggcaacagtagttctaggaggagacaccatgggccctgagcgtatcttccccaatcagactgaggaactgggacatcagggcccttcagaaggcactggggattggagcagtgaggagcctgaggaagagcaggaggaaacggggtcgggcccagctggctactcctaccagcccctgaaccaagatcctgaacaagaggaggtggaactggcaccagtgggggatggagatgtagttgctgacatccaggatcgaatccaggccctggggcttcatttgccagacccaccattagagagtgaagatgaagatgaggagggagctacagcgttgaacaaccacagctctattcccatggacccagaacatgtagagctggtgaaaaggacaatggctggagtaagcctgcctgcgccaggggttcctgcctgggctcgggagatatcggatgcccagtgggaagatgtggtacagaaagccctccaagcccggcaggcatcccctgcctggaagtgaccacagtgagagctgccttatattcctacattccaggccagaaccagcacaggactgaacacatccctggttgtaatgtccatttccatcttccccgtctccctttccacatcaaggcacatcagacttctcagagacccactttattcagttctgtacatatggggacatcggtccaagcccaacccaccttagcatgtatcactctgtggagaataaagcaccctatgtacacag

SEQ ID NO: 377763 - DNA, 842 bp, Homo sapiens
cccgcggggagtggaggccgcgggctctgagcggcccctgcccggatggcaacagtagttctaggaggagacaccatgggccctgagcgtatcttccccaatcagactgaggaactgggacatcagggcccttcagaaggcactggggattggagcagtgaggagcctgaggaagagcaggaggaaacggggtcgggcccagctggctactcctaccagcccctgaaccaagatcctgaacaagaggaggtggaactggcaccagtgggggatggagatgtagttgctgacatccaggatcgaatccaggccctggggcttcatttgccagacccaccattagagagtgaagatgaagatgaggagggagctacagcgttgaacaaccacagctctattcccatggacccagaacatgtagagctggtgaaaaggacaatggctggagtaagcctgcctgcgccaggggttcctgcctgggctcgggagatatcggatgcccagtgggaagatgtggtacagaaagccctccaagcccggcaggcatcccctgcctggaagtgaccacagtgagagctgccttatattcctacattccaggccagaaccagcacaggactgaacacatccctggttgtaatgtccatttccatcttccccgtctccctttccacatcaaggcacatcagacttctcagagacccactttattcagttctgtacatatggggacatcggtccaagcccaacccaccttagcatgtatcactctgtggagaataaagcaccctatgtacacagaaaaaaaaaacaaaagggggggccgccaaaaagattcctgg

SEQ ID NO: 377764 - DNA, 448 bp, Homo sapiens
  misc_feature (11)..(11): n is a, c, g, or t
aattcggcacnaggggaggccgcggctctgagcgcccctgcccggatggcaacagtagttctaggaggagacaccatgggccctgagcgtatcttccccaatcagactgaggaactgggacatcagggcccttcagaaggcactggggattggagcagtgaggagcctgaggaagagcaggaggaaacggggtcgggcccagctggctactcctaccagcccctgaaccaagatcctgaacaagaggaggtggaactggcaccagtgggggatggagatgtagttgctgacatccaggatcgaatccaggccctggggcttcatttgccagacccaccattagagagtgaagatgaagatgaggagggagctacagcgttgaacaaccacagctctattcccatggacccagtttatagggcatctcggcccgtccggacccggcccg

SEQ ID NO: 377765 - DNA, 870 bp, Homo sapiens
gcgggaacaccggcgccgggattcggatgggggcgggtgggggacgctgcagctggggccatttgaggggagcccatggggcctgaaaggcatctgtcaggcgcccctgcccggatggcaacagtagttctaggaggagacaccatgggccctgagcgtatcttccccaatcagactgaggaactgggacatcagggcccttcagaaggcactggggattggagcagtgaggagcctgaggaagagcaggaggaaacggggtcgggcccagctggctactcctaccagcccctgaaccaagatcctgaacaagaggaggtggaactggcaccagtgggggatggagatgtagttgctgacatccaggatcgaatccaggccctggggcttcatttgccagacccaccattagagagtgaagatgaagatgaggagggagctacagcgttgaacaaccacagctctattcccatggacccagaacatgtagagctggtgaaaaggacaatggctggagtaagcctgcctgcgccaggggttcctgcctgggctcgggagatatcggatgcccagtgggaagatgtggtacagaaagccctccaagcccggcaggcatcccctgcctggaagtgaccacagtgagagctgccttatattcctacattccaggccagaaccagcacaggactgaacacatccctggttgtaatgtccatttccatcttccccgtctccctttccacatcaaggcacatcagacttctcagagacccactttattcagttctgtacatatggggacatcggtccaagcccaacccaccttagcatgtatcactctgtggagaataaagcaccctatgtacacag

SEQ ID NO: 377766 - DNA, 1260 bp, Homo sapiens
gactacaaggagatgatgagaggatgaagatgggcctggtttcatccgatccctgtcctaccgcctccctgttcttgcagcccctgcccggatggcaacagtagttctaggaggagacaccatgggccctgagcgtatcttccccaatcagactgaggaactgggacatcagggcccttcagaaggcactggggattggagcagtgaggagcctgaggaagagcaggaggaaacggggtcgggcccagctggctactcctaccagcccctgaaccaagatcctgaacaagaggaggtggaactggcaccagtgggggatggagatgtagttgctgacatccaggatcgaatccaggccctggggcttcatttgccagacccaccattagagagtgaagatgaagatgaggagggagctacagcgttgaacaaccacagctctattcccatggacccagaacatgtagagctggtgaaaaggacaatggctggagtaagcctgcctgcgccaggggttcctgcctgggctcgggagatatcggatgcccagtgggaagatgtggtacagaaagccctccaagcccggcaggcatcccctgcctggaagtgaccacagtgagagctgccttatattcctacattccaggccagaaccagcacaggactgaacacatccctggttgtaatgtccatttccatcttccccgtctccctttccacatcaaggcacatcagacttctcagagacccactttattcagttctgtacatatggggacatcggtccaagcccaacccaccttagcatgtatcactctgtggagaataaagcaccctatgtacacagccaaaagccgcactgcctgcgcccctggaacctgggtccggccttcctcagcccctggcccctccaaggtacctataagggacaagagaaggcctgcccagcatagcacaaacaaggaaataaataggtgttggcaggagccatgcttggggcaccgctccctgcttccttctttctagttttgggaaccaacagcacagaaaagcagtcagccccagggtggtcccttccatgtctgtgaccccagggctgctgctcaccaaagacagggcacggggtagggtgtttattcatccctccccggccccacttggtccatctgggccctatattcatcagttattgtccacagcctatacttttctccttttgacctcccttggtcaggcatggggtaagaagaaataatacaa

SEQ ID NO: 377767 - DNA, 999 bp, Homo sapiens
  misc_feature (20)..(20): n is a, c, g, or t
gctcggtaccctgtattggnggtgctctctaatggtggaactggcaccagtgggggatggagatgtagttgctgacatccaggatcgaatccaggccctggggcttcatttgccagacccaccattagagagtgaagatgaagatgaggagggagctacagcgttgaacaaccacagctctattcccatggacccagaacatgtagagctggtgaaaaggacaatggctggagtaagcctgcctgcgccaggggttcctgcctgggctcgggagatatcggatgcccagtgggaagatgtggtacagaaagccctccaagcccggcaggcatcccctgcctggaagtgaccacagtgagagctgccttatattcctacattccaggccagaaccagcacaggactgaacacatccctggttgtaatgtccatttccatcttccccgtctccctttccacatcaaggcacatcagacttctcagagacccactttattcagttctgtacatatggggacatcggtccaagcccaacccaccttagcatgtatcactctgtggagaataaagcaccctatgtacacagccaaaagccgcactgcctgcgcccctggaacctgggtccggccttcctcagcccctggcccctccaaggtacctataagggacaagagaaggcctgcccagcatagcacaaacaaggaaataaataggtgttggcaggagccatgcttggggcaccgctccctgcttccttctttctagttttgggaaccaacagcacagaaaagcagtcagccccagggtggtcccttccatgtctgtgaccccagggctgctgctcaccaaagacagggcacggggtagggtgtttattcatccctccccggccccacttggtccatctgggccctatattcatcagttattgtccacagcctatacttttctccttttgacctcccttggtcaggcatggggtaagaagaaataatacaa

SEQ ID NO: 377768 - DNA, 511 bp, Homo sapiens
tgagggaggaggtgctattgagatttagtgggcaagggagaaatctgcaaatgtcccacaatgaaggacacagtcctaaacaaatttcaaacactccactagaaatttatgtaggtaaaaatttttatagttacctgagccttggtcctaaactccatgttacatatttttttaaaaggatattttgcatggttttaaaatatactgaattttccaggaatgcaactcccatgtaaatcgagggaagattgtgctttgtttgtttcggaactttatcaagaattgttcagcgcttcgaaatattccttcatcaatgacaacgcagcttctggtatttgagtcaacaaggcaacacatgtttatcagctttgcatttgcagttgtcacagtcacattgattgtacttgtatacgcacacaaatacactcatttagcctttatctcaaaatgttaaatataaggaaaaaagcgtcaacaataaatattctttgagtattgtcttaaaaaatta

SEQ ID NO: 377769 - DNA, 2581 bp, Homo sapiens
gtagggagcccgagctcgttctgggccggctccgagatactaatgcgcagcgcagtatcagctactcagtctcgaataatcgcaggcgcttctagcatgtctggacgttttgcagcgcccagaaaggaggcgaggaaggagggagtgtgtgagaggagggagcaaaaagctcaccctaaaacatttatttcaaggagaaaagaaaaagggggggcgcaaaaatggctggggcaattatagaaaacatgagcaccaagaagctgtgcattgttggtgggattctgctcgtgttccaaatcatcgcctttctggtgggaggcttgattgctccagggcccacaacggcagtgtcctacatgtcggtgaaatgtgtggatgcccgtaagaaccatcacaagacaaaatggttcgtgccttggggacccaatcattgtgacaagatccgagacattgaagaggcaattccaagggaaattgaagccaatgacatcgtgttttctgttcacattcccctcccccacatggagatgagtccttggttccaattcatgctgtttatcctgcagctggacattgccttcaagctaaacaaccaaatcagagaaaatgcagaagtctccatggacgtttccctggcttaccgtgatgacgcgtttgctgagtggactgaaatggcccatgaaagagtaccacggaaactcaaatgcaccttcacatctcccaagactccagagcatgagggccgttactatgaatgtgatgtccttcctttcatggaaattgggtctgtggcccataagttttaccttttaaacatccggctgcctgtgaatgagaagaagaaaatcaatgtgggaattggggagataaaggatatccggttggtggggatccaccaaaatggaggcttcaccaaggtgtggtttgccatgaagaccttccttacgcccagcatcttcatcattatggtgtggtattggaggaggatcaccatgatgtcccgacccccagtgcttctggaaaaagtcatctttgcccttgggatttccatgacctttatcaatatcccagtggaatggttttccatcgggtttgactggacctggatgctgctgtttggtgacatccgacagggcatcttctatgcgatgcttctgtccttctggatcatcttctgtggcgagcacatgatggatcagcacgagcggaaccacatcgcagggtattggaagcaagtcggacccattgccgttggctccttctgcctcttcatatttgacatgtgtgagagaggggtacaactcacgaatcccttctacagtatctggactacagacattggaacagagctggccatggccttcatcatcgtggctggaatctgcctctgcctctacttcctgtttctatgcttcatggtatttcaggtgtttcggaacatcagtgggaagcagtccagcctgccagctatgagcaaagtccggcggctacactatgaggggctaatttttaggttcaagttcctcatgcttatcaccttggcctgcgctgccatgactgtcatcttcttcatcgttagtcaggtaacggaaggccattggaaatggggcggcgtcacagtccaagtgaacagtgcctttttcacaggcatctatgggatgtggaatctgtatgtctttgctctgatgttcttgtatgcaccatcccataaaaactatggagaagaccagtccaatggcgatctgggtgtccatagtggggaagaactccagctcaccaccactatcacccatgtggacggacccactgagatctacaagttgacccgcaaggaggcccaggagtaggaggctgcagcgcccggctgggacggtctctccataccccagcccctctaactagagtggggagcatgccagagagagctcaatgtacaaatgaatgcctcatggctcttagctgtggtttcttggaccagcggcatggacatttgtcagtttgccttctgacggtagcttttggaggaagattcctgcagccactaatgcattgtgtatgataacaaaaactctggtatgacacattttctgtgatcattgttaattagtgacatagtaacatctgtagcagctggttagtaaacctcatgtgggggtggggtgggggtgtattccttgggggatggtttgggccgaatggggagtggaatatttgacatttttcctgttttaaattctaggatagattttaacatcctttgcggtcccagtccaaggtaggctggtgtcatagtcttctcactcctaatccatgaccactgtttttttcctatttatatcaccaggtagcctactgagttaatatttaagttgtcaatagataagtgtccctgttttgtggcataatataactgaatttcatgagaagatttattccaccaggggtatttcagctttgaaaccaaatctgtgtatctaatactaaccaatctgttggatgtggattttaaaaaatgtttgctaaactacccaagtaagatttactgtattaaatggccttcgggtctgaaaagcttttttaa

SEQ ID NO: 377770 - DNA, 2459 bp, Homo sapiens
aaatggccatgaaagagtaccacggaaactcaaatgcaccttcacatctcccaagactccagagcatgagggccgttactatgaatgtgatgtccttcctttcatggaaatggggtctgtggcccataagttttaccttttaaacatccggctgcctgtgaatgagaagaagaaaatcaatgtgggaattggggagataaaagatatccggttggtggggatccaccaaaatggaggcttcaccaaggtgtggatgcccgtaagaaccatcacaagacaaaatggttcgtgccttggggacccaatcattgtgacaagatccgagacattgaagaggcaattccaagggaaattgaagccaatgacatcgtgttttctgttcacattcccctcccccacatggagatgagtccttggttccaattcatgctgtttatcctgcagctggacattgccttcaagctaaacaaccaaatcagagaaaatgcagaagtctccatggacgtttccctggcttaccgtgatgacgcgtttgctgagtggactgaaatggcccatgaaagagtaccacggaaactcaaatgcaccttcacatctcccaagactccagagcatgagggccgttactatgaatgtgatgtccttcctttcatggaaattgggtctgtggcccataagttttaccttttaaacatccggctgcctgtgaatgagaagaagaaaatcaatgtgggaattggggagataaaggatatccggttggtggggatccaccaaaatggaggcttcaccaaggtgtggtttgccatgaagaccttccttacgcccagcatcttcatcattatggtgtggtattggaggaggatcaccatgatgtcccgacccccagtgcttctggaaaaagtcatctttgcccttgggatttccatgacctttatcaatatcccagtggaatggttttccatcgggtttgactggacctggatgctgctgtttggtgacatccgacagggcatcttctatgcgatgcttctgtccttctggatcatcttctgtggcgagcacatgatggatcagcacgagcggaaccacatcgcagggtattggaagcaagtcggacccattgccgttggctccttctgcctcttcatatttgacatgtgtgagagaggggtacaactcacgaatcccttctacagtatctggactacagacattggaacagagctggccatggccttcatcatcgtggctggaatctgcctctgcctctacttcctgtttctatgcttcatggtatttcaggtgtttcggaacatcagtgggaagcagtccagcctgccagctatgagcaaagtccggcggctacactatgaggggctaatttttaggttcaagttcctcatgcttatcaccttggcctgcgctgccatgactgtcatcttcttcatcgttagtcaggtaacggaaggccattggaaatggggcggcgtcacagtccaagtgaacagtgcctttttcacaggcatctatgggatgtggaatctgtatgtctttgctctgatgttcttgtatgcaccatcccataaaaactatggagaagaccagtccaatggcgatctgggtgtccatagtggggaagaactccagctcaccaccactatcacccatgtggacggacccactgagatctacaagttgacccgcaaggaggcccaggagtaggaggctgcagcgcccggctgggacggtctctccataccccagcccctctaactagagtggggagcatgccagagagagctcaatgtacaaatgaatgcctcatggctcttagctgtggtttcttggaccagcggcatggacatttgtcagtttgccttctgacggtagcttttggaggaagattcctgcagccactaatgcattgtgtatgataacaaaaactctggtatgacacattttctgtgatcattgttaattagtgacatagtaacatctgtagcagctggttagtaaacctcatgtgggggtggggtgggggtgtattccttgggggatggtttgggccgaatggggagtggaatatttgacatttttcctgttttaaattctaggatagattttaacatcctttgcggtcccagtccaaggtaggctggtgtcatagtcttctcactcctaatccatgaccactgtttttttcctatttatatcaccaggtagcctactgagttaatatttaagttgtcaatagataagtgtccctgttttgtggcataatataactgaatttcatgagaagatttattccaccaggggtatttcagctttgaaaccaaatctgtgtatctaatactaaccaatctgttggatgtggattttaaaaaatgtttgctaaactacccaagtaagatttactgtattaaatggccttcgggtctgaaaagcttttttaa

SEQ ID NO: 377771 - DNA, 3825 bp, Homo sapiens
atgtgatccgcttccctgctcctttaagcgtccacaggcggcggagcggccacaatcacagctccgggcattgggggaacccgagccggctgcgccgggggaatccgtgcgggcgccttccgtcccggtcccatcctcgccgcgctccagcacctctgaagttttgcagcgcccagaaaggaggcgaggaaggagggagtgtgtgagaggagggagcaaaaagctcaccctaaaacatttatttcaaggagaaaagaaaaagggggggcgcaaaaatggctggggcaattatagaaaacatgagcaccaagaagctgtgcattgttggtgggattctgctcgtgttccaaatcatcgcctttctggtgggaggcttgattgctccagggcccacaacggcagtgtcctacatgtcggtgaaatgtgtggatgcccgtaagaaccatcacaagacaaaatggttcgtgccttggggacccaatcattgtgacaagatccgagacattgaagaggcaattccaagggaaattgaagccaatgacatcgtgttttctgttcacattcccctcccccacatggagatgagtccttggttccaattcatgctgtttatcctgcagctggacattgccttcaagctaaacaaccaaatcagagaaaatgcagaagtctccatggacgtttccctggcttaccgtgatgacgcgtttgctgagtggactgaaatggcccatgaaagagtaccacggaaactcaaatgcaccttcacatctcccaagactccagagcatgagggccgttactatgaatgtgatgtccttcctttcatggaaattgggtctgtggcccataagttttaccttttaaacatccggctgcctgtgaatgagaagaagaaaatcaatgtgggaattggggagataaaggatatccggttggtggggatccaccaaaatggaggcttcaccaaggtgtggtttgccatgaagaccttccttacgcccagcatcttcatcattatggtgtggtattggaggaggatcaccatgatgtcccgacccccagtgcttctggaaaaagtcatctttgcccttgggatttccatgacctttatcaatatcccagtggaatggttttccatcgggtttgactggacctggatgctgctgtttggtgacatccgacagggcatcttctatgcgatgcttctgtccttctggatcatcttctgtggcgagcacatgatggatcagcacgagcggaaccacatcgcagggtattggaagcaagtcggacccattgccgttggctccttctgcctcttcatatttgacatgtgtgagagaggggtacaactcacgaatcccttctacagtatctggactacagacattggaacagagctggccatggccttcatcatcgtggctggaatctgcctctgcctctacttcctgtttctatgcttcatggtatttcaggtgtttcggaacatcagtgggaagcagtccagcctgccagctatgagcaaagtccggcggctacactatgaggggctaatttttaggttcaagttcctcatgcttatcaccttggcctgcgctgccatgactgtcatcttcttcatcgttagtcaggtaacggaaggccattggaaatggggcggcgtcacagtccaagtgaacagtgcctttttcacaggcatctatgggatgtggaatctgtatgtctttgctctgatgttcttgtatgcaccatcccataaaaactatggagaagaccagtccaatggcgatctgggtgtccatagtggggaagaactccagctcaccaccactatcacccatgtggacggacccactgagatctacaagttgacccgcaaggaggcccaggagtaggaggctgcagcgcccggctgggacggtctctccataccccagcccctctaactagagtggggagcatgccagagagagctcaatgtacaaatgaatgcctcatggctcttagctgtggtttcttggaccagcggcatggacatttgtcagtttgccttctgacggtagcttttggaggaagattcctgcagccactaatgcattgtgtatgataacaaaaactctggtatgacacattttctgtgatcattgttaattagtgacatagtaacatctgtagcagctggttagtaaacctcatgtgggggtggggtgggggtgtattccttgggggatggtttgggccgaatggggagtggaatatttgacatttttcctgttttaaattctaggatagattttaacatcctttgcggtcccagtccaaggtaggctggtgtcatagtcttctcactcctaatccatgaccactgtttttttcctatttatatcaccaggtagcctactgagttaatatttaagttgtcaatagataagtgtccctgttttgtggcataatataactgaatttcatgagaagatttattccaccaggggtatttcagctttgaaaccaaatctgtgtatctaatactaaccaatctgttggatgtggattttaaaaaatgtttgctaaactacccaagtaagatttactgtattaaatggccttcgggtctgaaaagcttttttaaaaaaaaaaaaaaaaaaacaaaaaaaaaaaaaaaaaaaaaaaaaaaaaaaaaaaaaaaaaaaaaaaaaacaacaaaaacaaaaaaaacagcggcggccgcccgcgatccacacacacctccgaacgaggcaccagatcaccacacccccacaccgcactacctgttgaacaacgaagcaccgaccgacaagcgaggccccgctcaagtcaccacacggccgaccgtcgcaccgtaactcaccaccaaacgcgcagtcgcaaccaccacaccacacgaacagctacagccagcaagcgaacacaccccccacaacggcggacgcaccagaatgcacaccaacaaacacaacagcacgaaacagacaacaaccgagccaacaagacacacacacaagacaacagagcagacaagcatagagaggctagatcacaaacacacaaagcacagcgcgacgtcagctggcgacacagagcacacaacccacgccacccaccaaccatcgaccagacagaaacacataacaaaccaaccgagcacgaacaacaacaaacaacaagaccgccgcaccggcacacgacccacacgcaagcacgcacacatcagcacaggaacgcagaacagcaccgaacgcaagaacccaagcacccggcagaccgcaaccgacggcgcgcagacacacacacagagactcggcagctagcacgcacgacacccagcgccgcacacaaggagcaacgaacagcgcaccgaagcacccgcatcgcaccacaccgacgccacacagccgacgaccgcgcaccaacgcgccacgaagcgcacgatgcacgaaccagcggtcagcagagacaaacaaagcaagcagacgcgcgaaaagaagcagcgacgaggaggccacacgcacgcgacacgtacgcagcacgaccgacaccgtaaacgacgcgacgctgcgagcgacaagcagaacaccgcagcacgcgcgacaccaaggcaggcacacgccagcaggagagcagcaaacacagagaaacatacagaagcgacaacacagacagacaagcgcgccgacagccgagagagcctccgcagcacaagcaacaaacgacacacacagcacacgaccccagaagagagcgagcgagagcccagcacgacgaagccacgacacgaacgatcaaaccgagccagcgatg

SEQ ID NO: 377772 - DNA, 2048 bp, Homo sapiens
accttttaatgggagaagtcatcaagctgggttagggctgtgctcccagggctggcttcggaggcaggagaaaatgcagaagtctccatggacgtttccctggcttaccgtgatgacgcgtttgctgagtggactgaaatggcccatgaaagagtaccacggaaactcaaatgcaccttcacatctcccaagactccagagcatgagggccgttactatgaatgtgatgtccttcctttcatggaaattgggtctgtggcccataagttttaccttttaaacatccggctgcctgtgaatgagaagaagaaaatcaatgtgggaattggggagataaaggatatccggttggtggggatccaccaaaatggaggcttcaccaaggtgtggtttgccatgaagaccttccttacgcccagcatcttcatcattatggtgtggtattggaggaggatcaccatgatgtcccgacccccagtgcttctggaaaaagtcatctttgcccttgggatttccatgacctttatcaatatcccagtggaatggttttccatcgggtttgactggacctggatgctgctgtttggtgacatccgacagggcatcttctatgcgatgcttctgtccttctggatcatcttctgtggcgagcacatgatggatcagcacgagcggaaccacatcgcagggtattggaagcaagtcggacccattgccgttggctccttctgcctcttcatatttgacatgtgtgagagaggggtacaactcacgaatcccttctacagtatctggactacagacattggaacagagctggccatggccttcatcatcgtggctggaatctgcctctgcctctacttcctgtttctatgcttcatggtatttcaggtgtttcggaacatcagtgggaagcagtccagcctgccagctatgagcaaagtccggcggctacactatgaggggctaatttttaggttcaagttcctcatgcttatcaccttggcctgcgctgccatgactgtcatcttcttcatcgttagtcaggtaacggaaggccattggaaatggggcggcgtcacagtccaagtgaacagtgcctttttcacaggcatctatgggatgtggaatctgtatgtctttgctctgatgttcttgtatgcaccatcccataaaaactatggagaagaccagtccaatggcgatctgggtgtccatagtggggaagaactccagctcaccaccactatcacccatgtggacggacccactgagatctacaagttgacccgcaaggaggcccaggagtaggaggctgcagcgcccggctgggacggtctctccataccccagcccctctaactagagtggggagcatgccagagagagctcaatgtacaaatgaatgcctcatggctcttagctgtggtttcttggaccagcggcatggacatttgtcagtttgccttctgacggtagcttttggaggaagattcctgcagccactaatgcattgtgtatgataacaaaaactctggtatgacacattttctgtgatcattgttaattagtgacatagtaacatctgtagcagctggttagtaaacctcatgtgggggtggggtgggggtgtattccttgggggatggtttgggccgaatggggagtggaatatttgacatttttcctgttttaaattctaggatagattttaacatcctttgcggtcccagtccaaggtaggctggtgtcatagtcttctcactcctaatccatgaccactgtttttttcctatttatatcaccaggtagcctactgagttaatatttaagttgtcaatagataagtgtccctgttttgtggcataatataactgaatttcatgagaagatttattccaccaggggtatttcagctttgaaaccaaatctgtgtatctaatactaaccaatctgttggatgtggattttaaaaaatgtttgctaaactacccaagtaagatttactgtattaaatggccttcgggtctgaaaagcttttttaa

SEQ ID NO: 377773 - DNA, 1763 bp, Homo sapiens
atgtgatccgcttccctgctcctttaagcgtccacaggcggcggagcggccacaatcacagctccgggcattgggggaacccgagccggctgcgccgggggaatccgtgcgggcgccttccgtcccggtcccatcctcgccgcgctccagcacctctgaagttttgcagcgcccagaaaggaggcgaggaaggagggagtgtgtgagaggagggagcaaaaagctcaccctaaaacatttatttcaaggagaaaagaaaaagggggggcgcaaaaatggctggggcaattatagaaaacatgagcaccaagaagctgtgcattgttggtgggattctgctcgtgttccaaatcatcgcctttctggtgggaggcttgattgctccagggcccacaacggcagtgtcctacatgtcggtgaaatgtgtggatgcccgtaagaaccatcacaagacaaaatggttcgtgccttggggacccaatcattgtgacaagatccgagacattgaagaggcaattccaagggaaattgaagccaatgacatcgtgttttctgttcacattcccctcccccacatggagatgagtccttggttccaattcatgctgtttatcctgcagctggacattgccttcaagctaaacaaccaaatcagagaaaatgcagaagtctccatggacgtttccctggcttaccgtgatgacgcgtttgctgagtggactgaaatggcccatgaaagagtaccacggaaactcaaatgcaccttcacatctcccaagactccagagcatgagggccgttactatgaatgtgatgtccttcctttcatggaaattgggtctgtggcccataagttttaccttttaaacatccggctgcctgtgaatgagaagaagaaaatcaatgtgggaattggggagataaaggatatccggttggtggggatccaccaaaatggaggcttcaccaaggtgtggtttgccatgaagaccttccttacgcccagcatcttcatcattatggtttgggccgaatggggagtggaatatttgacatttttcctgttttaaattctaggatagattttaacatcctttgcggtcccagtccaaggtaggctggtgtcatagtcttctcactcctaatccatgaccactgtttttttcctatttatatcaccaggtagcctactgagttaatatttaagttgtcaatagataagtgtccctgttttgtggcataatataactgaatttcatgagaagatttattccaccaggggtatttcagctttgaaaccaaatctgtgtatctaatactaaccaatctgttggatgtggattttaaaaaatgtttgctaaactacccaagtaagatttactgtattaaatggccttcgggtctgaaaagcttttttaacttcttgcttaaaatgcgttttattttgataagatacttcaaatagcctccaaaagtgtagatccaatcatttaaataaacctgtatgtatatgcatatgtgtacatgcatatcccctcctgctaaaactcatacacatgcgtgcagattattttccaggttgaacctagaggtggggagttgatgggggaaataggtttctgaaaaactgatatactttatcatcaaatcaaagtgtttggggataatacctattcctggagaaagagtgacattttctgtcctgtgtggttagcctccctaggctggcaagggatgctcatatgcgtgacaacaaaggtggg

SEQ ID NO: 377774 - DNA, 1419 bp, Homo sapiens
atgtgatccgcttccctgctcctttaagcgtccacaggcggcggagcggccacaatcacagctccgggcattgggggaacccgagccggctgcgccgggggaatccgtgcgggcgccttccgtcccggtcccatcctcgccgcgctccagcacctctgaagttttgcagcgcccagaaaggaggcgaggaaggagggagtgtgtgagaggagggagcaaaaagctcaccctaaaacatttatttcaaggagaaaagaaaaagggggggcgcaaaaatggctggggcaattatagaaaacatgagcaccaagaagctgtgcattgttggtgggattctgctcgtgttccaaatcatcgcctttctggtgggaggcttgattgctccagggcccacaacggcagtgtcctacatgtcggtgaaatgtgtggatgcccgtaagaaccatcacaagacaaaatggttcgtgccttggggacccaatcattgtgacaagatccgagacattgaagaggcaattccaagggaaattgaagccaatgacatcgtgttttctgttcacattcccctcccccacatggagatgagtccttggttccaattcatgctgtttatcctgcagctggacattgccttcaagctaaacaaccaaatcagagaaaatgcagaagtctccatggacgtttccctggcttaccgtgatgacgcgtttgctgagtggactgaaatggcccatgaaagagtaccacggaaactcaaatgcaccttcacatctcccaagactccagagcatgagggccgttactatgaatgtgatgtccttcctttcatggaaattgggtctgtggcccataagttttaccttttaaacatccggctgcctgtgaatgagaagaagaaaatcaatgtgggaattggggagataaaggatatccggttggtggggatccaccaaaatggaggcttcaccaaggtgtggtttgccatgaagaccttccttacgcccagcatcttcatcattatggtttgggccgaatggggagtggaatatttgacatttttcctgttttaaattctaggatagattttaacatcctttgcggtcccagtccaaggtaggctggtgtcatagtcttctcactcctaatccatgaccactgtttttttcctatttatatcaccaggtagcctactgagttaatatttaagttgtcaatagataagtgtccctgttttgtggcataatataactgaatttcatgagaagatttattccaccaggggtatttcagctttgaaaccaaatctgtgtatctaatactaaccaatctgttggatgtggattttaaaaaatgtttgctaaactacccaagtaagatttactgtattaaatggccttcgggtctgaaaagcttttttaa

SEQ ID NO: 377775 - DNA, 1571 bp, Homo sapiens
gggcaaggtaaggaccactgactgtgcctgacagaaagctagagaaccttcagttgaccttaatttacaccgaaatgattcagattaaaagatggagtcttacatggcccttcatgtttcccacatgtagaagagacttggttttcatgttggttggttcctttattggtgttatgtttcttctgtttcttctctgtttcaattgaatatcaccatcctttctccgcaggtaacggaaggccattggaaatggggcggcgtcacagtccaagtgaacagtgcctttttcacaggcatctatgggatgtggaatctgtatgtctttgctctgatgttcttgtatgcaccatcccataaaaactatggagaagaccagtccaatggcgatctgggtgtccatagtggggaagaactccagctcaccaccactatcacccatgtggacggacccactgagatctacaagttgacccgcaaggaggcccaggagtaggaggctgcagcgcccggctgggacggtctctccataccccagcccctctaactagagtggggagcatgccagagagagctcaatgtacaaatgaatgcctcatggctcttagctgtggtttcttggaccagcggcatggacatttgtcagtttgccttctgacggtagcttttggaggaagattcctgcagccactaatgcattgtgtatgataacaaaaactctggtatgacacattttctgtgatcattgttaattagtgacatagtaacatctgtagcagctggttagtaaacctcatgtgggggtggggtgggggtgtattccttgggggatggtttgggccgaatggggagtggaatatttgacatttttcctgttttaaattctaggatagattttaacatcctttgcggtcccagtccaaggtaggctggtgtcatagtcttctcactcctaatccatgaccactgtttttttcctatttatatcaccaggtagcctactgagttaatatttaagttgtcaatagataagtgtccctgttttgtggcataatataactgaatttcatgagaagatttattccaccaggggtatttcagctttgaaaccaaatctgtgtatctaatactaaccaatctgttggatgtggattttaaaaaatgtttgctaaactacccaagtaagatttactgtattaaatggccttcgggtctgaaaagcttttttaacttcttgcttaaaatgcgttttattttgataagatacttcaaatagcctccaaaagtgtagatccaatcatttaaataaacctgtatgtatatgcatatgtgtacatgcatatcccctcctgctaaaactcatacacatgcgtgcagattattttccaggttgaacctagaggtggggagttgatgggggaaataggtttctgaaaaactgatatactttatcatcaaatcaaagtgtttggggataatacctattcctggagaaagagtgacattttctgtcctgtgtggttagcctccctaggctggcaagggatgctcatatgcgtgacaacaaaggtggg

SEQ ID NO: 377776 - DNA, 699 bp, Homo sapiens
gtagggagcccgagctcgttctgggccggctccgagatactaatgcgcagcgcagtatcagctactcagtctcgaataatcgcaggcgcttctagcatgtctggacgttttgcagcgcccagaaaggaggcgaggaaggagggagtgtgtgagaggagggagcaaaaagctcaccctaaaacatttatttcaaggagaaaagaaaaagggggggcgcaaaaatggctggggcaattatagaaaacatgagcaccaagaagctgtgcattgttggtgggattctgctcgtgttccaaatcatcgcctttctggtgggaggcttgattgctccagggcccacaacggcagtgtcctacatgtcggtgaaatgtgtggatgcccgtaagaaccatcacaagacaaaatggttcgtgccttggggacccaatcattgtgacaagatccgagacattgaagaggcaattccaagggaaattgaagccaatgacatcgtgttttctgttcacattcccctcccccacatggagatgagtccttggttccaattcatgctgtttatcctgcagctggacattgccttcaagctaaacaaccaaatcagttaagtgtactctcctctcatccctttcttccctttgagcattgccctctttgggttctttttgagccaattctaataaaagtaaaaatggtaatagt

SEQ ID NO: 377777 - DNA, 676 bp, Homo sapiens
gtttgaaaatctgccttccagatgaataaagtggctgtcctgatattttctcaccatcagagtcatctttgcccttgggatttccatgacctttatcaatatcccagtggaatggttttccatcgggtttgactggacctggatgctgctgtttggtgacatccgacagggcatcttctatgcgatgcttctgtccttctggatcatcttctgtggcgagcacatgatggtaagagccgccgggagggcagacgtctgtaccagctgctctgtgcaggctgccaagctgacacctgcccccctttgcctctagtcagcagtgggtgagccagaataaactagtagttacaagtgggaactctggaggcagaccctctggttcacattcctgcttcaccacctgctgaccagctgagtggctttaggcaaatgacattatcactctgaatctcgggtccctcatctataaaatgggatgtaaagacctactgcatggggttttcatgagaattaaatgacagaatgtgagtaacttaagataaacacacacattctaatgattagtattatttcttgcccttgagcttgagtttcttgtctgctggcttctgccctgcttgtcctgtccccaggaatacaggttaaccatcaaagaatgtgggcctggctctttcca

SEQ ID NO: 377778 - DNA, 2635 bp, Homo sapiens
atgtgatccgcttccctgctcctttaagcgtccacaggcggcggagcggccacaatcacagctccgggcattgggggaacccgagccggctgcgccgggggaatccgtgcgggcgccttccgtcccggtcccatcctcgccgcgctccagcacctctgaagttttgcagcgcccagaaaggaggcgaggaaggagggagtgtgtgagaggagggagcaaaaagctcaccctaaaacatttatttcaaggagaaaagaaaaagggggggcgcaaaaatggctggggcaattatagaaaacatgagcaccaagaagctgtgcattgttggtgggattctgctcgtgttccaaatcatcgcctttctggtgggaggcttgattgctccagggcccacaacggcagtgtcctacatgtcggtgaaatgtgtggatgcccgtaagaaccatcacaagacaaaatggttcgtgccttggggacccaatcattgtgacaagatccgagacattgaagaggcaattccaagggaaattgaagccaatgacatcgtgttttctgttcacattcccctcccccacatggagatgagtccttggttccaattcatgctgtttatcctgcagctggacattgccttcaagctaaacaaccaaatcagagaaaatgcagaagtctccatggacgtttccctggcttaccgtgatgacgcgtttgctgagtggactgaaatggcccatgaaagagtaccacggaaactcaaatgcaccttcacatctcccaagactccagagcatgagggccgttactatgaatgtgatgtccttcctttcatggaaattgggtctgtggcccataagttttaccttttaaacatccggctgcctgtgaatgagaagaagaaaatcaatgtgggaattggggagataaaggatatccggttggtggggatccaccaaaatggaggcttcaccaaggtgtggtttgccatgaagaccttccttacgcccagcatcttcatcattatggtgtggtattggaggaggatcaccatgatgtcccgacccccagtgcttctggaaaaagtcatctttgcccttgggatttccatgacctttatcaatatcccagtggaatggttttccatcgggtttgactggacctggatgctgctgtttggtgacatccgacagggcatcttctatgcgatgcttctgtccttctggatcatcttctgtggcgagcacatgatggatcagcacgagcggaaccacatcgcagggtattggaagcaagtcggacccattgccgttggctccttctgcctcttcatatttgacatgtgtgagagaggggtacaactcacgaatcccttctacagtatctggactacagacattggaacagagctggccatggccttcatcatcgtggctggaatctgcctctgcctctacttcctgtttctatgcttcatggtatttcaggtgtttcggaacatcagtgggaagcagtccagcctgccagctatgagcaaagtccggcggctacactatgaggggctaatttttaggttcaagttcctcatgcttatcaccttggcctgcgctgccatgactgtcatcttcttcatcgttagtcaggtaacggaaggccattggaaatggggcggcgtcacagtccaagtgaacagtgcctttttcacaggcatctatgggatgtggaatctgtatgtctttgctctgatgttcttgtatgcaccatcccataaaaactatggagaagaccagtccaatggcgatctgggtgtccatagtggggaagaactccagctcaccaccactatcacccatgtggacggacccactgagatctacaagttgacccgcaaggaggcccaggagtaggaggctgcagcgcccggctgggacggtctctccataccccagcccctctaactagagtggggagcatgccagagagagctcaatgtacaaatgaatgcctcatggctcttagctgtggtttcttggaccagcggcatggacatttgtcagtttgccttctgacggtagcttttggaggaagattcctgcagccactaatgcattgtgtatgataacaaaaactctggtatgacacattttctgtgatcattgttaattagtgacatagtaacatctgtagcagctggttagtaaacctcatgtgggggtggggtgggggtgtattccttgggggatggtttgggccgaatggggagtggaatatttgacatttttcctgttttaaattctaggatagattttaacatcctttgcggtcccagtccaaggtaggctggtgtcatagtcttctcactcctaatccatgaccactgtttttttcctatttatatcaccaggtagcctactgagttaatatttaagttgtcaatagataagtgtccctgttttgtggcataatataactgaatttcatgagaagatttattccaccaggggtatttcagctttgaaaccaaatctgtgtatctaatactaaccaatctgttggatgtggattttaaaaaatgtttgctaaactacccaagtaagatttactgtattaaatggccttcgggtctgaaaagcttttttaa

SEQ ID NO: 377779 - DNA, 2670 bp, Homo sapiens
atgtgatccgcttccctgctcctttaagcgtccacaggcggcggagcggccacaatcacagctccgggcattgggggaacccgagccggctgcgccgggggaatccgtgcgggcgccttccgtcccggtcccatcctcgccgcgctccagcacctctgaagttttgcagcgcccagaaaggaggcgaggaaggagggagtgtgtgagaggagggagcaaaaagctcaccctaaaacatttatttcaaggagaaaagaaaaagggggggcgcaaaaatggctggggcaattatagaaaacatgagcaccaagaagctgtgcattgttggtgggattctgctcgtgttccaaatcatcgcctttctggtgggaggcttgattgcatacccataaatgagactattccaaacataaactctccagggcccacaacggcagtgtcctacatgtcggtgaaatgtgtggatgcccgtaagaaccatcacaagacaaaatggttcgtgccttggggacccaatcattgtgacaagatccgagacattgaagaggcaattccaagggaaattgaagccaatgacatcgtgttttctgttcacattcccctcccccacatggagatgagtccttggttccaattcatgctgtttatcctgcagctggacattgccttcaagctaaacaaccaaatcagagaaaatgcagaagtctccatggacgtttccctggcttaccgtgatgacgcgtttgctgagtggactgaaatggcccatgaaagagtaccacggaaactcaaatgcaccttcacatctcccaagactccagagcatgagggccgttactatgaatgtgatgtccttcctttcatggaaattgggtctgtggcccataagttttaccttttaaacatccggctgcctgtgaatgagaagaagaaaatcaatgtgggaattggggagataaaggatatccggttggtggggatccaccaaaatggaggcttcaccaaggtgtggtttgccatgaagaccttccttacgcccagcatcttcatcattatggtgtggtattggaggaggatcaccatgatgtcccgacccccagtgcttctggaaaaagtcatctttgcccttgggatttccatgacctttatcaatatcccagtggaatggttttccatcgggtttgactggacctggatgctgctgtttggtgacatccgacagggcatcttctatgcgatgcttctgtccttctggatcatcttctgtggcgagcacatgatggatcagcacgagcggaaccacatcgcagggtattggaagcaagtcggacccattgccgttggctccttctgcctcttcatatttgacatgtgtgagagaggggtacaactcacgaatcccttctacagtatctggactacagacattggaacagagctggccatggccttcatcatcgtggctggaatctgcctctgcctctacttcctgtttctatgcttcatggtatttcaggtgtttcggaacatcagtgggaagcagtccagcctgccagctatgagcaaagtccggcggctacactatgaggggctaatttttaggttcaagttcctcatgcttatcaccttggcctgcgctgccatgactgtcatcttcttcatcgttagtcaggtaacggaaggccattggaaatggggcggcgtcacagtccaagtgaacagtgcctttttcacaggcatctatgggatgtggaatctgtatgtctttgctctgatgttcttgtatgcaccatcccataaaaactatggagaagaccagtccaatggcgatctgggtgtccatagtggggaagaactccagctcaccaccactatcacccatgtggacggacccactgagatctacaagttgacccgcaaggaggcccaggagtaggaggctgcagcgcccggctgggacggtctctccataccccagcccctctaactagagtggggagcatgccagagagagctcaatgtacaaatgaatgcctcatggctcttagctgtggtttcttggaccagcggcatggacatttgtcagtttgccttctgacggtagcttttggaggaagattcctgcagccactaatgcattgtgtatgataacaaaaactctggtatgacacattttctgtgatcattgttaattagtgacatagtaacatctgtagcagctggttagtaaacctcatgtgggggtggggtgggggtgtattccttgggggatggtttgggccgaatggggagtggaatatttgacatttttcctgttttaaattctaggatagattttaacatcctttgcggtcccagtccaaggtaggctggtgtcatagtcttctcactcctaatccatgaccactgtttttttcctatttatatcaccaggtagcctactgagttaatatttaagttgtcaatagataagtgtccctgttttgtggcataatataactgaatttcatgagaagatttattccaccaggggtatttcagctttgaaaccaaatctgtgtatctaatactaaccaatctgttggatgtggattttaaaaaatgtttgctaaactacccaagtaagatttactgtattaaatggccttcgggtctgaaaagcttttttaa

SEQ ID NO: 377780 - DNA, 2979 bp, Homo sapiens
atgtgatccgcttccctgctcctttaagcgtccacaggcggcggagcggccacaatcacagctccgggcattgggggaacccgagccggctgcgccgggggaatccgtgcgggcgccttccgtcccggtcccatcctcgccgcgctccagcacctctgaagttttgcagcgcccagaaaggaggcgaggaaggagggagtgtgtgagaggagggagcaaaaagctcaccctaaaacatttatttcaaggagaaaagaaaaagggggggcgcaaaaatggctggggcaattatagaaaacatgagcaccaagaagctgtgcattgttggtgggattctgctcgtgttccaaatcatcgcctttctggtgggaggcttgattgctccagggcccacaacggcagtgtcctacatgtcggtgaaatgtgtggatgcccgtaagaaccatcacaagacaaaatggttcgtgccttggggacccaatcattgtgacaagatccgagacattgaagaggcaattccaagggaaattgaagccaatgacatcgtgttttctgttcacattcccctcccccacatggagatgagtccttggttccaattcatgctgtttatcctgcagctggacattgccttcaagctaaacaaccaaatcagagaaaatgcagaagtctccatggacgtttccctggcttaccgtgatgacgcgtttgctgagtggactgaaatggcccatgaaagagtaccacggaaactcaaatgcaccttcacatctcccaagactccagagcatgagggccgttactatgaatgtgatgtccttcctttcatggaaattgggtctgtggcccataagttttaccttttaaacatccggctgcctgtgaatgagaagaagaaaatcaatgtgggaattggggagataaaggatatccggttggtggggatccaccaaaatggaggcttcaccaaggtgtggtttgccatgaagaccttccttacgcccagcatcttcatcattatggtgtggtattggaggaggatcaccatgatgtcccgacccccagtgcttctggaaaaagtcatctttgcccttgggatttccatgacctttatcaatatcccagtggaatggttttccatcgggtttgactggacctggatgctgctgtttggtgacatccgacagggcatcttctatgcgatgcttctgtccttctggatcatcttctgtggcgagcacatgatggatcagcacgagcggaaccacatcgcagggtattggaagcaagtcggacccattgccgttggctccttctgcctcttcatatttgacatgtgtgagagaggggtacaactcacgaatcccttctacagtatctggactacagacattggaacagagctggccatggccttcatcatcgtggctggaatctgcctctgcctctacttcctgtttctatgcttcatggtatttcaggtgtttcggaacatcagtgggaagcagtccagcctgccagctatgagcaaagtccggcggctacactatgaggggctaatttttaggttcaagttcctcatgcttatcaccttggcctgcgctgccatgactgtcatcttcttcatcgttagtcaggtaacggaaggccattggaaatggggcggcgtcacagtccaagtgaacagtgcctttttcacaggcatctatgggatgtggaatctgtatgtctttgctctgatgttcttgtatgcaccatcccataaaaactatggagaagaccagtccaatggcgatctgggtgtccatagtggggaagaactccagctcaccaccactatcacccatgtggacggacccactgagatctacaagttgacccgcaaggaggcccaggagtaggaggctgcagcgcccggctgggacggtctctccataccccagcccctctaactagagtggggagcatgccagagagagctcaatgtacaaatgaatgcctcatggctcttagctgtggtttcttggaccagcggcatggacatttgtcagtttgccttctgacggtagcttttggaggaagattcctgcagccactaatgcattgtgtatgataacaaaaactctggtatgacacattttctgtgatcattgttaattagtgacatagtaacatctgtagcagctggttagtaaacctcatgtgggggtggggtgggggtgtattccttgggggatggtttgggccgaatggggagtggaatatttgacatttttcctgttttaaattctaggatagattttaacatcctttgcggtcccagtccaaggtaggctggtgtcatagtcttctcactcctaatccatgaccactgtttttttcctatttatatcaccaggtagcctactgagttaatatttaagttgtcaatagataagtgtccctgttttgtggcataatataactgaatttcatgagaagatttattccaccaggggtatttcagctttgaaaccaaatctgtgtatctaatactaaccaatctgttggatgtggattttaaaaaatgtttgctaaactacccaagtaagatttactgtattaaatggccttcgggtctgaaaagcttttttaacttcttgcttaaaatgcgttttattttgataagatacttcaaatagcctccaaaagtgtagatccaatcatttaaataaacctgtatgtatatgcatatgtgtacatgcatatcccctcctgctaaaactcatacacatgcgtgcagattattttccaggttgaacctagaggtggggagttgatgggggaaataggtttctgaaaaactgatatactttatcatcaaatcaaagtgtttggggataatacctattcctggagaaagagtgacattttctgtcctgtgtggttagcctccctaggctggcaagggatgctcatatgcgtgacaacaaaggtggg

SEQ ID NO: 377781 - DNA, 2085 bp, Homo sapiens
atgtgatccgcttccctgctcctttaagcgtccacaggcggcggagcggccacaatcacagctccgggcattgggggaacccgagccggctgcgccgggggaatccgtgcgggcgccttccgtcccggtcccatcctcgccgcgctccagcacctctgaagttttgcagcgcccagaaaggaggcgaggaaggagggagtgtgtgagaggagggagcaaaaagctcaccctaaaacatttatttcaaggagaaaagaaaaagggggggcgcaaaaatggctggggcaattatagaaaacatgagcaccaagaagctgtgcattgttggtgggattctgctcgtgttccaaatcatcgcctttctggtgggaggcttgattgctccagggcccacaacggcagtgtcctacatgtcggtgaaatgtgtggatgcccgtaagaaccatcacaagacaaaatggttcgtgccttggggacccaatcattgtgacaagatccgagacattgaagaggcaattccaagggaaattgaagccaatgacatcgtgttttctgttcacattcccctcccccacatggagatgagtccttggttccaattcatgctgtttatcctgcagctggacattgccttcaagctaaacaaccaaatcagagaaaatgcagaagtctccatggacgtttccctggcttaccgtgatgacgcgtttgctgagtggactgaaatggcccatgaaagagtaccacggaaactcaaatgcaccttcacatctcccaagactccagagcatgagggccgttactatgaatgtgatgtccttcctttcatggaaattgggtctgtggcccataagttttaccttttaaacatccggctgcctgtgaatgagaagaagaaaatcaatgtgggaattggggagataaaggatatccggttggtggggatccaccaaaatggaggcttcaccaaggtgtggtttgccatgaagaccttccttacgcccagcatcttcatcattatggtgtggtattggaggaggatcaccatgatgtcccgacccccagtgcttctggaaaaagtcatctttgcccttgggatttccatgacctttatcaatatcccagtggaatggttttccatcgggtttgactggacctggatgctgctgtttggtgacatccgacagggcatcttctatgcgatgcttctgtccttctggatcatcttctgtggcgagcacatgatggatcagcacgagcggaaccacatcgcagggtattggaagcaagtcggacccattgccgttggctccttctgcctcttcatatttgacatgtgtgagagaggggtacaactcacgaatcccttctacagtatctggactacagacattggaacagagctggccatggccttcatcatcgtggctggaatctgcctctgcctctacttcctgtttctatgcttcatggtatttcaggtgtttcggaacatcagtgggaagcagtccagcctgccagctatgagcaaagtccggcggctacactatgaggggctaatttttaggttcaagttcctcatgcttatcaccttggcctgcgctgccatgactgtcatcttcttcatcgttagtcaggtaacggaaggccattggaaatggggcggcgtcacagtccaagtgaacagtgcctttttcacaggcatctatgggatgtggaatctgtatgtctttgctctgatgttcttgtatgcaccatcccataaaaactatggagaagaccagtccaatggaatgcaactcccatgtaaatcgagggaagattgtgctttgtttgtttcggaactttatcaagaattgttcagcgcttcgaaatattccttcatcaatgacaacgcagcttctggtatttgagtcaacaaggcaacacatgtttatcagctttgcatttgcagttgtcacagtcacattgattgtacttgtatacgcacacaaatacactcatttagcctttatctcaaaatgttaaatataaggaaaaaagcgtcaacaataaatattctttgagtattgtcttaaaaaatta

SEQ ID NO: 377782 - DNA, 1719 bp, Homo sapiens
atgtgatccgcttccctgctcctttaagcgtccacaggcggcggagcggccacaatcacagctccgggcattgggggaacccgagccggctgcgccgggggaatccgtgcgggcgccttccgtcccggtcccatcctcgccgcgctccagcacctctgaagttttgcagcgcccagaaaggaggcgaggaaggagggagtgtgtgagaggagggagcaaaaagctcaccctaaaacatttatttcaaggagaaaagaaaaagggggggcgcaaaaatggctggggcaattatagaaaacatgagcaccaagaagctgtgcattgttggtgggattctgctcgtgttccaaatcatcgcctttctggtgggaggcttgattgctccagggcccacaacggcagtgtcctacatgtcggtgaaatgtgtggatgcccgtaagaaccatcacaagacaaaatggttcgtgccttggggacccaatcattgtgacaagatccgagacattgaagaggcaattccaagggaaattgaagccaatgacatcgtgttttctgttcacattcccctcccccacatggagatgagtccttggttccaattcatgctgtttatcctgcagctggacattgccttcaagctaaacaaccaaatcagagaaaatgcagaagtctccatggacgtttccctggcttaccgtgatgacgcgtttgctgagtggactgaaatggcccatgaaagagtaccacggaaactcaaatgcaccttcacatctcccaagactccagagcatgagggccgttactatgaatgtgatgtccttcctttcatggaaattgggtctgtggcccataagttttaccttttaaacatccggctgcctgtgaatgagaagaagaaaatcaatgtgggaattggggagataaaggatatccggttggtggggatccaccaaaatggaggcttcaccaaggtgtggtttgccatgaagaccttccttacgcccagcatcttcatcattatggtgtggtattggaggaggatcaccatgatgtcccgacccccagtgcttctggaaaaagtcatctttgcccttgggatttccatgacctttatcaatatcccagtggaatggttttccatcgggtttgactggacctggatgctgctgtttggtgacatccgacagggcatcttctatgcgatgcttctgtccttctggatcatcttctgtggcgagcacatgatggtaagagccgccgggagggcagacgtctgtaccagctgctctgtgcaggctgccaagctgacacctgcccccctttgcctctagtcagcagtgggtgagccagaataaactagtagttacaagtgggaactctggaggcagaccctctggttcacattcctgcttcaccacctgctgaccagctgagtggctttaggcaaatgacattatcactctgaatctcgggtccctcatctataaaatgggatgtaaagacctactgcatggggttttcatgagaattaaatgacagaatgtgagtaacttaagataaacacacacattctaatgattagtattatttcttgcccttgagcttgagtttcttgtctgctggcttctgccctgcttgtcctgtccccaggaatacaggttaaccatcaaagaatgtgggcctggctctttccagctggcaatgtgtccaggtggccta

SEQ ID NO: 377783 - DNA, 454 bp, Homo sapiens
gtgacagaaaagggataattaggaaagcttcatgctaaattaaattcagtcttaaaaaattagcaggatgattttttaaatggagctgtcggtgaatgcactgtgtgagctagggtgcagcctgagagagagcagggcacgctgaggaccggctcggctgccgtgacacgagtgggtggtgtcttgggggtctctggggctggaccagatgagtgttgtcctcctgagtatctgctgtggaagctttgtgcttcctctcccttgtcccagtgtcttgctttgttctttgtttcttccgctagactgtcagctttgggaggaagcaggccgcatctgtcttgtccccagtgttgagcgcagtgtgtgctgcagcatggaagttgttccctaaatacccacagtgagatgaggctcccattacaaacatgtttttgaagctgcacttcgcagttgt

SEQ ID NO: 377784 - DNA, 725 bp, Homo sapiens
gtccgcctacttgtatcttcctcccaccgtgcacaaacacgctggaagctaaacggcttaaatatttaaatggcatgtgtgtgaaagcacttctactttgtgacagggccatgttgcacattagctctcaatgctatttgtgtgaacccgcttcatactttttaaagacaaaaatgctctattcatcattttattgacatttcatatttgcaggttttattcgcctgcgaggttaagacatttgaaacacaaatcctgacaaacgcacagaccagcaactcgaggaactcagacgctttggctctcggtgccacctttaaatgctaaaccaccggtaggtagtcgctaaatgggaaagtcgtgttctcccggttttcaggtggggaaaagctgaggctcccaggagtctagaactcctctcatattgcctttctccctggatcaactgggaatgatgataacagcagactgccccccacgcgtgataaggaaaaaaccttgtaattataataacttttggagctacctcagaaattaacaacgacgaacagaaatctgcgcaatcaacaggagccaagaagaaaaactcggctccgcaggacaagtcccgggcacagttctgcaggaagcctcaggccagatcaggcaccgcggctcacacagaggtgacgcacgagtgacccacagagagggacccctgggcctctggtgggggcctgggagac

SEQ ID NO: 377785 - DNA, 888 bp, Homo sapiens
gccaggaaaccgagaacggaatgccaatactgcttaggcttagagtttgaaaggcatctgatttcactgccatgtctttgaacagcagtgcacagtgcagtcttcttcgtggctgaacagccactcgatgtcttttgattggagagtttaatcaaacagaaggagtcttccattgtggccaccacagctgggaatgagctaaggtcttgctatgttgcctagactggttttgaactcctgggctgaagcaatcctcccacttcggcctctcaaagtgctgggatatcagacatgagccacctgccatgcttggcctataatcatgaaaagatcaaccccaagaaagaaaaggaaacatggaaggacctggactggagtcacgccagtacaaggaggatactggcaaagatgaggctagtcaagtggagcagtgggagtgaagatggaataaagaaatccataactggttgtgattaagtagttgtaaacaccaactgcactcagaccaacccatatatatatttttaattgtaagcatagtatatataaaacttcaattcctgcttttttttacctaacattatatcatatgcattttccatactgtttcacaattccttgtattcgtaattgtttaatcctgcaaaataatgcttcgaatgaacatatgatcatttccttaagtattcccctactattagaagtgaagtttcttccagcatttttctctttgctgtgatgaatatttttaagtatagagatttttcagtttggttatgagtttttgaaaatctactttaccaaaaacaaagaaaacccatgtctttctttagtacctttgccaagatattacttttacttgacattcaacaagtataggatgaaagt

SEQ ID NO: 377786 - DNA, 418 bp, Homo sapiens
cacaaagcttgactatctggccctatacagaagaagtttgctgatctctgacttagctgcctaggaatagccaggcaaccagctgctactttgagcacccggctaaaataagcagagacaactggaaggcttgatgtgaaaaagagctgttgaagtgtacacaagcaagctgactgccttatgactaatacttgacagaacccagcaagaggatatgagattgcagatggatgacctcaatcctgaacagaaaggcgtgcatgataatggagagaaaaaagccaatggggaaaaaaaacccaccactatttttttaatagcctaacacacacacaaaaaactggttttcctttttctgtaatgtgtctgtagagctggctattctgattaaagttgcccttgaaaaagcaaaacttaa

SEQ ID NO: 377787 - DNA, 680 bp, Homo sapiens
gccaggaaaccgagaacggaatgccaatactgcttaggcttagagtttgaaaggcatctgatttcactgccatgtctttgaacagcagtgcacagtgcagtcttcttcgtggctgaacagccactcgatgtcttttgattggagagtttaatcaaacagaaggagtcttccattgtggccaccacagctgggaatgagctaaggtcttgctatgttgcctagactggttttgaactcctgggctgaagcaatcctcccacttcggcctctcaaagtgctgggatatcagacatgagccacctgccatgcttggcctatctgcctaggaatagccaggcaaccagctgctactttgagcacccggctaaaataagcagagacaactggaaggcttgatgtgaaaaagagctgttgaagtgtacacaagcaagctgactgccttatgactaatacttgacagaacccagcaagaggatatgagattgcagatggatgacctcaatcctgaacagaaaggcgtgcatgataatggagagaaaaaagccaatggggaaaaaaaacccaccactatttttttaatagcctaacacacacacaaaaaactggttttcctttttctgtaatgtgtctgtagagctggctattctgattaaagttgcccttgaaaaagcaaaacttaa

SEQ ID NO: 377788 - DNA, 468 bp, Homo sapiens
cagattgcagttaggaaacagaccctggtcagaaggtcttagacaaaaatcttagcatcaagctcagattattccttcctgcttcatttgtgttctcctcacaatgctttcagctgcctaggaatagccaggcaaccagctgctactttgagcacccggctaaaataagcagagacaactggaaggcttgatgtgaaaaagagctgttgaagtgtacacaagcaagctgactgccttatgactaatacttgacagaacccagcaagaggatatgagattgcagatggatgacctcaatcctgaacagaaaggcgtgcatgataatggagagaaaaaagccaatggggaaaaaaaacccaccactatttttttaatagcctaacacacacacaaaaaactggttttcctttttctgtaatgtgtctgtagagctggctattctgattaaagttgcccttgaaaaagcaa

SEQ ID NO: 377789 - DNA, 6106 bp, Homo sapiens
ccggcatctgctggtcttcattgtgaaacgtgccagtcgtgctttgtgaaaaataacaaagtggtcacagaaatttgtgatctgaaaacccggctcccttccccacaaggctcctgggcctccgggaagacgggcccctgtttgccatctcgggggtgttccctgtgggagggtgagtgggtgaggccgagcctgctgcgtgtggagcctcgagtgggccctggctgccactaccgtacagaggccgtgtcgcgctgggctgggcctgggtggcctctgtctttgcatctctgagaaggagtcgggtggtaacggttggggtcaggaagaattctgccaagtatctttactgtcattctgaccatagcctctttgttcccgcattcgaacttttggttcttactttgctgctcgtttagtccctggggatttcagatcttaggctgttgtttcaccgtatgggagggttgatgtgagcttgcttggagacacacggtgcagcatcagggaccttcccaggccccagcaaattcaagtcggtctgcagacctctcagctacccgcgggacctcttgtaacccatcggcatcttccaggaatccgccgagtgacttgaggaagatgctaacgcagtaaggtctgtgctgggccaagagcagctttgaagctccagagaaccaccccgtcaggttccttgtggaagctcccctcatccgtggtgcagcaggctgagcactgcgcgtttgccacgtgctgcccgtgacagcacattgagccacagcatttgtagacaggacagaggggtgcctgccccctgcccctgctggcacatttaacccttgtcccctgacctcagttctgtgccccaccaaatgcccaggggcaagaggccaccctggaagctgccaatcttccaaggtgggtgtggggcacggtgggggcgggcagctcccaggcccttgggcaggctggggtgacggcagaggccacagcaccagctctgacaagtcctatcatcctctgctcagcagtgacctccctggccccactttgcccagagtttggggtccccccaggtatagctataggcggcagtgcctgtccctggcctgccttgatttcagccacacccctgcagccctgcatcccagctctggggtgtgcagaggtttgtgtctccagggaacccacggctggagagaaatagggagatgcaggaagtgggggcccatggggcccccaagaagcggactctccaaggggtacccccaccccgctaccttccccacggacgggcccctcctggagcccataccctcctgtgaggccattccagtgtcttctagaaagactcgcttgccaggagtgcgttctttgttgaaaaatgccctgaagcgaaaagatgcaggtttatatggaacccccaccccctcccccactctcccactctgttcgttctgaatgtcttcacgagcgtgcatcagggcgcctggctcccccacctcagccagtgagtcagacacgggtttcgcagccatgtttcctggctccgaggacacgggtggcaggcccgttgcagcccagagccactggtccctacagggcgccgccacaccagcaggaaggaggatggctgtgtccggagcctggcggggaggcggcctccccagtatgtgagtgcagggatctgccagaaccacctggccctctgtagggcgtttaactggaaataccctcactgccaagtggagactggggcgtgtgccacattgccagccaccaggaaagcttttctttttctttttttttttttttttaaacaccaagagcacgtatagcatgggggaaagaacctaaatgtctctctgtcctgtgagctggtgaaaaacccagcatgagaacgcagtgtcaggtgtgggactccttctgcccctgcagtgggtgttacgggcggtgtgccctggcgagcaagctttgattcttggttctttgagctcgtttcagaggctgagtccccacatcagctttagttcttggacttccctgtattaagcaagaattaggagaatggctgtccctgcaggcgcctcccgtaaatcctgagctctctggcgcaatctgaaacttctcttctgttttctttggctgtatcagccgaaccaggagaggcctgggctgcgactaaggagaaagaaatcgggggtttctgagagcagatggtgcctttgtgggtgcagggcttttgtggaaattgtcagcctctacgggcagagtccggcatcccctccccagactgcctgctgtcaaaccacggagcagctggagcctgccctgtccacggcccgtttccacccgggcatgttcgtctctcatgacttcggcagaggcccctggtggccttcagtttcagtttctcatccaggaaggtaaccttgggcattggcagtgggtttccctatggcttggatccagattagaattgatctttgttttcactttccatagttaataacatgcaaaataatgagaagaatttattttaaggtgacagctatactggtccaacatcgcctgcttattgtcagggtacagaagtttaatactttcttaatccagtttttcaaacttctccctgtagaccgtaaggatgaattccacaataggatcctttttaaaatcgattttaaattgttgcctagtcctgccaaggttattatgtgcatctgttatttttccaatacatgtaaacagttgcagcatgatgctttgtttaatgtcctgttcttaagctcgttagagccagttttgaaacgtttggtcttaccgtgaacggaggctggcttggcttagccacgctgatgagtaagtgagggatgtctccatcttgagatcaccaggcaagagagttgcctgcaccaggtaagaggccaaagcccctggggtaacagtccccaccgctacccgaggtaaaacaataaaagctatgtggttgagctcaggcctctcgtgcctggtgtcagagaaggcagagcccacagtaggtgcagggtgcaaggccctgggagggcactggccagggaaggtggtatagatggccctcagattgcggggccccgagcagctccccactctgcccgtccaccttccctggctccagcctcattctctctttagtttaactatgcaaagagaggaggttgagagtgttctggcagctggagctcttttccttgtccttcctgccctccgatggggccacctgtgtcggggcagcagtgtccatgtttatggagatcagaggtgtccccactgtgtggctggactgtactctgctgcccgggtagccaggagtctctccctctctcccctgccgcctgcctggtctcatgggcctccttcacacacccctccctgtggatcgcctgcctgggcccagagcaggggaactggagtttgtgagtgagcagagcaggttatgtgcagacagggaaacgagaactttggacctggctttctgagtccaggtgagagctgtgtggccccccgatgccactctgcccgccggagggatgtgcctgctgagccttttccttccacgccgcctctcactgccaggccagcggcttccgctgagactcgctggagaggcggctcccgtgtccgtccaccgagcactcagatggatgctgatcaccagggccgagggggctcccagaaggaccccaggccctggggagggtggctgtgggaggccaagtccactgcccggaagtcttgtcagccctaagccagggaagcctggagcgtggcctggcgggtctgggtggacaccgtccccactccggactcccagcacaggggacctgagcctgtatggccctgtagccctgggcagagctgggcctgtcgtgtgttcctgcctggcaggtgcaggtgctggccatctgcaggtggaaggaggtgggaatcttggattttttgtttttttttgttttttttttttgagatgaagtctcgctctgacacccaggctggcgtgcagtggtgtgatctcggctcactgcaaactccgcttcctgggttcaagtggttctcctgccccagcctcccaagtagctgggattacaggcatgcgccaccacgctcagctgatttttgtatttttagtagagatggggtttcaccatgttggccaagctggtctcaaactcctgacctcaagtgatctgcccgcctcggcctcccagagtgctgggattacaggcgtgagccagtgcacccggcggaatcttggaatttttatagacagcacctcagtttctgactccagccgcacacctcctgcctctaccagcaggggttgccgccagaccagagccagggccaggtccctgcgtccatcccccccggtaggatggacgtgagccatccttctaggggacttttttcagtgtgcgactcgtctctgttaggtggtaggagccagtttgtgtggcctgtgccacgctccacagtgcgtggctgggctctgtgtgtggcctgtgtcccctgtccctgcaggacccagcaggcatcgtggcgtgacagctgtgtccaagccactgcccgggcatcccatcacccaccagggtgcacggtctctcctgctgggggctttctgtcgcatgtgtgtctcctgtcgactctgcagtttgttctcagagcagaatgtttcctgttctcagtgcacaaagacactggttttcaatcggcgtctaaaaccacgttcctgcctttcattgcaacacggtgtgttcatttgtttaaaacagtttaatgagtaagtttagatgactggtcaatatcttaaaaatgtatattagtaagaagttcttcctggaatttttctttcgattctggcagaataaacaggtgtttttagttttcccactgtctgagccaagcaggaccctgtcccagagcaagagatgtccccttccatctctgacccttgcctgggacaagctttgatggggggccccagcttcaaggctgtggtgggaacagcacccccaaatgccagcctctcctttcttcccatccaccagtatactgcggggccatttctggtctttgtccaacaggaaacccatttctggtgggatatgccttccagtgccacagggccactcaccccatgcatctctgtcctgcccgtcagtgctgggacggacagcaagggcaagcccagtgtctggcggataggtgggtgggaacagagaggggagaatgccgtcctaagcttctgcttggggatcccccacacgacctgggtactgcctgggaaacctgtcctaagtaaaactatggacctcgcctcgcccaccggcctgcgaagccagcatctccgtgaaggtggatggaagcgcctttgtcctcattttgagctgcaagctgggtcagcggctctgaagccctcgagtgactttctaacccaagacccagcccctggcaggaggagggtgggtgcagggctggtgggacaaaaagaggcctcagcaggcctggaagacccttccagtacatcccacagcgtgtcgagcagctgggagaacctgtgtcaagctcgagccgtcataggtccccatgaggtgtctgaagccccttcttggtgatgggaggcagaggtgctgacgttctggagcatggacgtgagtcctcagctggctccgcgtgggcccttggagggtgccaggtgtgtggtgaccttctggatgcctttaacttcatggctgcgtcattcctgatttagaactttaaccggagcttcatctagtgattgcaaaactggaccaatgggaggacggcggcgcagcccgctccctccgtggaatggagctcagctcttcggaggcatcaaagcacctgtcgcctccgtggtccccctgccgagggagtgcggcctctgcaaggttcgggggtggcttcgtttgcctggagtggccggccctgcttgtgccatgtggatgtttgtgagcctcggtcctacagcactgtgtaggctgcatctgtttcgtgctggtcctgttgacttgtatgatatccacaaataaatattttcatggcg

SEQ ID NO: 377790 - DNA, 2761 bp, Homo sapiens
ccggcatctgctggtcttcattgtgaaacgtgccagtcgtgctttgtgaaaaataacaaagtggtcacagaaatttgtgatctgaaaacccggctcccttccccacaaggctcctgggcctccgggaagacgggcccctgtttgccatctcgggggtgttccctgtgggagggtgagtgggtgaggccgagcctgctgcgtgtggagcctcgagtgggccctggctgccactaccgtacagaggccgtgtcgcgctgggctgggcctgggtggcctctgtctttgcatctctgagaaggagtcgggtggtaacggttggggtcaggaagaattctgccaagtatctttactgtcattctgaccatagcctctttgttcccgcattcgaacttttggttcttactttgctgctcgtttagtccctggggatttcagatcttaggctgttgtttcaccgtatgggagggttgatgtgagcttgcttggagacacacggtgcagcatcagggaccttcccaggccccagcaaattcaagtcggtctgcagacctctcagctacccgcgggacctcttgtaacccatcggcatcttccaggaatccgccgagtgacttgaggaagatgctaacgcagtaaggtctgtgctgggccaagagcagctttgaagctccagagaaccaccccgtcaggttccttgtggaagctcccctcatccgtggtgcagcaggctgagcactgcgcgtttgccacgtgctgcccgtgacagcacattgagccacagcatttgtagacaggacagaggggtgcctgccccctgcccctgctggcacatttaacccttgtcccctgacctcagttctgtgccccaccaaatgcccaggggcaagaggccaccctggaagctgccaatcttccaaggtgggtgtggggcacggtgggggcgggcagctcccaggcccttgggcaggctggggtgacggcagaggccacagcaccagctctgacaagtcctatcatcctctgctcagcagtgacctccctggccccactttgcccagagtttggggtccccccaggtatagctataggcggcagtgcctgtccctggcctgccttgatttcagccacacccctgcagccctgcatcccagctctggggtgtgcagaggtttgtgtctccagggaacccacggctggagagaaatagggagatgcaggaagtgggggcccatggggcccccaagaagcggactctccaaggggtacccccaccccgctaccttccccacggacgggcccctcctggagcccataccctcctgtgaggccattccagtgtcttctagaaagactcgcttgccaggagtgcgttctttgttgaaaaatgccctgaagcgaaaagatgcaggtttatatggaacccccaccccctcccccactctcccactctgttcgttctgaatgtcttcacgagcgtgcatcagggcgcctggctcccccacctcagccagtgagtcagacacgggtttcgcagccatgtttcctggctccgaggacacgggtggcaggcccgttgcagcccagagccactggtccctacagggcgccgccacaccagcaggaaggaggatggctgtgtccggagcctggcggggaggcggcctccccagtatgtgagtgcagggatctgccagaaccacctggccctctgtagggcgtttaactggaaataccctcactgccaagtggagactggggcgtgtgccacattgccagccaccaggaaagcttttctttttctttttttttttttttttaaacaccaagagcacgtatagcatgggggaaagaacctaaatgtctctctgtcctgtgagctggtgaaaaacccagcatgagaacgcagtgtcaggtgtgggactccttctgcccctgcagtgggtgttacgggcggtgtgccctggcgagcaagctttgattcttggttctttgagctcgtttcagaggctgagtccccacatcagctttagttcttggacttccctgtattaagcaagaattaggagaatggctgtccctgcaggcgcctcccgtaaatcctgagctctctggcgcaatctgaaacttctcttctgttttctttggctgtatcagccgaaccaggagaggcctgggctgcgactaaggagaaagaaatcgggggtttctgagagcagatggtgcctttgtgggtgcagggcttttgtggaaattgtcagcctctacgggcagagtccggcatcccctccccagactgcctgctgtcaaaccacggagcagctggagcctgccctgtccacggcccgtttccacccgggcatgttcgtctctcatgacttcggcagaggcccctggtggccttcagtttcagtttctcatccaggaaggtaaccttgggcattggcagtgggtttccctatggcttggatccagattagaattgatctttgttttcactttccatagttaataacatgcaaaataatgagaagaatttattttaaggtgacagctatactggtccaacatcgcctgcttattgtcagggtacagaagtttaatactttcttaatccagtttttcaaacttctccctgtagaccgtaaggatgaattccacaataggatcctttttaaaatcgattttaaattgttgcctagtcctgccaaggttattatgtgcatctgttatttttccaatacatgtaaacagttgcagcatg

SEQ ID NO: 377791 - DNA, 314 bp, Homo sapiens
caccccgtatctcccctttccgtgaggttaaaggggtgtgttggccctccctacccaaaatggggctctaaagagctttccttcgatttcctggtccagggatcggggacatccacgtgccacccacccatccttagtgcctcctaagccatgtctggagcagcggccggcgtgtgaccactttgtgtgctctgagcaccaggtgcagacatgcctcctgtggggcctctgatctccaagggaggtttccgggagcaaagtgaagtgaagggattggaaactcaggccactcagccagcaggggctgctgaaat

SEQ ID NO: 377792 - DNA, 5627 bp, Homo sapiens
ccggcatctgctggtcttcattgtgaaacgtgccagtcgtgctttgtgaaaaataacaaagtggtcacagaaatttgtgatctgaaaacccggctcccttccccacaaggctcctgggcctccgggaagacgggcccctgtttgccatctcgggggtgttccctgtgggagggtgagtgggtgaggccgagcctgctgcgtgtggagcctcgagtgggccctggctgccactaccgtacagaggccgtgtcgcgctgggctgggcctgggtggcctctgtctttgcatctctgagaaggagtcgggtggtaacggttggggtcaggaagaattctgccaagtatctttactgtcattctgaccatagcctctttgttcccgcattcgaacttttggttcttactttgctgctcgtttagtccctggggatttcagatcttaggctgttgtttcaccgtatgggagggttgatgtgagcttgcttggagacacacggtgcagcatcagggaccttcccaggccccagcaaattcaagtcggtctgcagacctctcagctacccgcgggacctcttgtaacccatcggcatcttccaggaatccgccgagtgacttgaggaagatgctaacgcagtaaggtctgtgctgggccaagagcagctttgaagctccagagaaccaccccgtcaggttccttgtggaagctcccctcatccgtggtgcagcaggctgagcactgcgcgtttgccacgtgctgcccgtgacagcacattgagccacagcatttgtagacaggacagaggggtgcctgccccctgcccctgctggcacatttaacccttgtcccctgacctcagttctgtgccccaccaaatgcccaggggcaagaggccaccctggaagctgccaatcttccaaggtgggtgtggggcacggtgggggcgggcagctcccaggcccttgggcaggctggggtgacggcagaggccacagcaccagctctgacaagtcctatcatcctctgctcagcagtgacctccctggccccactttgcccagagtttggggtccccccaggtatagctataggcggcagtgcctgtccctggcctgccttgatttcagccacacccctgcagccctgcatcccagctctggggtgtgcagaggtttgtgtctccagggaacccacggctggagagaaatagggagatgcaggaagtgggggcccatggggcccccaagaagcggactctccaaggggtacccccaccccgctaccttccccacggacgggcccctcctggagcccataccctcctgtgaggccattccagtgtcttctagaaagactcgcttgccaggagtgcgttctttgttgaaaaatgccctgaagcgaaaagatgcaggtttatatggaacccccaccccctcccccactctcccactctgttcgttctgaatgtcttcacgagcgtgcatcagggcgcctggctcccccacctcagccagtgagtcagacacgggtttcgcagccatgtttcctggctccgaggacacgggtggcaggcccgttgcagcccagagccactggtccctacagggcgccgccacaccagcaggaaggaggatggctgtgtccggagcctggcggggaggcggcctccccagtatgtgagtgcagggatctgccagaaccacctggccctctgtagggcgtttaactggaaataccctcactgccaagtggagactggggcgtgtgccacattgccagccaccaggaaagcttttctttttctttttttttttttttttaaacaccaagagcacgtatagcatgggggaaagaacctaaatgtctctctgtcctgtgagctggtgaaaaacccagcatgagaacgcagtgtcaggtgtgggactccttctgcccctgcagtgggtgttacgggcggtgtgccctggcgagcaagctttgattcttggttctttgagctcgtttcagaggctgagtccccacatcagctttagttcttggacttccctgtattaagcaagaattaggagaatggctgtccctgcaggcgcctcccgtaaatcctgagctctctggcgcaatctgaaacttctcttctgttttctttggctgtatcagccgaaccaggagaggcctgggctgcgactaaggagaaagaaatcgggggtttctgagagcagatggtgcctttgtgggtgcagggcttttgtggaaattgtcagcctctacgggcagagtccggcatcccctccccagactgcctgctgtcaaaccacggagcagctggagcctgccctgtccacggcccgtttccacccgggcatgttcgtctctcatgacttcggcagaggcccctggtggccttcagtttcagtttctcatccaggaaggtaaccttgggcattggcagtgggtttccctatggcttggatccagattagaattgatctttgttttcactttccatagttaataacatgcaaaataatgagaagaatttattttaaggtgacagctatactggtccaacatcgcctgcttattgtcagggtacagaagtttaatactttcttaatccagtttttcaaacttctccctgtagaccgtaaggatgaattccacaataggatcctttttaaaatcgattttaaattgttgcctagtcctgccaaggttattatgtgcatctgttatttttccaatacatgtaaacagttgcagcatgatgctttgtttaatgtcctgttcttaagctcgttagagccagttttgaaacgtttggtcttaccgtgaacggaggctggcttggcttagccacgctgatgagtaagtgagggatgtctccatcttgagatcaccaggcaagagagttgcctgcaccaggtaagaggccaaagcccctggggtaacagtccccaccgctacccgaggtaaaacaataaaagctatgtggttgagctcaggcctctcgtgcctggtgtcagagaaggcagagcccacagtaggtgcagggtgcaaggccctgggagggcactggccagggaaggtggtatagatggccctcagattgcggggccccgagcagctccccactctgcccgtccaccttccctggctccagcctcattctctctttagtttaactatgcaaagagaggaggttgagagtgttctggcagctggagctcttttccttgtccttcctgccctccgatggggccacctgtgtcggggcagcagtgtccatgtttatggagatcagaggtgtccccactgtgtggctggactgtactctgctgcccgggtagccaggagtctctccctctctcccctgccgcctgcctggtctcatgggcctccttcacacacccctccctgtggatcgcctgcctgggcccagagcaggggaactggagtttgtgagtgagcagagcaggttatgtgcagacagggaaacgagaactttggacctggctttctgagtccaggtgagagctgtgtggccccccgatgccactctgcccgccggagggatgtgcctgctgagccttttccttccacgccgcctctcactgccaggccagcggcttccgctgagactcgctggagaggcggctcccgtgtccgtccaccgagcactcagatggatgctgatcaccagggccgagggggctcccagaaggaccccaggccctggggagggtggctgtgggaggccaagtccactgcccggaagtcttgtcagccctaagccagggaagcctggagcgtggcctggcgggtctgggtggacaccgtccccactccggactcccagcacaggggacctgagcctgtatggccctgtagccctgggcagagctgggcctgtcgtgtgttcctgcctggcaggtgcaggtgctggccatctgcaggtggaaggaggtgggaatcttggattttttgtttttttttgttttttttttttgagatgaagtctcgctctgacacccaggctggcgtgcagtggtgtgatctcggctcactgcaaactccgcttcctgggttcaagtggttctcctgccccagcctcccaagtagctgggattacaggcatgcgccaccacgctcagctgatttttgtatttttagtagagatggggtttcaccatgttggccaagctggtctcaaactcctgacctcaagtgatctgcccgcctcggcctcccagagtgctgggattacaggcgtgagccagtgcacccggcggaatcttggaatttttatagacagcacctcagtttctgactccagccgcacacctcctgcctctaccagcaggggttgccgccagaccagagccagggccaggtccctgcgtccatcccccccggtaggatggacgtgagccatccttctaggggacttttttcagtgtgcgactcgtctctgttaggtggtaggagccagtttgtgtggcctgtgccacgctccacagtgcgtggctgggctctgtgtgtggcctgtgtcccctgtccctgcaggacccagcaggcatcgtggcgtgacagctgtgtccaagccactgcccgggcatcccatcacccaccagggtgcacggtctctcctgctgggggctttctgtcgcatgtgtgtctcctgtcgactctgcagtttgttctcagagcagaatgtttcctgttctcagtgcacaaagacactggttttcaatcggcgtctaaaaccacgttcctgcctttcattgcaacacggtgtgttcatttgtttaaaacagtttaatgagtaagtttagatgactggtcaatatcttaaaaatgtatattagtaagaagttcttcctggaatttttctttcgattctggcagaataaacaggtgtttttagttttcccactgtctgagccaagcaggaccctgtcccagagcaagagatgtccccttccatctctgacccttgcctgggacaagctttgatggggggccccagcttcaaggctgtggtgggaacagcacccccaaatgccagcctctcctttcttcccatccaccagtatactgcggggccatttctggtctttgtccaacaggaaacccatttctggtgggatatgccttccagtgccacagggccactcaccccatgcatctctgtcctgcccgtcagtgctgggacggacagcaagggcaagcccagtgtctggcggataggtgggtgggaacagagaggggagaatgccgtcctaagcttctgcttggggatcccccacacgacctgggtactgcctgggaaacctgtcctaagtaaaactatggacctcgcctcgcccaccggcctgcgaagccagcatctccgtgaaggtggatggaagcgcctttgtcctcattttgagctgcaagctgggtcagcggctctgaagccctcgagtgactttctaacccaagacccagcccctggcaggaggagggtgggtgcagggctgccccttatgaaaccatcagatctcatgaggattcactcactatcacgagaacagcatgagggtaaccacctccatgattcaatgacctcccaccaggtccctcccatgaca

SEQ ID NO: 377793 - DNA, 1396 bp, Homo sapiens
ccggcatctgctggtcttcattgtgaaacgtgccagtcgtgctttgtgaaaaataacaaagtggtcacagaaatttgtgatctgaaaacccggctcccttccccacaaggctcctgggcctccgggaagacgggcccctgtttgccatctcgggggtgttccctgtgggagggtgagtgggtgaggccgagcctgctgcgtgtggagcctcgagtgggccctggctgccactaccgtacagaggccgtgtcgcgctgggctgggcctgggtggcctctgtctttgcatctctgagaaggagtcgggtggtaacggttggggtcaggaagaattctgccaagtatctttactgtcattctgaccatagcctctttgttcccgcattcgaacttttggttcttactttgctgctcgtttagtccctggggatttcagatcttaggctgttgtttcaccgtatgggagggttgatgtgagcttgcttggagacacacggtgcagcatcagggaccttcccaggccccagcaaattcaagtcggtctgcagacctctcagctacccgcgggacctcttgtaacccatcggcatcttccaggaatccgccgagtgacttgaggaagatgctaacgcagtaaggtctgtgctgggccaagagcagctttgaagctccagagaaccaccccgtcaggttccttgtggaagctcccctcatccgtggtgcagcaggctgagcactgcgcgtttgccacgtgctgcccgtgacagcacattgagccacagcatttgtagacaggacagaggggtgcctgccccctgcccctgctggcacatttaacccttgtcccctgacctcagttctgtgccccaccaaatgcccaggggcaagaggccaccctggaagctgccaatcttccaaggtgggtgtggggcacggtgggggcgggcagctcccaggcccttgggcaggctggggtgacggcagaggccacagcaccagctctgacaagtcctatcatcctctgctcagcagtgacctccctggccccactttgcccagagtttggggtccccccaggtatagctataggcggcagtgcctgtccctggcctgccttgatttcagccacacccctgcagccctgcatcccagctctggggtgtgcagaggtttgtgtctccagggaacccacggctggagagaaatagggagatgcaggaagtggggacacttccttaaccaaaaaggaagggttaatgtcttttgggtcttatgtaccttgctcacaccaatagccttcgtccctcagtattacattgatcaatccgtcccccgcaagcttcaaactttggttattgaaaactcttggttttagtgtatttaactaaattctttta

SEQ ID NO: 377794 - DNA, 6277 bp, Homo sapiens
  misc_feature (6277)..(6277): n is a, c, g, or t
ccggcatctgctggtcttcattgtgaaacgtgccagtcgtgctttgtgaaaaataacaaagtggtcacagaaatttgtgatctgaaaacccggctcccttccccacaaggctcctgggcctccgggaagacgggcccctgtttgccatctcgggggtgttccctgtgggagggtgagtgggtgaggccgagcctgctgcgtgtggagcctcgagtgggccctggctgccactaccgtacagaggccgtgtcgcgctgggctgggcctgggtggcctctgtctttgcatctctgagaaggagtcgggtggtaacggttggggtcaggaagaattctgccaagtatctttactgtcattctgaccatagcctctttgttcccgcattcgaacttttggttcttactttgctgctcgtttagtccctggggatttcagatcttaggctgttgtttcaccgtatgggagggttgatgtgagcttgcttggagacacacggtgcagcatcagggaccttcccaggccccagcaaattcaagtcggtctgcagacctctcagctacccgcgggacctcttgtaacccatcggcatcttccaggaatccgccgagtgacttgaggaagatgctaacgcagtaaggtctgtgctgggccaagagcagctttgaagctccagagaaccaccccgtcaggttccttgtggaagctcccctcatccgtggtgcagcaggctgagcactgcgcgtttgccacgtgctgcccgtgacagcacattgagccacagcatttgtagacaggacagaggggtgcctgccccctgcccctgctggcacatttaacccttgtcccctgacctcagttctgtgccccaccaaatgcccaggggcaagaggccaccctggaagctgccaatcttccaaggtgggtgtggggcacggtgggggcgggcagctcccaggcccttgggcaggctggggtgacggcagaggccacagcaccagctctgacaagtcctatcatcctctgctcagcagtgacctccctggccccactttgcccagagtttggggtccccccaggtatagctataggcggcagtgcctgtccctggcctgccttgatttcagccacacccctgcagccctgcatcccagctctggggtgtgcagaggtttgtgtctccagggaacccacggctggagagaaatagggagatgcaggaagtgggggcccatggggcccccaagaagcggactctccaaggggtacccccaccccgctaccttccccacggacgggcccctcctggagcccataccctcctgtgaggccattccagtgtcttctagaaagactcgcttgccaggagtgcgttctttgttgaaaaatgccctgaagcgaaaagatgcaggtttatatggaacccccaccccctcccccactctcccactctgttcgttctgaatgtcttcacgagcgtgcatcagggcgcctggctcccccacctcagccagtgagtcagacacgggtttcgcagccatgtttcctggctccgaggacacgggtggcaggcccgttgcagcccagagccactggtccctacagggcgccgccacaccagcaggaaggaggatggctgtgtccggagcctggcggggaggcggcctccccagtatgtgagtgcagggatctgccagaaccacctggccctctgtagggcgtttaactggaaataccctcactgccaagtggagactggggcgtgtgccacattgccagccaccaggaaagcttttctttttctttttttttttttttttaaacaccaagagcacgtatagcatgggggaaagaacctaaatgtctctctgtcctgtgagctggtgaaaaacccagcatgagaacgcagtgtcaggtgtgggactccttctgcccctgcagtgggtgttacgggcggtgtgccctggcgagcaagctttgattcttggttctttgagctcgtttcagaggctgagtccccacatcagctttagttcttggacttccctgtattaagcaagaattaggagaatggctgtccctgcaggcgcctcccgtaaatcctgagctctctggcgcaatctgaaacttctcttctgttttctttggctgtatcagccgaaccaggagaggcctgggctgcgactaaggagaaagaaatcgggggtttctgagagcagatggtgcctttgtgggtgcagggcttttgtggaaattgtcagcctctacgggcagagtccggcatcccctccccagactgcctgctgtcaaaccacggagcagctggagcctgccctgtccacggcccgtttccacccgggcatgttcgtctctcatgacttcggcagaggcccctggtggccttcagtttcagtttctcatccaggaaggtaaccttgggcattggcagtgggtttccctatggcttggatccagattagaattgatctttgttttcactttccatagttaataacatgcaaaataatgagaagaatttattttaaggtgacagctatactggtccaacatcgcctgcttattgtcagggtacagaagtttaatactttcttaatccagtttttcaaacttctccctgtagaccgtaaggatgaattccacaataggatcctttttaaaatcgattttaaattgttgcctagtcctgccaaggttattatgtgcatctgttatttttccaatacatgtaaacagttgcagcatgatgctttgtttaatgtcctgttcttaagctcgttagagccagttttgaaacgtttggtcttaccgtgaacggaggctggcttggcttagccacgctgatgagtaagtgagggatgtctccatcttgagatcaccaggcaagagagttgcctgcaccaggtaagaggccaaagcccctggggtaacagtccccaccgctacccgaggtaaaacaataaaagctatgtggttgagctcaggcctctcgtgcctggtgtcagagaaggcagagcccacagtaggtgcagggtgcaaggccctgggagggcactggccagggaaggtggtatagatggccctcagattgcggggccccgagcagctccccactctgcccgtccaccttccctggctccagcctcattctctctttagtttaactatgcaaagagaggaggttgagagtgttctggcagctggagctcttttccttgtccttcctgccctccgatggggccacctgtgtcggggcagcagtgtccatgtttatggagatcagaggtgtccccactgtgtggctggactgtactctgctgcccgggtagccaggagtctctccctctctcccctgccgcctgcctggtctcatgggcctccttcacacacccctccctgtggatcgcctgcctgggcccagagcaggggaactggagtttgtgagtgagcagagcaggttatgtgcagacagggaaacgagaactttggacctggctttctgagtccaggtgagagctgtgtggccccccgatgccactctgcccgccggagggatgtgcctgctgagccttttccttccacgccgcctctcactgccaggccagcggcttccgctgagactcgctggagaggcggctcccgtgtccgtccaccgagcactcagatggatgctgatcaccagggccgagggggctcccagaaggaccccaggccctggggagggtggctgtgggaggccaagtccactgcccggaagtcttgtcagccctaagccagggaagcctggagcgtggcctggcgggtctgggtggacaccgtccccactccggactcccagcacaggggacctgagcctgtatggccctgtagccctgggcagagctgggcctgtcgtgtgttcctgcctggcaggtgcaggtgctggccatctgcaggtggaaggaggtgggaatcttggattttttgtttttttttgttttttttttttgagatgaagtctcgctctgacacccaggctggcgtgcagtggtgtgatctcggctcactgcaaactccgcttcctgggttcaagtggttctcctgccccagcctcccaagtagctgggattacaggcatgcgccaccacgctcagctgatttttgtatttttagtagagatggggtttcaccatgttggccaagctggtctcaaactcctgacctcaagtgatctgcccgcctcggcctcccagagtgctgggattacaggcgtgagccagtgcacccggcggaatcttggaatttttatagacagcacctcagtttctgactccagccgcacacctcctgcctctaccagcaggggttgccgccagaccagagccagggccaggtccctgcgtccatcccccccggtaggatggacgtgagccatccttctaggggacttttttcagtgtgcgactcgtctctgttaggtggtaggagccagtttgtgtggcctgtgccacgctccacagtgcgtggctgggctctgtgtgtggcctgtgtcccctgtccctgcaggacccagcaggcatcgtggcgtgacagctgtgtccaagccactgcccgggcatcccatcacccaccagggtgcacggtctctcctgctgggggctttctgtcgcatgtgtgtctcctgtcgactctgcagtttgttctcagagcagaatgtttcctgttctcagtgcacaaagacactggttttcaatcggcgtctaaaaccacgttcctgcctttcattgcaacacggtgtgttcatttgtttaaaacagtttaatgagtaagtttagatgactggtcaatatcttaaaaatgtatattagtaagaagttcttcctggaatttttctttcgattctggcagaataaacaggtgtttttagttttcccactgtctgagccaagcaggaccctgtcccagagcaagagatgtccccttccatctctgacccttgcctgggacaagctttgatggggggccccagcttcaaggctgtggtgggaacagcacccccaaatgccagcctctcctttcttcccatccaccagtatactgcggggccatttctggtctttgtccaacaggaaacccatttctggtgggatatgccttccagtgccacagggccactcaccccatgcatctctgtcctgcccgtcagtgctgggacggacagcaagggcaagcccagtgtctggcggataggtgggtgggaacagagaggggagaatgccgtcctaagcttctgcttggggatcccccacacgacctgggtactgcctgggaaacctgtcctaagtaaaactatggacctcgcctcgcccaccggcctgcgaagccagcatctccgtgaaggtggatggaagcgcctttgtcctcattttgagctgcaagctgggtcagcggctctgaagccctcgagtgactttctaacccaagacccagcccctggcaggaggagggtgggtgcagggctggtgggacaaaaagaggcctcagcaggcctggaagacccttccagtacatcccacagcgtgtcgagcagctgggagaacctgtgtcaagctcgagccgtcataggtccccatgaggtgtctgaagccccttcttggtgatgggaggcagaggtgctgacgttctggagcatggacgtgagtcctcagctggctccgcgtgggcccttggagggtgccaggtgtgtggtgaccttctggatgcctttaacttcatggctgcgtcattcctgatttagaactttaaccggagcttcatctagtgattgcaaaactggaccaatgggaggacggcggcgcagcccgctccctccgtggaatggagctcagctcttcggaggcatcaaagcacctgtcgcctccgtggtccccctgccgagggagtgcggcctctgcaaggttcgggggtggcttcgtttgcctggagtggccggccctgcttgtgccatgtggatgtttgtgagcctcggtcctacagcactgtgtaggctgcatctgtttcgtgctggtcctgttgacttgtatgatatccacaaataaatattttcatggcgaaaaaaaaaaacaaaagggggcggtaaataccccggggccaacataccgacccctttggaaggggcaaagggggaaaaaggccggcgggcaaggcggggacagccgggttggagacccttgggggatgcaccacaaccgataatattgcacatcgtggtgtaaatacaagn

SEQ ID NO: 377795 - DNA, 2992 bp, Homo sapiens
ccggcatctgctggtcttcattgtgaaacgtgccagtcgtgctttgtgaaaaataacaaagtggtcacagaaatttgtgatctgaaaacccggctcccttccccacaaggctcctgggcctccgggaagacgggcccctgtttgccatctcgggggtgttccctgtgggagggtgagtgggtgaggccgagcctgctgcgtgtggagcctcgagtgggccctggctgccactaccgtacagaggccgtgtcgcgctgggctgggcctgggtggcctctgtctttgcatctctgagaaggagtcgggtggtaacggttggggtcaggaagaattctgccaagtatctttactgtcattctgaccatagcctctttgttcccgcattcgaacttttggttcttactttgctgctcgtttagtccctggggatttcagatcttaggctgttgtttcaccgtatgggagggttgatgtgagcttgcttggagacacacggtgcagcatcagggaccttcccaggccccagcaaattcaagtcggtctgcagacctctcagctacccgcgggacctcttgtaacccatcggcatcttccaggaatccgccgagtgacttgaggaagatgctaacgcagtaaggtctgtgctgggccaagagcagctttgaagctccagagaaccaccccgtcaggttccttgtggaagctcccctcatccgtggtgcagcaggctgagcactgcgcgtttgccacgtgctgcccgtgacagcacattgagccacagcatttgtagacaggacagaggggtgcctgccccctgcccctgctggcacatttaacccttgtcccctgacctcagttctgtgccccaccaaatgcccaggggcaagaggccaccctggaagctgccaatcttccaaggtgggtgtggggcacggtgggggcgggcagctcccaggcccttgggcaggctggggtgacggcagaggccacagcaccagctctgacaagtcctatcatcctctgctcagcagtgacctccctggccccactttgcccagagtttggggtccccccaggtatagctataggcggcagtgcctgtccctggcctgccttgatttcagccacacccctgcagccctgcatcccagctctggggtgtgcagaggtttgtgtctccagggaacccacggctggagagaaatagggagatgcaggaagtgggggcccatggggcccccaagaagcggactctccaaggggtacccccaccccgctaccttccccacggacgggcccctcctggagcccataccctcctgtgaggccattccagtgtcttctagaaagactcgcttgccaggagtgcgttctttgttgaaaaatgccctgaagcgaaaagatgcaggtttatatggaacccccaccccctcccccactctcccactctgttcgttctgaatgtcttcacgagcgtgcatcagggcgcctggctcccccacctcagccagtgagtcagacacgggtttcgcagccatgtttcctggctccgaggacacgggtggcaggcccgttgcagcccagagccactggtccctacagggcgccgccacaccagcaggaaggaggatggctgtgtccggagcctggcggggaggcggcctccccagtatgtgagtgcagggatctgccagaaccacctggccctctgtagggcgtttaactggaaataccctcactgccaagtggagactggggcgtgtgccacattgccagccaccaggaaagcttttctttttctttttttttttttttttaaacaccaagagcacgtatagcatgggggaaagaacctaaatgtctctctgtcctgtgagctggtgaaaaacccagcatgagaacgcagtgtcaggtgtgggactccttctgcccctgcagtgggtgttacgggcggtgtgccctggcgagcaagctttgattcttggttctttgagctcgtttcagaggctgagtccccacatcagctttagttcttggacttccctgtattaagcaagaattaggagaatggctgtccctgcaggcgcctcccgtaaatcctgagctctctggcgcaatctgaaacttctcttctgttttctttggctgtatcagccgaaccaggagaggcctgggctgcgactaaggagaaagaaatcgggggtttctgagagcagatggtgcctttgtgggtgcagggcttttgtggaaattgtcagcctctacgggcagagtccggcatcccctccccagactgcctgctgtcaaaccacggagcagctggagcctgccctgtccacggcccgtttccacccgggcatgttcgtctctcatgacttcggcagaggcccctggtggccttcagtttcagtttctcatccaggaaggtaaccttgggcattggcagtgggtttccctatggcttggatccagattagaattgatctttgttttcactttccatagttaataacatgcaaaataatgagaagaatttattttaaggtgacagctatactggtccaacatcgcctgcttattgtcagggtacagaagtttaatactttcttaatccagtttttcaaacttctccctgtagaccgtaaggatgaattccacaataggatcctttttaaaatcgattttaaattgttgcctagtcctgccaaggttattatgtgcatctgttatttttccaatacatgtaaacagttgcagcatgatgctttgtttaatgtcctgttcttaagctcgttagagccagttttgaaacgtttggtcttaccgtgaacggaggctggcttggcttagccacgctgatgagtaagtgagggatgtctccatcttgagatcaccaggcaagagagttgcctgcaccaggtaagaggccaaagcccctggggtaacagtccccaccgctacccgaggtaaaacaataaaagctatgtggttg

SEQ ID NO: 377796 - DNA, 165 bp, Homo sapiens
taaagtcttagaggttaggttgagagaaggtggtggtcctggttcttacagtacagtattaagtttgtcaggcatctcatgtttgagaacttgattcctcagttatatttactaaaacaactccaaaagcaagaaggcaggaagtggtcagagctgtgtcccttt

SEQ ID NO: 377797 - DNA, 480 bp, Homo sapiens
tagagatggggtttcaccatgttggccaggctggtgttgaactcctgaccttaggtgatccacccgcctcggcctcccaaagtgtttggattacaggcgtgagccactgcgcccagtgctaataattttttaaaaaaatatctgtttgttagctggatgtggtgttcttgcacctgtagtcccagtcccaggtatttgggaggccgaggtaggagcatcacttgagcccaggagtgagttaatgcccagcctgcacaatatagtgagacctctgtctccaaaaaaaaaaaaaaaaaaaaaaaaaagcggttcaaaccaagatccagataaggttcataacttgtaattagttgagtagctcttgaagtcttttttagtctatagcttttccactcattttttcctgtactatttattttttgaagaaagcatgttcgttattaagagttttccagtcttggccgggcacagtgggtcaca

SEQ ID NO: 377798 - DNA, 572 bp, Homo sapiens
actgtaaagaatttaaaagtttattaaattattctagagacagaagatgtttcaagtactcaaaagtttatatttcaattggtcaattttatttaggtgtttattggtaaattacatataaaccattttatagctagaaaataggttcttctccccatgagtattctctaatgacataggtatggaaatgaacatgtatttaaatccatcgtacagaattagaagaagaatctccaattattaactggtccttggaattggctacacgtttggacagtcgactgtatgcactttggaaccggactgcaggagactgcctacttgattcagttctacaagctacctggggcatctatgacaaggactcagtgcttcggaaagccctgcatgacagcctgcatgactgttcacattggtgagctggcattctgccctgtttcaacccaggagtgcatttgctggattatttccttgtagtggtgggatactttttatgtcagttatattttctatggaaactggaggaaaaacagttcattttggacattaaaatactttgaacacgtccatgg

SEQ ID NO: 377799 - DNA, 3986 bp, Homo sapiens
ggcttaagcagtggtaacaacgcagagtacgcggggtgatggcctccctgaaattaaacatttctattagtggcttcccgttaatctcatccttcttagatcaaacctcgttatatctcctgcctatctcttttgcattccaaagttcagttttattaaatcccagggtctaagattttttctttgagaatttatctccagtgtttctatggaaattaaaaaagaaaattaggataattcaatgtcgaaatgttgcatgcatcttttgagaaatttatattttgtaggttgaaggacttgctttttgggcagcgtatttttggaggtggaatgtagttattttaataaccatgtcctaattatttatagcttcctgcctgacacagctcacttcaagaagtgcacaatgtcagaacgtggaattaagtgggcttgtgaatattgtacgtatgaaaactggccatctgcaatcaagtgtactatgtgtcgtgcccaaagacctagtggaacaattattacagaagatccatttaaaagtggttcaagtgatgttggtagagattgggatccttccagcaccgaaggaggaagtagtcctttgatatgtccagactctagtgcaagaccaagggtgaaatcttcgtatagcatggaaaatgcaaataagtggtcatgccacatgtgtacatatttgaactggccaagagcaatcagatgtacccagtgcttatcccaacgtaggaccaggagtcctacagaatctcctcagtcctcaggatctggctcaagaccagttgctttttctgttgatccttgtgaggaatacaatgatagaaataaactgaacactaggacacagcactggacttgctctgtttgcacatatgaaaactgggccaaggctaaaagatgtgttgtttgtgatcatcccagacctaataacattgaagcaatagaattggcagagactgaagaggcttcttcaataataaatgagcaagacagagctcgatggaggggaagttgcagtagtggtaatagccaaaggagatcacctcctgctacgaagcgggactctgaagtgaaaatggattttcagaggattgaattggctggtgctgtgggaagcaaggaggaacttgaagtagactttaaaaaactaaagcaaattaaaaacaggatgaaaaagactgattggctcttcctcaatgcttgtgtgggggttgtagaaggtgatttagctgccatagaagcatacaagtcatcaggaggagacattgcacgtcagctcaccgcagatgaagtacgcttgctgaatcgtccttctgcctttgatgttggctatactcttgtacacttggctatacgttttcagaggcaggatatgctagcaatattgcttacagaggtgtctcaacaagcagcaaagtgtattccagcaatggtgtgtcctgaactgacagaacaaatccggagagagatagctgcctctcttcatcagagaaagggggattttgcttgctatattctgactgaccttgtaacatttacattgccagcagatattgaagatttgcccccaacagtccaagaaaaattatttgatgaggtgcttgatagagacgttcaaaaagaattagaagaagaatctccaattattaactggtccttggaattggctacacgtttggacagtcgactgtatgcactttggaaccggactgcaggagactgcctacttgattcagttctacaagctacctggggcatctatgacaaggactcagtgcttcggaaagccctgcatgacagcctgcatgactgttcacattggttttacacacgctggaaagattgggaatcatggtattctcagagctttggtttacatttttccttgagagaagaacaatggcaagaagactgggcatttatactctctcttgctagtcagcctggagcaagcttggagcagacgcacatttttgtactggcacatattcttagacgaccaattatagtttatggagtaaaatattacaagagtttccggggagaaactttaggatatactcggtttcaaggtgtttatctgcctttgttgtgggaacagagtttttgttggaaaagtccgattgctctgggttatacgaggggccacttctctgctttggttgccatggaaaatgatggctatggcaaccgaggtgctggtgctaatctcaataccgatgatgatgtcaccatcacatttttgcctctggttgacagtgaaaggaagctactccatgtgcacttcctttctgctcaggagctaggtaatgaggaacagcaagaaaaactgctcagggagtggctggactgctgtgtgacggaggggggagttctggttgccatgcagaagagttctcggcggcgaaatcaccccctggtcactcagatggtagaaaaatggcttgaccgctaccgacagatccggccgtgtacatccctgtctgatggagaggaagatgaggatgatgaagatgaatgaaaaaaaaaatcaaacagcagaagaccaaggcatcagatctgtaatgaccctaaagttagtgtggtgctccaagcagagtcgacatcatggaatgaaccaaatctggcaggatctgctcggggaagtgttttcctggaccacacacaccttatggagataatgcctctgctgcgtgaggagacagagaactttagttggactacagtttgtaaaaaaaactaattttattaagacagaactttttttccttccaaattgtaaatctgtctataaatgtaacgcatgtggttgtgtaagacattgtttaataggaaaagttgtaccagcatcttcatattattgagaaaattttttccagcatgggcacttagaaaaagcacatggcaaatggctctttgttcctttcagatattatttcagtagaacctggcattctcctttcaccttaaaagatccatctaagtctcagatctggaaacgttttgtaccgattatccacagcaaaacaaaaataagcttttattttattaacaatttcgttcctcttgtgcccaatcaaatcttttaggaacaaactgcaagaaaagctaagaatgttttagagtgaactaaatacagacattgcttacttgttttgaagagggttttggttttggttattgtgtcttttaagttttctgatatgccccctttcaatatttagatatttatttgttgggaagaataccttaaaatgagggttcttattccagattctgggcagtggtctgtgagtagtttttttcctggatgaaaagggagcaagcccacttgtcactaaatgaattgtgtgaaatgtgctcacttggactccatcaacaatgtgctgctcccagattgccatgccagagggtcttcggattcttccttctatcacctctgctctaagcaaatcttgttagaagggcatgcctttgcttaggcagattgggaataccaattcactacagaataaagattttaaaaatgcaataaggtggcaaatgcattgtatgaagaatttctcagtgtttagtctgagaatttttgcatgttggttaattgtggccattctttaatttaaagttaaaactataatcttaggtagaacaacttttttataagaagtattatttgaccacttcaggtatacattcaatactgggtaaaaatttcagacctatctcaggaacacagaaatatttggtgtcctgataagcactttctagactattgatgtggccaggaatttggaaagacgacacacgcacgcacacacacacacacacacacacacacagttttttccttccctgtgatgaaaaaggctgtgaaaaccttaaagtatttgcttgcttcttgttttgtttagttgataatgaaatgtgtacaacctcaaatttgctgccagaatactaaaaatagaaaaataccc

SEQ ID NO: 377800 - DNA, 3940 bp, Homo sapiens
ggcttaagcagtggtaacaacgcagagtacgcggggtgatggcctccctgaaattaaacatttctattagtggcttcccgttaatctcatccttcttagatcaaacctcgttatatctcctgcctatctcttttgcattccaaagttcagttttattaaatcccagggtctaagattttttctttgagaatttatctccagtgtttctatggaaattaaaaaagaaaattaggataattcaatgtcgaaatgttgcatgcatcttttgagaaatttatattttgtaggttgaaggacttgctttttgggcagcgtatttttggaggtggaatgtagttattttaataaccatgtcctaattatttatagcttcctgcctgacacagctcacttcaagaagtgcacaatgtcagaacgtggaattaagtgggcttgtgaatattgtacgtatgaaaactggccatctgcaatcaagtgtactatgtgtcgtgcccaaagacctagtggaacaattattacagaagatccatttaaaagtggttcaagtgatgttggtagagattgggatccttccagcaccgaaggaggaagtagtcctttgatatgtccagactctagtgcaagaccaagggtgaaatcttcgtatagcatggaaaatgcaaataagtggtcatgccacatgtgtacatatttgaactggccaagagcaatcagatgtacccagtgcttatcccaacgtaggaccaggagtcctacagaatctcctcagtcctcaggatctggctcaagaccagttgctttttctgttgatccttgtgaggaatacaatgatagaaataaactgaacactaggacacagcactggacttgctctgtttgcacatatgaaaactgggccaaggctaaaagatgtgttgtttgtgatcatcccagacctaataacattgaagcaatagaattggcagagactgaagaggcttcttcaataataaatgagcaagacagagctcgatggaggggaagttgcagtagtggtaatagccaaaggagatcacctcctgctacgaagcgggactctgaagtgaaaatggattttcagaggattgaattggctggtgctgtgggaagcaaggaggaacttgaagtagactttaaaaaactaaagcaaattaaaaacaggatgaaaaagactgattggctcttcctcaatgcttgtgtgggggttgtagaaggtgatttagctgccatagaagcatacaagtcatcaggaggagacattgcacgtcagctcaccgcagatgaagtacgcttgctgaatcgtccttctgcctttgatgttggctatactcttgtacacttggctatacgttttcagaggcaggatatgctagcaatattgcttacagaggtgtctcaacaagcagcaaagtgtattccagcaatggtgtgtcctgaactgacagaacaaatccggagagagatagctgcctctcttcatcagagaaagggggattttgcttgctatattctgactgaccttgtaacatttacattgccagcagatattgaagatttgcccccaacagtccaagaaaaattatttgatgaggtgcttgatagagacgttcaaaaagaattagaagaagaatctccaattattaactggtccttggaattggctacacgtttggacagtcgactgtatgcactttggaaccggactgcaggagactgcctacttgattcagttctacaagctacctggggcatctatgacaaggactcagtgcttcggaaagccctgcatgacagcctgcatgactgttcacattggttttacacacgctggaaagattgggaatcatggtattctcagagctttggtttacatttttccttgagagaagaacaatggcaagaagactgggcatttatactctctcttgctagtcagcctggagcaagcttggagcagacgcacatttttgtactggcacatattcttagacgaccaattatagtttatggagtaaaatattacaagagtttccggggagaaactttaggatatactcggtttcaaggtgtttatctgcctttgttgtgggaacagagtttttgttggaaaagtccgattgctctgggttatacgaggggccacttctctgctttggttgccatggaaaatgatggctatggcaaccgaggtgctggtgctaatctcaataccgatgatgatgtcaccatcacatttttgcctctggttgacagtgaaaggaagctactccatgtgcacttcctttctgctcaggagctaggtaatgaggaacagcaagaaaaactgctcagggagtggctggactgctgtgtgacggaggggggagttctggttgccatgcagaagagttctcggcggcgaaatcaccccctggtcactcagatggtagaaaaatggcttgaccgctaccgacagatccggccgtgtacatccctgtctgatggagaggaagatgaggatgatgaagatgaatgaaaaaaaaaatcaaacagcagaagaccaaggcatcagatctgtaatgaccctaaagttagtgtggtgctccaagcagagtcgacatcatggaatgaaccaaatctggcaggatctgctcggggaagtgttttcctggaccacacacaccttatggagataatgcctctgctgcgtgaggagacagagaactttagttggactacagtttgtaaaaaaaactaattttattaagacagaactttttttccttccaaattgtaaatctgtctataaatgtaacgcatgtggttgtgtaagacattgtttaataggaaaagttgtaccagcatcttcatattattgagaaaattttttccagcatgggcacttagaaaaagcacatggcaaatggctctttgttcctttcagatattatttcagtagaacctggcattctcctttcaccttaaaagatccatctaagtctcagatctggaaacgttttgtaccgattatccacagcaaaacaaaaataagcttttattttattaacaatttcgttcctcttgtgcccaatcaaatcttttaggaacaaactgcaagaaaagctaagaatgttttagagtgaactaaatacagacattgcttacttgttttgaagagggttttggttttggttattgtgtcttttaagttttctgatatgccccctttcaatatttagatatttatttgttgggaagaataccttaaaatgagggttcttattccagattctgggcagtggtctgtgagtagtttttttcctggatgaaaagggagcaagcccacttgtcactaaatgaattgtgtgaaatgtgctcacttggactccatcaacaatgtgctgctcccagattgccatgccagagggtcttcggattcttccttctatcacctctgctctaagcaaatcttgttagaagggcatgcctttgcttaggcagattgggaataccaattcactacagaataaagattttaaaaatgcaataaggtggcaaatgcattgtatgaagaatttctcagtgtttagtctgagaatttttgcatgttggttaattgtggccattctttaatttaaagttaaaactataatcttaggtagaacaacttttttataagaagtattatttgaccacttcaggtatacattcaatactgggtaaaaatttcagacctatctcaggaacacagaaatatttggtgtcctgataagcactttctagactattgatgtggccaggaatttggaaagacgacacacgcacgcacacacacacacaccaatggcactgattttggtacacatcagtgccattggtgtgtgtgtacgtaactatatacatatgtgtgtgtgtgtacctacataatgtgtcatacccgtaa

SEQ ID NO: 377801 - DNA, 2939 bp, Homo sapiens
actgtaaagaatttaaaagtttattaaattattctagagacagaagatgtttcaagtactcaaaagtttatatttcaattggtcaattttatttaggtgtttattggtaaattacatataaaccattttatagctagaaaataggttcttctccccatgagtattctctaatgacataggtatggaaatgaacatgtatttaaatccatcgtacagaattagaagaagaatctccaattattaactggtccttggaattggctacacgtttggacagtcgactgtatgcactttggaaccggactgcaggagactgcctacttgattcagttctacaagctacctggggcatctatgacaaggactcagtgcttcggaaagccctgcatgacagcctgcatgactgttcacattggttttacacacgctggaaagattgggaatcatggtattctcagagctttggtttacatttttccttgagagaagaacaatggcaagaagactgggcatttatactctctcttgctagtcagcctggagcaagcttggagcagacgcacatttttgtactggcacatattcttagacgaccaattatagtttatggagtaaaatattacaagagtttccggggagaaactttaggatatactcggtttcaaggtgtttatctgcctttgttgtgggaacagagtttttgttggaaaagtccgattgctctgggttatacgaggggccacttctctgctttggttgccatggaaaatgatggctatggcaaccgaggtgctggtgctaatctcaataccgatgatgatgtcaccatcacatttttgcctctggttgacagtgaaaggaagctactccatgtgcacttcctttctgctcaggagctaggtaatgaggaacagcaagaaaaactgctcagggagtggctggactgctgtgtgacggaggggggagttctggttgccatgcagaagagttctcggcggcgaaatcaccccctggtcactcagatggtagaaaaatggcttgaccgctaccgacagatccggccgtgtacatccctgtctgatggagaggaagatgaggatgatgaagatgaatgaaaaaaaaaatcaaacagcagaagaccaaggcatcagatctgtaatgaccctaaagttagtgtggtgctccaagcagagtcgacatcatggaatgaaccaaatctggcaggatctgctcggggaagtgttttcctggaccacacacaccttatggagataatgcctctgctgcgtgaggagacagagaactttagttggactacagtttgtaaaaaaaactaattttattaagacagaactttttttccttccaaattgtaaatctgtctataaatgtaacgcatgtggttgtgtaagacattgtttaataggaaaagttgtaccagcatcttcatattattgagaaaattttttccagcatgggcacttagaaaaagcacatggcaaatggctctttgttcctttcagatattatttcagtagaacctggcattctcctttcaccttaaaagatccatctaagtctcagatctggaaacgttttgtaccgattatccacagcaaaacaaaaataagcttttattttattaacaatttcgttcctcttgtgcccaatcaaatcttttaggaacaaactgcaagaaaagctaagaatgttttagagtgaactaaatacagacattgcttacttgttttgaagagggttttggttttggttattgtgtcttttaagttttctgatatgccccctttcaatatttagatatttatttgttgggaagaataccttaaaatgagggttcttattccagattctgggcagtggtctgtgagtagtttttttcctggatgaaaagggagcaagcccacttgtcactaaatgaattgtgtgaaatgtgctcacttggactccatcaacaatgtgctgctcccagattgccatgccagagggtcttcggattcttccttctatcacctctgctctaagcaaatcttgttagaagggcatgcctttgcttaggcagattgggaataccaattcactacagaataaagattttaaaaatgcaataaggtggcaaatgcattgtatgaagaatttctcagtgtttagtctgagaatttttgcatgttggttaattgtggccattctttaatttaaagttaaaactataatcttaggtagaacaacttttttataagaagtattatttgaccacttcaggtatacattcaatactgggtaaaaatttcagacctatctcaggaacacagaaatatttggtgtcctgataagcactttctagactattgatgtggccaggaatttggaaagacgacacacgcacgcacacacacacacacacacacacacacagttttttccttccctgtgatgaaaaaggctgtgaaaaccttaaagtatttgcttgcttcttgttttgtttagttgataatgaaatgtgtacaacctcaaatttgctgccagaatactaaaaatagaaaaatacccacaaaactgtcatgtctttagttctttccccccgaaaactcagtaaaaaggtgttcccaggatgaaaagatcattttttgctgcatgctaaatcttgcaggaaaaatgattttttagtacgattctgtagaaatgaatctttgatataatgtaaatgctgctgtttgtttcaagtggtgaatgtgttgttaaaaattggctgtttgctttcattttggccaataagtaatcaagtttgtagaaaatgttagcattctgactacttagcatctgtagtaatttctctatgtatagggataattttttagtgggcagagatcctgttctagttgcctgttaagcaaaatctgccctcccaattgaaaaagcca

SEQ ID NO: 377802 - DNA, 2468 bp, Homo sapiens
ctggtacaggtcccgaatcctttggatcagaagactgggcatttatactctctcttgctagtcagcctggagcaagcttggagcagacgcacatttttgtactggcacatattcttagacgaccaattatagtttatggagtaaaatattacaagagtttccggggagaaactttaggatatactcggtttcaaggtgtttatctgcctttgttgtgggaacagagtttttgttggaaaagtccgattgctctgggttatacgaggggccacttctctgctttggttgccatggaaaatgatggctatggcaaccgaggtgctggtgctaatctcaataccgatgatgatgtcaccatcacatttttgcctctggttgacagtgaaaggaagctactccatgtgcacttcctttctgctcaggagctaggtaatgaggaacagcaagaaaaactgctcagggagtggctggactgctgtgtgacggaggggggagttctggttgccatgcagaagagttctcggcggcgaaatcaccccctggtcactcagatggtagaaaaatggcttgaccgctaccgacagatccggccgtgtacatccctgtctgatggagaggaagatgaggatgatgaagatgaatgaaaaaaaaaatcaaacagcagaagaccaaggcatcagatctgtaatgaccctaaagttagtgtggtgctccaagcagagtcgacatcatggaatgaaccaaatctggcaggatctgctcggggaagtgttttcctggaccacacacaccttatggagataatgcctctgctgcgtgaggagacagagaactttagttggactacagtttgtaaaaaaaactaattttattaagacagaactttttttccttccaaattgtaaatctgtctataaatgtaacgcatgtggttgtgtaagacattgtttaataggaaaagttgtaccagcatcttcatattattgagaaaattttttccagcatgggcacttagaaaaagcacatggcaaatggctctttgttcctttcagatattatttcagtagaacctggcattctcctttcaccttaaaagatccatctaagtctcagatctggaaacgttttgtaccgattatccacagcaaaacaaaaataagcttttattttattaacaatttcgttcctcttgtgcccaatcaaatcttttaggaacaaactgcaagaaaagctaagaatgttttagagtgaactaaatacagacattgcttacttgttttgaagagggttttggttttggttattgtgtcttttaagttttctgatatgccccctttcaatatttagatatttatttgttgggaagaataccttaaaatgagggttcttattccagattctgggcagtggtctgtgagtagtttttttcctggatgaaaagggagcaagcccacttgtcactaaatgaattgtgtgaaatgtgctcacttggactccatcaacaatgtgctgctcccagattgccatgccagagggtcttcggattcttccttctatcacctctgctctaagcaaatcttgttagaagggcatgcctttgcttaggcagattgggaataccaattcactacagaataaagattttaaaaatgcaataaggtggcaaatgcattgtatgaagaatttctcagtgtttagtctgagaatttttgcatgttggttaattgtggccattctttaatttaaagttaaaactataatcttaggtagaacaacttttttataagaagtattatttgaccacttcaggtatacattcaatactgggtaaaaatttcagacctatctcaggaacacagaaatatttggtgtcctgataagcactttctagactattgatgtggccaggaatttggaaagacgacacacgcacgcacacacacacacacacacacacacacagttttttccttccctgtgatgaaaaaggctgtgaaaaccttaaagtatttgcttgcttcttgttttgtttagttgataatgaaatgtgtacaacctcaaatttgctgccagaatactaaaaatagaaaaatacccacaaaactgtcatgtctttagttctttccccccgaaaactcagtaaaaaggtgttcccaggatgaaaagatcattttttgctgcatgctaaatcttgcaggaaaaatgattttttagtacgattctgtagaaatgaatctttgatataatgtaaatgctgctgtttgtttcaagtggtgaatgtgttgttaaaaattggctgtttgctttcattttggccaataagtaatcaagtttgtagaaaatgttagcattctgactacttagcatctgtagtaatttctctatgtatagggataattttttagtgggcagagatcctgttctagttgcctgttaagcaaaatctgccctcccaattgaaaaagcca

SEQ ID NO: 377803 - DNA, 2822 bp, Homo sapiens
taaactaattgtggacagtggaaaataaccagtctcatcattagcgtttgaagtttgaaaatttggttgtcggtaaatcaaattctgactaaagatgttaaaggatgttacaaggtatctgctagtggaagagggaggcatttttcattagaaaaatacattaccaaccagacaaaataaaattattaattgtttcacagactgcttaaagactgcattaaataaaaatgatcagaactttaaatgttttatttatagaagactatttatttatttttttactatcctgcttttttaggttttacacacgctggaaagattgggaatcatggtattctcagagctttggtttacatttttccttgagagaagaacaatggcaagaagactgggcatttatactctctcttgctagtcagcctggagcaagcttggagcagacgcacatttttgtactggcacatattcttagacgaccaattatagtttatggagtaaaatattacaagagtttccggggagaaactttaggatatactcggtttcaaggtgtttatctgcctttgttgtgggaacagagtttttgttggaaaagtccgattgctctgggttatacgaggggccacttctctgctttggttgccatggaaaatgatggctatggcaaccgaggtgctggtgctaatctcaataccgatgatgatgtcaccatcacatttttgcctctggttgacagtgaaaggaagctactccatgtgcacttcctttctgctcaggagctaggtaatgaggaacagcaagaaaaactgctcagggagtggctggactgctgtgtgacggaggggggagttctggttgccatgcagaagagttctcggcggcgaaatcaccccctggtcactcagatggtagaaaaatggcttgaccgctaccgacagatccggccgtgtacatccctgtctgatggagaggaagatgaggatgatgaagatgaatgaaaaaaaaaatcaaacagcagaagaccaaggcatcagatctgtaatgaccctaaagttagtgtggtgctccaagcagagtcgacatcatggaatgaaccaaatctggcaggatctgctcggggaagtgttttcctggaccacacacaccttatggagataatgcctctgctgcgtgaggagacagagaactttagttggactacagtttgtaaaaaaaactaattttattaagacagaactttttttccttccaaattgtaaatctgtctataaatgtaacgcatgtggttgtgtaagacattgtttaataggaaaagttgtaccagcatcttcatattattgagaaaattttttccagcatgggcacttagaaaaagcacatggcaaatggctctttgttcctttcagatattatttcagtagaacctggcattctcctttcaccttaaaagatccatctaagtctcagatctggaaacgttttgtaccgattatccacagcaaaacaaaaataagcttttattttattaacaatttcgttcctcttgtgcccaatcaaatcttttaggaacaaactgcaagaaaagctaagaatgttttagagtgaactaaatacagacattgcttacttgttttgaagagggttttggttttggttattgtgtcttttaagttttctgatatgccccctttcaatatttagatatttatttgttgggaagaataccttaaaatgagggttcttattccagattctgggcagtggtctgtgagtagtttttttcctggatgaaaagggagcaagcccacttgtcactaaatgaattgtgtgaaatgtgctcacttggactccatcaacaatgtgctgctcccagattgccatgccagagggtcttcggattcttccttctatcacctctgctctaagcaaatcttgttagaagggcatgcctttgcttaggcagattgggaataccaattcactacagaataaagattttaaaaatgcaataaggtggcaaatgcattgtatgaagaatttctcagtgtttagtctgagaatttttgcatgttggttaattgtggccattctttaatttaaagttaaaactataatcttaggtagaacaacttttttataagaagtattatttgaccacttcaggtatacattcaatactgggtaaaaatttcagacctatctcaggaacacagaaatatttggtgtcctgataagcactttctagactattgatgtggccaggaatttggaaagacgacacacgcacgcacacacacacacacacacacacacacagttttttccttccctgtgatgaaaaaggctgtgaaaaccttaaagtatttgcttgcttcttgttttgtttagttgataatgaaatgtgtacaacctcaaatttgctgccagaatactaaaaatagaaaaatacccacaaaactgtcatgtctttagttctttccccccgaaaactcagtaaaaaggtgttcccaggatgaaaagatcattttttgctgcatgctaaatcttgcaggaaaaatgattttttagtacgattctgtagaaatgaatctttgatataatgtaaatgctgctgtttgtttcaagtggtgaatgtgttgttaaaaattggctgtttgctttcattttggccaataagtaatcaagtttgtagaaaatgttagcattctgactacttagcatctgtagtaatttctctatgtatagggataattttttagtgggcagagatcctgttctagttgcctgttaagcaaaatctgccctcccaattgaaaaagcca

SEQ ID NO: 377804 - DNA, 2579 bp, Homo sapiens
gggagtgaaagggtgctgtagaccagacaggggaggtggtgagaaggtacaaaaacaacgctctttcagaaagccagtattcttataaaagtattggtcttttatttaatatactagtaattataaaacgtttataatcacaacatgaagaaaaaaagttcatagaccgtaacttgtgtaatttcagcttgtacataattgactaagtaaacttaccttgtcatgtgtttgaagctgtggcttgccaggatcagtttattaggacatttgttttttattttatctaacaaattaccctctagtgtgctcctctttagtttttttctgagaaatttcccatttatgtctttttaaatttaaccagagcaaactggactttaatcacaaaacttccaagaggtcaaaaccatgtgaaaagttgattgctttggccttttcatgagttagcataccagctgtaggtttccatgtcacattcctaccaagtctctgatctgttgtatgattttccctttgtcttcatattcctccaaaagctaggtaatgaggaacagcaagaaaaactgctcagggagtggctggactgctgtgtgacggaggggggagttctggttgccatgcagaagagttctcggcggcgaaatcaccccctggtcactcagatggtagaaaaatggcttgaccgctaccgacagatccggccgtgtacatccctgtctgatggagaggaagatgaggatgatgaagatgaatgaaaaaaaaaatcaaacagcagaagaccaaggcatcagatctgtaatgaccctaaagttagtgtggtgctccaagcagagtcgacatcatggaatgaaccaaatctggcaggatctgctcggggaagtgttttcctggaccacacacaccttatggagataatgcctctgctgcgtgaggagacagagaactttagttggactacagtttgtaaaaaaaactaattttattaagacagaactttttttccttccaaattgtaaatctgtctataaatgtaacgcatgtggttgtgtaagacattgtttaataggaaaagttgtaccagcatcttcatattattgagaaaattttttccagcatgggcacttagaaaaagcacatggcaaatggctctttgttcctttcagatattatttcagtagaacctggcattctcctttcaccttaaaagatccatctaagtctcagatctggaaacgttttgtaccgattatccacagcaaaacaaaaataagcttttattttattaacaatttcgttcctcttgtgcccaatcaaatcttttaggaacaaactgcaagaaaagctaagaatgttttagagtgaactaaatacagacattgcttacttgttttgaagagggttttggttttggttattgtgtcttttaagttttctgatatgccccctttcaatatttagatatttatttgttgggaagaataccttaaaatgagggttcttattccagattctgggcagtggtctgtgagtagtttttttcctggatgaaaagggagcaagcccacttgtcactaaatgaattgtgtgaaatgtgctcacttggactccatcaacaatgtgctgctcccagattgccatgccagagggtcttcggattcttccttctatcacctctgctctaagcaaatcttgttagaagggcatgcctttgcttaggcagattgggaataccaattcactacagaataaagattttaaaaatgcaataaggtggcaaatgcattgtatgaagaatttctcagtgtttagtctgagaatttttgcatgttggttaattgtggccattctttaatttaaagttaaaactataatcttaggtagaacaacttttttataagaagtattatttgaccacttcaggtatacattcaatactgggtaaaaatttcagacctatctcaggaacacagaaatatttggtgtcctgataagcactttctagactattgatgtggccaggaatttggaaagacgacacacgcacgcacacacacacacacacacacacacacagttttttccttccctgtgatgaaaaaggctgtgaaaaccttaaagtatttgcttgcttcttgttttgtttagttgataatgaaatgtgtacaacctcaaatttgctgccagaatactaaaaatagaaaaatacccacaaaactgtcatgtctttagttctttccccccgaaaactcagtaaaaaggtgttcccaggatgaaaagatcattttttgctgcatgctaaatcttgcaggaaaaatgattttttagtacgattctgtagaaatgaatctttgatataatgtaaatgctgctgtttgtttcaagtggtgaatgtgttgttaaaaattggctgtttgctttcattttggccaataagtaatcaagtttgtagaaaatgttagcattctgactacttagcatctgtagtaatttctctatgtatagggataattttttagtgggcagagatcctgttctagttgcctgttaagcaaaatctgccctcccaattgaaaaagcca

SEQ ID NO: 377805 - DNA, 3857 bp, Homo sapiens
ggcttaagcagtggtaacaacgcagagtacgcggggtgatggcctccctgaaattaaacatttctattagtggcttcccgttaatctcatccttcttagatcaaacctcgttatatctcctgcctatctcttttgcattccaaagttcagttttattaaatcccagggtctaagattttttctttgagaatttatctccagtgtttctatggaaattaaaaaagaaaattaggataattcaatgtcgaaatgttgcatgcatcttttgagaaatttatattttgtaggttgaaggacttgctttttgggcagcgtatttttggaggtggaatgtagttattttaataaccatgtcctaattatttatagcttcctgcctgacacagctcacttcaagaagtgcacaatgtcagaacgtggaattaagtgggcttgtgaatattgtacgtatgaaaactggccatctgcaatcaagtgtactatgtgtcgtgcccaaagacctagtggaacaattattacagaagatccatttaaaagtggttcaagtgatgttggtagagattgggatccttccagcaccgaaggaggaagtagtcctttgatatgtccagactctagtgcaagaccaagggtgaaatcttcgtatagcatggaaaatgcaaataagtggtcatgccacatgtgtacatatttgaactggccaagagcaatcagatgtacccagtgcttatcccaacgtaggaccaggagtcctacagaatctcctcagtcctcaggatctggctcaagaccagttgctttttctgttgatccttgtgaggaatacaatgatagaaataaactgaacactaggacacagcactggacttgctctgtttgcacatatgaaaactgggccaaggctaaaagatgtgttgtttgtgatcatcccagacctaataacattgaagcaatagaattggcagagactgaagaggcttcttcaataataaatgagcaagacagagctcgatggaggggaagttgcagtagtggtaatagccaaaggagatcacctcctgctacgaagcgggactctgaagtgaaaatggattttcagaggattgaattggctggtgctgtgggaagcaaggaggaacttgaagtagactttaaaaaactaaagcaaattaaaaacaggatgaaaaagactgattggctcttcctcaatgcttgtgtgggggttgtagaaggtgatttagctgccatagaagcatacaagtcatcaggaggagacattgcacgtcagctcaccgcagatgaagtacgcttgctgaatcgtccttctgcctttgatgttggctatactcttgtacacttggctatacgttttcagaggcaggatatgctagcaatattgcttacagaggtgtctcaacaagcagcaaagtgtattccagcaatggtgtgtcctgaactgacagaacaaatccggagagagatagctgcctctcttcatcagagaaagggggattttgcttgctatattctgactgaccttgtaacatttacattgccagcagatattgaagatttgcccccaacagtccaagaaaaattatttgatgaggtgcttgatagagacgttcaaaaagaattagaagaagaatctccaattattaactggtccttggaattggctacacgtttggacagtcgactgtatgcactttggaaccggactgcaggagactgcctacttgattcagttctacaagctacctggggcatctatgacaaggactcagtgcttcggaaagccctgcatgacagcctgcatgactgttcacattggttttacacacgctggaaagattgggaatcatggtattctcagagctttggtttacatttttccttgagagaagaacaatggcaagaagactgggcatttatactctctcttgctagtcagcctggagcaagcttggagcagacgcacatttttgtactggcacatattcttagacgaccaattatagtttatggagtaaaatattacaagagtttccggggagaaactttaggatatactcggtttcaaggtgtttatctgcctttgttgtgggaacagagtttttgttggaaaagtccgattgctctgggttatacgaggggccacttctctgctttggttgccatggaaaatgatggctatggcaaccgaggtgctggtgctaatctcaataccgatgatgatgtcaccatcacatttttgcctctggttgacagtgaaaggaagctactccatgtgcacttcctttctgctcaggagctaggtaatgaggaacagcaagaaaaactgctcagggagtggctggactgctgtgtgacggaggggggagttctggttgccatgcagaagagttctcggcggcgaaatcaccccctggtcactcagatggtagaaaaatggcttgaccgctaccgacagatccggccgtgtacatccctgtctgatggagaggaagatgaggatgatgaagatgaatgaaaaaaaaaatcaaacagcagaagaccaaggcatcagatctgtaatgaccctaaagttagtgtggtgctccaagcagagtcgacatcatggaatgaaccaaatctggcaggatctgctcggggaagtgttttcctggaccacacacaccttatggagataatgcctctgctgcgtgaggagacagagaactttagttggactacagtttgtaaaaaaaactaattttattaagacagaactttttttccttccaaattgtaaatctgtctataaatgtaacgcatgtggttgtgtaagacattgtttaataggaaaagttgtaccagcatcttcatattattgagaaaattttttccagcatgggcacttagaaaaagcacatggcaaatggctctttgttcctttcagatattatttcagtagaacctggcattctcctttcaccttaaaagatccatctaagtctcagatctggaaacgttttgtaccgattatccacagcaaaacaaaaataagcttttattttattaacaatttcgttcctcttgtgcccaatcaaatcttttaggaacaaagagccagtttgccatgtgctttttctaagtgcccatgctggaaaaaataatcaacaacaacctatttagctgttccccaaccttttcctccgaccccctaacaaaccccctcctaatactaactacctgactcctacccctcacaatcatggcaagccaacgccacttatccagtgaaccactatcacgaaaaaaactctacctctctatactaatctccctacaaatctccttaattataacattcacagccacagaactaatcatattttatattcttcttcgaaacacacttatcccatcttgggtatcatcacccgatgaggcaaacagccagaacgcctgaacgcaggcaccatacttcctattctacacctagtatgctccccttccctatcatcgcactaatttacactcacaaaaccctaggttcactaaaacattctaatactccatctcatgccaagaaatattaatcttagcaaaaacttatatgactagcttaacaagctttatagtaagatactccttagggaccactaataatcctaagccagtgtagccccctgcggtcataatatgcggcgaactataaaaagggggggataagctcacaattttaccccgtgtaaaataataccctttttttcataggaaaataaggcaccgcgtggaacaactctgtttttacaaccgtggtaacccacgcggttagttaatatattactgaccatctattttttttcttt

SEQ ID NO: 377806 - DNA, 1732 bp, Homo sapiens
tacagtttgtaaaaaaaactgtagtccaactaaagttctctgtctcctcacgcagcagaggcattatctccataaggtgtgtgtggagacagagaactttagttggactacagtttgtaaaaaaaactaattttattaagacagaactttttttccttccaaattgtaaatctgtctataaatgtaacgcatgtggttgtgtaagacattgtttaataggaaaagttgtaccagcatcttcatattattgagaaaattttttccagcatgggcacttagaaaaagcacatggcaaatggctctttgttcctttcagatattatttcagtagaacctggcattctcctttcaccttaaaagatccatctaagtctcagatctggaaacgttttgtaccgattatccacagcaaaacaaaaataagcttttattttattaacaatttcgttcctcttgtgcccaatcaaatcttttaggaacaaactgcaagaaaagctaagaatgttttagagtgaactaaatacagacattgcttacttgttttgaagagggttttggttttggttattgtgtcttttaagttttctgatatgccccctttcaatatttagatatttatttgttgggaagaataccttaaaatgagggttcttattccagattctgggcagtggtctgtgagtagtttttttcctggatgaaaagggagcaagcccacttgtcactaaatgaattgtgtgaaatgtgctcacttggactccatcaacaatgtgctgctcccagattgccatgccagagggtcttcggattcttccttctatcacctctgctctaagcaaatcttgttagaagggcatgcctttgcttaggcagattgggaataccaattcactacagaataaagattttaaaaatgcaataaggtggcaaatgcattgtatgaagaatttctcagtgtttagtctgagaatttttgcatgttggttaattgtggccattctttaatttaaagttaaaactataatcttaggtagaacaacttttttataagaagtattatttgaccacttcaggtatacattcaatactgggtaaaaatttcagacctatctcaggaacacagaaatatttggtgtcctgataagcactttctagactattgatgtggccaggaatttggaaagacgacacacgcacgcacacacacacacacacacacacacacagttttttccttccctgtgatgaaaaaggctgtgaaaaccttaaagtatttgcttgcttcttgttttgtttagttgataatgaaatgtgtacaacctcaaatttgctgccagaatactaaaaatagaaaaatacccacaaaactgtcatgtctttagttctttccccccgaaaactcagtaaaaaggtgttcccaggatgaaaagatcattttttgctgcatgctaaatcttgcaggaaaaatgattttttagtacgattctgtagaaatgaatctttgatataatgtaaatgctgctgtttgtttcaagtggtgaatgtgttgttaaaaattggctgtttgctttcattttggccaataagtaatcaagtttgtagaaaatgttagcattctgactacttagcatctgtagtaatttctctatgtatagggataattttttagtgggcagagatcctgttctagttgcctgttaagcaaaatctgccctcccaattgaaaaagcca

SEQ ID NO: 377807 - DNA, 2433 bp, Homo sapiens
tagaactagtcctcgactcgtagccgcgggctgcgcggggagtcgccgctgccgccgccgccgccgccgccgccgccgccgccaagcgcccgtcggacggggaggaggagcaggagctggaggaggagccgccgccgccagcttcctgcctgacacagctcacttcaagaagtgcacaatgtcagaacgtggaattaagtgggcttgtgaatattgtacgtatgaaaactggccatctgcaatcaagtgtactatgtgtcgtgcccaaagacctagtggaacaattattacagaagatccatttaaaagtggttcaagtgatgttggtagagattgggatccttccagcaccgaaggaggaagtagtcctttgatatgtccagactctagtgcaagaccaagggtgaaatcttcgtatagcatggaaaatgcaaataagtggtcatgccacatgtgtacatatttgaactggccaagagcaatcagatgtacccagtgcttatcccaacgtaggaccaggagtcctacagaatctcctcagtcctcaggatctggctcaagaccagttgctttttctgttgatccttgtgaggaatacaatgatagaaataaactgaacactaggacacagcactggacttgctctgtttgcacatatgaaaactgggccaaggctaaaagatgtgttgtttgtgatcatcccagacctaataacattgaagcaatagaattggcagagactgaagaggcttcttcaataataaatgagcaagacagagctcgatggaggggaagttgcagtagtggtaatagccaaaggagatcacctcctgctacgaagcgggactctgaagtgaaaatggattttcagaggattgaattggctggtgctgtgggaagcaaggaggaacttgaagtagactttaaaaaactaaagcaaattaaaaacaggatgaaaaagactgattggctcttcctcaatgcttgtgtgggggttgtagaaggtgatttagctgccatagaagcatacaagtcatcaggaggagacattgcacgtcagctcaccgcagatgaagtacgcttgctgaatcgtccttctgcctttgatgttggctatactcttgtacacttggctatacgttttcagaggcaggatatgctagcaatattgcttacagaggtgtctcaacaagcagcaaagtgtattccagcaatggtgtgtcctgaactgacagaacaaatccggagagagatagctgcctctcttcatcagagaaagggggattttgcttgctatattctgactgaccttgtaacatttacattgccagcagatattgaagatttgcccccaacagtccaagaaaaattatttgatgaggtgcttgatagagacgttcaaaaagaattagaagaagaatctccaattattaactggtccttggaattggctacacgtttggacagtcgactgtatgcactttggaaccggactgcaggagactgcctacttgattcagttctacaagctacctggggcatctatgacaaggactcagtgcttcggaaagccctgcatgacagcctgcatgactgttcacattggttttacacacgctggaaagattgggaatcatggtattctcagagctttggtttacatttttccttgagagaagaacaatggcaagaagactgggcatttatactctctcttgctagtcagcctggagcaagcttggagcagacgcacatttttgtactggcacatattcttagacgaccaattatagtttatggagtaaaatattacaagagtttccggggagaaactttaggatatactcggtttcaaggtgtttatctgcctttgttgtgggaacagagtttttgttggaaaagtccgattgctctgggttatacgaggggccacttctctgctttggttgccatggaaaatgatggctatggcaaccgaggtgctggtgctaatctcaataccgatgatgatgtcaccatcacatttttgcctctggttgacagtgaaaggaagctactccatgtgcacttcctttctgctcaggagctaggtaatgaggaacagcaagaaaaactgctcagggagtggctggactgctgtgtgacggaggggggagttctggttgccatgcagaagagttctcggcggcgaaatcaccccctggtcactcagatggtagaaaaatggcttgaccgctaccgacagatccggccgtgtacatccctgtctgatggagaggaagatgaggatgatgaagatgaatgaaaaaaaaaatcaaacatatacatacatacagtggaatattattcagcttccaaaaggaagaaaatgtctatatagcatatagacatatgctataacatggatgcaccttgagtacaacctgccggtgg

SEQ ID NO: 377808 - DNA, 1762 bp, Homo sapiens
tagaactagtcctcgactcgtagccgcgggctgcgcggggagtcgccgctgccgccgccgccgccgccgccgccgccgccgccaagcgcccgtcggacggggaggaggagcaggagctggaggaggagccgccgccgccagcttcctgcctgacacagctcacttcaagaagtgcacaatgtcagaacgtggaattaagtgggcttgtgaatattgtacgtatgaaaactggccatctgcaatcaagtgtactatgtgtcgtgcccaaagacctagtggaacaattattacagaagatccatttaaaagtggttcaagtgatgttggtagagattgggatccttccagcaccgaaggaggaagtagtcctttgatatgtccagactctagtgcaagaccaagggtgaaatcttcgtatagcatggaaaatgcaaataagtggtcatgccacatgtgtacatatttgaactggccaagagcaatcagatgtacccagtgcttatcccaacgtaggaccaggagtcctacagaatctcctcagtcctcaggatctggctcaagaccagttgctttttctgttgatccttgtgaggaatacaatgatagaaataaactgaacactaggacacagcactggacttgctctgtttgcacatatgaaaactgggccaaggctaaaagatgtgttgtttgtgatcatcccagacctaataacattgaagcaatagaattggcagagactgaagaggcttcttcaataataaatgagcaagacagagctcgatggaggggaagttgcagtagtggtaatagccaaaggagatcacctcctgctacgaagcgggactctgaagtgaaaatggattttcagaggattgaattggctggtgctgtgggaagcaaggaggaacttgaagtagactttaaaaaactaaagcaaattaaaaacaggatgaaaaagactgattggctcttcctcaatgcttgtgtgggggttgtagaaggtgatttagctgccatagaagcatacaagtcatcaggaggagacattgcacgtcagctcaccgcagatgaagtacgcttgctgaatcgtccttctgcctttgatgttggctatactcttgtacacttggctatacgttttcagaggcaggatatgctagcaatattgcttacagaggtgtctcaacaagcagcaaagtgtattccagcaatggtgtgtcctgaactgacagaacaaatccggagagagatagctgcctctcttcatcagagaaagggggattttgcttgctatattctgactgaccttgtaacatttacattgccagcagatattgaagatttgcccccaacagtccaagaaaaattatttgatgaggtgcttgatagagacgttcaaaaagaattagaagaagaatctccaattattaactggtccttggaattggctacacgtttggacagtcgactgtatgcactttggaaccggactgcaggagactgcctacttgattcagttctacaagctacctggggcatctatgacaaggactcagtgcttcggaaagccctgcatgacagcctgcatgactgttcacattggtgagctggcattctgccctgtttcaacccaggagtgcatttgctggattatttccttgtagtggtgggatactttttatgtcagttatattttctatggaaactggaggaaaaacagttcattttggacattaaaatactttgaacacgtccatgg

SEQ ID NO: 377809 - DNA, 4357 bp, Homo sapiens
ggcttaagcagtggtaacaacgcagagtacgcggggtgatggcctccctgaaattaaacatttctattagtggcttcccgttaatctcatccttcttagatcaaacctcgttatatctcctgcctatctcttttgcattccaaagttcagttttattaaatcccagggtctaagattttttctttgagaatttatctccagtgtttctatggaaattaaaaaagaaaattaggataattcaatgtcgaaatgttgcatgcatcttttgagaaatttatattttgtaggttgaaggacttgctttttgggcagcgtatttttggaggtggaatgtagttattttaataaccatgtcctaattatttatagcttcctgcctgacacagctcacttcaagaagtgcacaatgtcagaacgtggaattaagtgggcttgtgaatattgtacgtatgaaaactggccatctgcaatcaagtgtactatgtgtcgtgcccaaagacctagtggaacaattattacagaagatccatttaaaagtggttcaagtgatgttggtagagattgggatccttccagcaccgaaggaggaagtagtcctttgatatgtccagactctagtgcaagaccaagggtgaaatcttcgtatagcatggaaaatgcaaataagtggtcatgccacatgtgtacatatttgaactggccaagagcaatcagatgtacccagtgcttatcccaacgtaggaccaggagtcctacagaatctcctcagtcctcaggatctggctcaagaccagttgctttttctgttgatccttgtgaggaatacaatgatagaaataaactgaacactaggacacagcactggacttgctctgtttgcacatatgaaaactgggccaaggctaaaagatgtgttgtttgtgatcatcccagacctaataacattgaagcaatagaattggcagagactgaagaggcttcttcaataataaatgagcaagacagagctcgatggaggggaagttgcagtagtggtaatagccaaaggagatcacctcctgctacgaagcgggactctgaagtgaaaatggattttcagaggattgaattggctggtgctgtgggaagcaaggaggaacttgaagtagactttaaaaaactaaagcaaattaaaaacaggatgaaaaagactgattggctcttcctcaatgcttgtgtgggggttgtagaaggtgatttagctgccatagaagcatacaagtcatcaggaggagacattgcacgtcagctcaccgcagatgaagtacgcttgctgaatcgtccttctgcctttgatgttggctatactcttgtacacttggctatacgttttcagaggcaggatatgctagcaatattgcttacagaggtgtctcaacaagcagcaaagtgtattccagcaatggtgtgtcctgaactgacagaacaaatccggagagagatagctgcctctcttcatcagagaaagggggattttgcttgctatattctgactgaccttgtaacatttacattgccagcagatattgaagatttgcccccaacagtccaagaaaaattatttgatgaggtgcttgatagagacgttcaaaaagaattagaagaagaatctccaattattaactggtccttggaattggctacacgtttggacagtcgactgtatgcactttggaaccggactgcaggagactgcctacttgattcagttctacaagctacctggggcatctatgacaaggactcagtgcttcggaaagccctgcatgacagcctgcatgactgttcacattggttttacacacgctggaaagattgggaatcatggtattctcagagctttggtttacatttttccttgagagaagaacaatggcaagaagactgggcatttatactctctcttgctagtcagcctggagcaagcttggagcagacgcacatttttgtactggcacatattcttagacgaccaattatagtttatggagtaaaatattacaagagtttccggggagaaactttaggatatactcggtttcaaggtgtttatctgcctttgttgtgggaacagagtttttgttggaaaagtccgattgctctgggttatacgaggggccacttctctgctttggttgccatggaaaatgatggctatggcaaccgaggtgctggtgctaatctcaataccgatgatgatgtcaccatcacatttttgcctctggttgacagtgaaaggaagctactccatgtgcacttcctttctgctcaggagctaggtaatgaggaacagcaagaaaaactgctcagggagtggctggactgctgtgtgacggaggggggagttctggttgccatgcagaagagttctcggcggcgaaatcaccccctggtcactcagatggtagaaaaatggcttgaccgctaccgacagatccggccgtgtacatccctgtctgatggagaggaagatgaggatgatgaagatgaatgaaaaaaaaaatcaaacagcagaagaccaaggcatcagatctgtaatgaccctaaagttagtgtggtgctccaagcagagtcgacatcatggaatgaaccaaatctggcaggatctgctcggggaagtgttttcctggaccacacacaccttatggagataatgcctctgctgcgtgaggagacagagaactttagttggactacagtttgtaaaaaaaactaattttattaagacagaactttttttccttccaaattgtaaatctgtctataaatgtaacgcatgtggttgtgtaagacattgtttaataggaaaagttgtaccagcatcttcatattattgagaaaattttttccagcatgggcacttagaaaaagcacatggcaaatggctctttgttcctttcagatattatttcagtagaacctggcattctcctttcaccttaaaagatccatctaagtctcagatctggaaacgttttgtaccgattatccacagcaaaacaaaaataagcttttattttattaacaatttcgttcctcttgtgcccaatcaaatcttttaggaacaaactgcaagaaaagctaagaatgttttagagtgaactaaatacagacattgcttacttgttttgaagagggttttggttttggttattgtgtcttttaagttttctgatatgccccctttcaatatttagatatttatttgttgggaagaataccttaaaatgagggttcttattccagattctgggcagtggtctgtgagtagtttttttcctggatgaaaagggagcaagcccacttgtcactaaatgaattgtgtgaaatgtgctcacttggactccatcaacaatgtgctgctcccagattgccatgccagagggtcttcggattcttccttctatcacctctgctctaagcaaatcttgttagaagggcatgcctttgcttaggcagattgggaataccaattcactacagaataaagattttaaaaatgcaataaggtggcaaatgcattgtatgaagaatttctcagtgtttagtctgagaatttttgcatgttggttaattgtggccattctttaatttaaagttaaaactataatcttaggtagaacaacttttttataagaagtattatttgaccacttcaggtatacattcaatactgggtaaaaatttcagacctatctcaggaacacagaaatatttggtgtcctgataagcactttctagactattgatgtggccaggaatttggaaagacgacacacgcacgcacacacacacacacacacacacacacagttttttccttccctgtgatgaaaaaggctgtgaaaaccttaaagtatttgcttgcttcttgttttgtttagttgataatgaaatgtgtacaacctcaaatttgctgccagaatactaaaaatagaaaaatacccacaaaactgtcatgtctttagttctttccccccgaaaactcagtaaaaaggtgttcccaggatgaaaagatcattttttgctgcatgctaaatcttgcaggaaaaatgattttttagtacgattctgtagaaatgaatctttgatataatgtaaatgctgctgtttgtttcaagtggtgaatgtgttgttaaaaattggctgtttgctttcattttggccaataagtaatcaagtttgtagaaaatgttagcattctgactacttagcatctgtagtaatttctctatgtatagggataattttttagtgggcagagatcctgttctagttgcctgttaagcaaaatctgccctcccaattgaaaaagcca

SEQ ID NO: 377810 - DNA, 4372 bp, Homo sapiens
ggcttaagcagtggtaacaacgcagagtacgcggggtgatggcctccctgaaattaaacatttctattagtggcttcccgttaatctcatccttcttagatcaaacctcgttatatctcctgcctatctcttttgcattccaaagttcagttttattaaatcccagggtctaagattttttctttgagaatttatctccagtgtttctatggaaattaaaaaagaaaattaggataattcaatgtcgaaatgttgcatgcatcttttgagaaatttatattttgtaggttgaaggacttgctttttgggcagcgtatttttggaggtggaatgtagttattttaataaccatgtcctaattatttatagcttcctgcctgacacagctcacttcaagaagtgcacaatgtcagaacgtggaattaagtgggcttgtgaatattgtacgtatgaaaactggccatctgcaatcaagtgtactatgtgtcgtgcccaaagacctagtggaacaattattacagaagatccatttaaaagtggttcaagtgatgttggtagagattgggatccttccagcaccgaaggaggaagtagtcctttgatatgtccagactctagtgcaagaccaagggtgaaatcttcgtatagcatggaaaatgcaaataagtggtcatgccacatgtgtacatatttgaactggccaagagcaatcagatgtacccagtgcttatcccaacgtaggaccaggagtcctacagaatctcctcagtcctcaggatctggctcaagaccagttgctttttctgttgatccttgtgaggaatacaatgatagaaataaactgaacactaggacacagcactggacttgctctgtttgcacatatgaaaactgggccaaggctaaaagatgtgttgtttgtgatcatcccagacctaataacattgaagcaatagaattggcagagactgaagaggcttcttcaataataaatgagcaagacagagctcgatggaggggaagttgcagtagtggtaatagccaaaggagatcacctcctgctacgaagcgggactctgaagtgaaaatggattttcagaggattgaattggctggtgctgtgggaagcaaggaggaacttgaagtagactttaaaaaactaaagcaaattaaaaacaggatgaaaaagactgattggctcttcctcaatgcttgtgtgggggttgtagaaggtgatttagctgccatagaagcatacaagtcatcaggaggagacattgcacgtcagctcaccgcagatgaagtacgcttgctgaatcgtccttctgcctttgatgttggctatactcttgtacacttggctatacgttttcagaggcaggatatgctagcaatattgcttacagaggtgtctcaacaagcagcaaagtgtattccagcaatggtgtgtcctgaactgacagaacaaatccggagagagatagctgcctctcttcatcagagaaagggggattttgcttgctatattctgactgaccttgtaacatttacattgccagcagatattgaagatttgcccccaacagtccaagaaaaattatttgatgaggtgcttgatagagacgttcaaaaagaattagaagaagaatctccaattattaactggtccttggaattggctacacgtttggacagtcgactgtatgcactttggaaccggactgcaggagactgcctacttgattcagttctacaagctacctggggcatctatgacaaggactcagtgcttcggaaagccctgcatgacagcctgcatgactgttcacattggttttacacacgctggaaagattgggaatcatggtattctcagagctttggtttacatttttccttgagagaagaacaatggcaagaagactgggcatttatactctctcttgctagtcagcctggagcaagcttggagcagacgcacatttttgtactggcacatattcttagacgaccaattatagtttatggagtaaaatattacaagagtttccggggagaaactttaggatatactcggtttcaaggtgtttatctgcctttgttgtgggaacagagtttttgttggaaaagtccgattgctctgggttatacgaggggccacttctctgctttggttgccatggaaaatgatggctatggcaaccgaggtgctggtgctaatctcaataccgatgatgatgtcaccatcacatttttgcctctggttgacagtgaaaggaagctactccatgtgcacttcctttctgctcaggagctaggtaatgaggaacagcaagaaaaactgctcagggagtggctggactgctgtgtgacggaggggggagttctggttgccatgcagaagagttctcggcggcgaaatcaccccctggtcactcagatggtagaaaaatggcttgaccgctaccgacagatccggccgtgtacatccctgtctgatggagaggaagatgaggatgatgaagatgaatgaaaaaaaaaatcaaacagcagaagaccaaggcatcagatctgtaatgaccctaaagttagtgtggtgctccaagcagagtcgacatcatggaatgaaccaaatctggcaggatctgctcggggaagtgttttcctggaccacacacaccttatggagataatgcctctgctgcgtgaggagacagagaactttagttggactacagtttgtaaaaaaaactaattttattaagacagaactttttttccttccaaattgtaaatctgtctataaatgtaacgcatgtggttgtgtaagacattgtttaataggaaaagttgtaccagcatcttcatattattgagaaaattttttccagcatgggcacttagaaaaagcacatggcaaatggctctttgttcctttcagatattatttcagtagaacctggcattctcctttcaccttaaaagatccatctaagtctcagatctggaaacgttttgtaccgattatccacagcaaaacaaaaataagcttttattttattaacaatttcgttcctcttgtgcccaatcaaatcttttaggaacaaactgcaagaaaagctaagaatgttttagagtgaactaaatacagacattgcttacttgttttgaagagggttttggttttggttattgtgtcttttaagttttctgatatgccccctttcaatatttagatatttatttgttgggaagaataccttaaaatgagggttcttattccagattctgggcagtggtctgtgagtagtttttttcctggatgaaaagggagcaagcccacttgtcactaaatgaattgtgtgaaatgtgctcacttggactccatcaacaatgtgctgctcccagattgccatgccagagggtcttcggattcttccttctatcacctctgctctaagcaaatcttgttagaagggcatgcctttgcttaggcagattgggaataccaattcactacagaataaagattttaaaaatgcaataaggtggcaaatgcattgtatgaagaatttctcagtgtttagtctgagaatttttgcatgttggttaattgtggccattctttaatttaaagttaaaactataatcttaggtagaacaacttttttataagaagtattatttgaccacttcaggtatacattcaatactgggtaaaaatttcagacctatctcaggaacacagaaatatttggtgtcctgataagcactttctagactattgatgtggccaggaatttggaaagacgacacacgcacgcgcacacacacacaccacacacacacacacacacacacacacagttttttccttccctgtgatgaaaaaggctgtgaaaaccttaaagtatttgcttgcttcttgttttgtttagttgataatgaaatgtgtacaacctcaaatttgctgccagaatactaaaaatagaaaaatacccacaaaactgtcatgtctttagttctttccccccgaaaactcagtaaaaaggtgttcccaggatgaaaagatcattttttgctgcatgctaaatcttgcaggaaaaatgattttttagtacgattctgtagaaatgaatctttgatataatgtaaatgctgctgtttgtttcaagtggtgaatgtgttgttaaaaattggctgtttgctttcattttggccaataagtaatcaagtttgtagaaaatgttagcattctgactacttagcatctgtagtaatttctctatgtatagggataattttttagtgggcagagatcctgttctagttgcctgttaagcaaaatctgccctcccaattgaaaaagcca

SEQ ID NO: 377811 - DNA, 4129 bp, Homo sapiens
tagaactagtcctcgactcgtagccgcgggctgcgcggggagtcgccgctgccgccgccgccgccgccgccgccgccgccgccaagcgcccgtcggacggggaggaggagcaggagctggaggaggagccgccgccgccagcttcctgcctgacacagctcacttcaagaagtgcacaatgtcagaacgtggaattaagtgggcttgtgaatattgtacgtatgaaaactggccatctgcaatcaagtgtactatgtgtcgtgcccaaagacctagtggaacaattattacagaagatccatttaaaagtggttcaagtgatgttggtagagattgggatccttccagcaccgaaggaggaagtagtcctttgatatgtccagactctagtgcaagaccaagggtgaaatcttcgtatagcatggaaaatgcaaataagtggtcatgccacatgtgtacatatttgaactggccaagagcaatcagatgtacccagtgcttatcccaacgtaggaccaggagtcctacagaatctcctcagtcctcaggatctggctcaagaccagttgctttttctgttgatccttgtgaggaatacaatgatagaaataaactgaacactaggacacagcactggacttgctctgtttgcacatatgaaaactgggccaaggctaaaagatgtgttgtttgtgatcatcccagacctaataacattgaagcaatagaattggcagagactgaagaggcttcttcaataataaatgagcaagacagagctcgatggaggggaagttgcagtagtggtaatagccaaaggagatcacctcctgctacgaagcgggactctgaagtgaaaatggattttcagaggattgaattggctggtgctgtgggaagcaaggaggaacttgaagtagactttaaaaaactaaagcaaattaaaaacaggatgaaaaagactgattggctcttcctcaatgcttgtgtgggggttgtagaaggtgatttagctgccatagaagcatacaagtcatcaggaggagacattgcacgtcagctcaccgcagatgaagtacgcttgctgaatcgtccttctgcctttgatgttggctatactcttgtacacttggctatacgttttcagaggcaggatatgctagcaatattgcttacagaggtgtctcaacaagcagcaaagtgtattccagcaatggtgtgtcctgaactgacagaacaaatccggagagagatagctgcctctcttcatcagagaaagggggattttgcttgctatattctgactgaccttgtaacatttacattgccagcagatattgaagatttgcccccaacagtccaagaaaaattatttgatgaggtgcttgatagagacgttcaaaaagaattagaagaagaatctccaattattaactggtccttggaattggctacacgtttggacagtcgactgtatgcactttggaaccggactgcaggagactgcctacttgattcagttctacaagctacctggggcatctatgacaaggactcagtgcttcggaaagccctgcatgacagcctgcatgactgttcacattggttttacacacgctggaaagattgggaatcatggtattctcagagctttggtttacatttttccttgagagaagaacaatggcaagaagactgggcatttatactctctcttgctagtcagcctggagcaagcttggagcagacgcacatttttgtactggcacatattcttagacgaccaattatagtttatggagtaaaatattacaagagtttccggggagaaactttaggatatactcggtttcaaggtgtttatctgcctttgttgtgggaacagagtttttgttggaaaagtccgattgctctgggttatacgaggggccacttctctgctttggttgccatggaaaatgatggctatggcaaccgaggtgctggtgctaatctcaataccgatgatgatgtcaccatcacatttttgcctctggttgacagtgaaaggaagctactccatgtgcacttcctttctgctcaggagctaggtaatgaggaacagcaagaaaaactgctcagggagtggctggactgctgtgtgacggaggggggagttctggttgccatgcagaagagttctcggcggcgaaatcaccccctggtcactcagatggtagaaaaatggcttgaccgctaccgacagatccggccgtgtacatccctgtctgatggagaggaagatgaggatgatgaagatgaatgaaaaaaaaaatcaaacagcagaagaccaaggcatcagatctgtaatgaccctaaagttagtgtggtgctccaagcagagtcgacatcatggaatgaaccaaatctggcaggatctgctcggggaagtgttttcctggaccacacacaccttatggagataatgcctctgctgcgtgaggagacagagaactttagttggactacagtttgtaaaaaaaactaattttattaagacagaactttttttccttccaaattgtaaatctgtctataaatgtaacgcatgtggttgtgtaagacattgtttaataggaaaagttgtaccagcatcttcatattattgagaaaattttttccagcatgggcacttagaaaaagcacatggcaaatggctctttgttcctttcagatattatttcagtagaacctggcattctcctttcaccttaaaagatccatctaagtctcagatctggaaacgttttgtaccgattatccacagcaaaacaaaaataagcttttattttattaacaatttcgttcctcttgtgcccaatcaaatcttttaggaacaaactgcaagaaaagctaagaatgttttagagtgaactaaatacagacattgcttacttgttttgaagagggttttggttttggttattgtgtcttttaagttttctgatatgccccctttcaatatttagatatttatttgttgggaagaataccttaaaatgagggttcttattccagattctgggcagtggtctgtgagtagtttttttcctggatgaaaagggagcaagcccacttgtcactaaatgaattgtgtgaaatgtgctcacttggactccatcaacaatgtgctgctcccagattgccatgccagagggtcttcggattcttccttctatcacctctgctctaagcaaatcttgttagaagggcatgcctttgcttaggcagattgggaataccaattcactacagaataaagattttaaaaatgcaataaggtggcaaatgcattgtatgaagaatttctcagtgtttagtctgagaatttttgcatgttggttaattgtggccattctttaatttaaagttaaaactataatcttaggtagaacaacttttttataagaagtattatttgaccacttcaggtatacattcaatactgggtaaaaatttcagacctatctcaggaacacagaaatatttggtgtcctgataagcactttctagactattgatgtggccaggaatttggaaagacgacacacgcacgcacacacacacacacacacacacacacagttttttccttccctgtgatgaaaaaggctgtgaaaaccttaaagtatttgcttgcttcttgttttgtttagttgataatgaaatgtgtacaacctcaaatttgctgccagaatactaaaaatagaaaaatacccacaaaactgtcatgtctttagttctttccccccgaaaactcagtaaaaaggtgttcccaggatgaaaagatcattttttgctgcatgctaaatcttgcaggaaaaatgattttttagtacgattctgtagaaatgaatctttgatataatgtaaatgctgctgtttgtttcaagtggtgaatgtgttgttaaaaattggctgtttgctttcattttggccaataagtaatcaagtttgtagaaaatgttagcattctgactacttagcatctgtagtaatttctctatgtatagggataattttttagtgggcagagatcctgttctagttgcctgttaagcaaaatctgccctcccaattgaaaaagcca

SEQ ID NO: 377812 - DNA, 3167 bp, Homo sapiens
ggcttaagcagtggtaacaacgcagagtacgcggggtgatggcctccctgaaattaaacatttctattagtggcttcccgttaatctcatccttcttagatcaaacctcgttatatctcctgcctatctcttttgcattccaaagttcagttttattaaatcccagggtctaagattttttctttgagaatttatctccagtgtttctatggaaattaaaaaagaaaattaggataattcaatgtcgaaatgttgcatgcatcttttgagaaatttatattttgtaggttgaaggacttgctttttgggcagcgtatttttggaggtggaatgtagttattttaataaccatgtcctaattatttatagcttcctgcctgacacagctcacttcaagaagtgcacaatgtcagaacgtggaattaagtgggcttgtgaatattgtacgtatgaaaactggccatctgcaatcaagtgtactatgtgtcgtgcccaaagacctagtggaacaattattacagaagatccatttaaaagtggttcaagtgatgttggtagagattgggatccttccagcaccgaaggaggaagtagtcctttgatatgtccagactctagtgcaagaccaagggtgaaatcttcgtatagcatggaaaatgcaaataagtggtcatgccacatgtgtacatatttgaactggccaagagcaatcagatgtacccagtgcttatcccaacgtaggaccaggagtcctacagaatctcctcagtcctcaggatctggctcaagaccagttgctttttctgttgatccttgtgaggaatacaatgatagaaataaactgaacactaggacacagcactggacttgctctgtttgcacatatgaaaactgggccaaggctaaaagatgtgttgtttgtgatcatcccagacctaataacattgaagcaatagaattggcagagactgaagaggcttcttcaataataaatgagcaagacagagctcgatggaggggaagttgcagtagtggtaatagccaaaggagatcacctcctgctacgaagcgggactctgaagtgaaaatggattttcagaggattgaattggctggtgctgtgggaagcaaggaggaacttgaagtagactttaaaaaactaaagcaaattaaaaacaggatgaaaaagactgattggctcttcctcaatgcttgtgtgggggttgtagaaggtgatttagctgccatagaagcatacaagtcatcaggaggagacattgcacgtcagctcaccgcagatgaagtacgcttgctgaatcgtccttctgcctttgatgttggctatactcttgtacacttggctatacgttttcagaggcaggatatgctagcaatattgcttacagaggtgtctcaacaagcagcaaagtgtattccagcaatggtgtgtcctgaactgacagaacaaatccggagagagatagctgcctctcttcatcagagaaagggggattttgcttgctatattctgactgaccttgtaacatttacattgccagcagatattgaagatttgcccccaacagtccaagaaaaattatttgatgaggtgcttgatagagacgttcaaaaagaattagaagaagaatctccaattattaactggtccttggaattggctacacgtttggacagtcgactgtatgcactttggaaccggactgcaggagactgcctacttgattcagttctacaagctacctggggcatctatgacaaggactcagtgcttcggaaagccctgcatgacagcctgcatgactgttcacattggttttacacacgctggaaagattgggaatcatggtattctcagagctttggtttacatttttccttgagagaagaacaatggcaagaagactgggcatttatactctctcttgctagtcagcctggagcaagcttggagcagacgcacatttttgtactggcacatattcttagacgaccaattatagtttatggagtaaaatattacaagagtttccggggagaaactttaggatatactcggtttcaaggtgtttatctgcctttgttgtgggaacagagtttttgttggaaaagtccgattgctctgggttatacgaggggccacttctctgctttggttgccatggaaaatgatggctatggcaaccgaggtgctggtgctaatctcaataccgatgatgatgtcaccatcacatttttgcctctggttgacagtgaaaggaagctactccatgtgcacttcctttctgctcaggagctaggtaatgaggaacagcaagaaaaactgctcagggagtggctggactgctgtgtgacggaggggggagttctggttgccatgcagaagagttctcggcggcgaaatcaccccctggtcactcagatggtagaaaaatggcttgaccgctaccgacagatccggccgtgtacatccctgtctgatggagaggaagatgaggatgatgaagatgaatgaaaaaaaaaatcaaacagcagaagaccaaggcatcagatctgtaatgaccctaaagttagtgtggtgctccaagcagagtcgacatcatggaatgaaccaaatctggcaggatctgctcggggaagtgttttcctggaccacacacaccttatggagataatgcctctgctgcgtgaggagacagagaactttagttggactacagtttgtaaaaaaaactaattttattaagacagaactttttttccttccaaattgtaaatctgtctataaatgtaacgcatgtggttgtgtaagacattgtttaataggaaaagttgtaccagcatcttcatattattgagaaaattttttccagcatgggcacttagaaaaagcacatggcaaatggctctttgttcctttcagatattatttcagtagaacctggcattctcctttcaccttaaaagatccatctaagtctcagatctggaaacgttttgtaccgattatccacagcaaaacaaaaataagcttttattttattaacaatttcgttcctcttgtgcccaatcaaatcttttaggaacaaactgcaagaaaagctaagaatgttttagagtgaactaaatacagacattgcttacttgtt

SEQ ID NO: 377813 - DNA, 3301 bp, Homo sapiens
tagaactagtcctcgactcgtagccgcgggctgcgcggggagtcgccgctgccgccgccgccgccgccgccgccgccgccgccaagcgcccgtcggacggggaggaggagcaggagctggaggaggagccgccgccgccagcttcctgcctgacacagctcacttcaagaagtgcacaatgtcagaacgtggaattaagtgggcttgtgaatattgtacgtatgaaaactggccatctgcaatcaagtgtactatgtgtcgtgcccaaagacctagtggaacaattattacagaagatccatttaaaagtggttcaagtgatgttggtagagattgggatccttccagcaccgaaggaggaagtagtcctttgatatgtccagactctagtgcaagaccaagggtgaaatcttcgtatagcatggaaaatgcaaataagtggtcatgccacatgtgtacatatttgaactggccaagagcaatcagatgtacccagtgcttatcccaacgtaggaccaggagtcctacagaatctcctcagtcctcaggatctggctcaagaccagttgctttttctgttgatccttgtgaggaatacaatgatagaaataaactgaacactaggacacagcactggacttgctctgtttgcacatatgaaaactgggccaaggctaaaagatgtgttgtttgtgatcatcccagacctaataacattgaagcaatagaattggcagagactgaagaggcttcttcaataataaatgagcaagacagagctcgatggaggggaagttgcagtagtggtaatagccaaaggagatcacctcctgctacgaagcgggactctgaagtgaaaatggattttcagaggattgaattggctggtgctgtgggaagcaaggaggaacttgaagtagactttaaaaaactaaagcaaattaaaaacaggatgaaaaagactgattggctcttcctcaatgcttgtgtgggggttgtagaaggtgatttagctgccatagaagcatacaagtcatcaggaggagacattgcacgtcagctcaccgcagatgaagtacgcttgctgaatcgtccttctgcctttgatgttggctatactcttgtacacttggctatacgttttcagaggcaggatatgctagcaatattgcttacagaggtgtctcaacaagcagcaaagtgtattccagcaatggtgtgtcctgaactgacagaacaaatccggagagagatagctgcctctcttcatcagagaaagggggattttgcttgctatattctgactgaccttgtaacatttacattgccagcagatattgaagatttgcccccaacagtccaagaaaaattatttgatgaggtgcttgatagagacgttcaaaaagaattagaagaagaatctccaattattaactggtccttggaattggctacacgtttggacagtcgactgtatgcactttggaaccggactgcaggagactgcctacttgattcagttctacaagctacctggggcatctatgacaaggactcagtgcttcggaaagccctgcatgacagcctgcatgactgttcacattggttttacacacgctggaaagattgggaatcatggtattctcagagctttggtttacatttttccttgagagaagaacaatggcaagaagactgggcatttatactctctcttgctagtcagcctggagcaagcttggagcagacgcacatttttgtactggcacatattcttagacgaccaattatagtttatggagtaaaatattacaagagtttccggggagaaactttaggatatactcggtttcaaggtgtttatctgcctttgttgtgggaacagagtttttgttggaaaagtccgattgctctgggttatacgaggggccacttctctgctttggttgccatggaaaatgatggctatggcaaccgaggtgctggtgctaatctcaataccgatgatgatgtcaccatcacatttttgcctctggttgacagtgaaaggaagctactccatgtgcacttcctttctgctcaggagctaggtaatgaggaacagcaagaaaaactgctcagggagtggctggactgctgtgtgacggaggggggagttctggttgccatgcagaagagttctcggcggcgaaatcaccccctggtcactcagatggtagaaaaatggcttgaccgctaccgacagatccggccgtgtacatccctgtctgatggagaggaagatgaggatgatgaagatgaatgaaaaaaaaaatcaaacattggactccatcaacaatgtgctgctcccagattgccatgccagagggtcttcggattcttccttctatcacctctgctctaagcaaatcttgttagaagggcatgcctttgcttaggcagattgggaataccaattcactacagaataaagattttaaaaatgcaataaggtggcaaatgcattgtatgaagaatttctcagtgtttagtctgagaatttttgcatgttggttaattgtggccattctttaatttaaagttaaaactataatcttaggtagaacaacttttttataagaagtattatttgaccacttcaggtatacattcaatactgggtaaaaatttcagacctatctcaggaacacagaaatatttggtgtcctgataagcactttctagactattgatgtggccaggaatttggaaagacgacacacgcacgcacacacacacacacacacacacacacagttttttccttccctgtgatgaaaaaggctgtgaaaaccttaaagtatttgcttgcttcttgttttgtttagttgataatgaaatgtgtacaacctcaaatttgctgccagaatactaaaaatagaaaaatacccacaaaactgtcatgtctttagttctttccccccgaaaactcagtaaaaaggtgttcccaggatgaaaagatcattttttgctgcatgctaaatcttgcaggaaaaatgattttttagtacgattctgtagaaatgaatctttgatataatgtaaatgctgctgtttgtttcaagtggtgaatgtgttgttaaaaattggctgtttgctttcattttggccaataagtaatcaagtttgtagaaaatgttagcattctgactacttagcatctgtagtaatttctctatgtatagggataattttttagtgggcagagatcctgttctagttgcctgttaagcaaaatctgccctcccaattgaaaaagcca

SEQ ID NO: 377814 - DNA, 664 bp, Homo sapiens
ctagatctttttttgtaatctttttgggaatttcctcctttatactctcatctttaaaatattttattatgaaaataagctcaatatattacagaaatgcataagaaagcacaaaccacctgtcatgtcacaacatggacagtctaggtaactgtgaacttcttgtttcattttattttcatttatctttttacaatttttttttttacattggcaacattttcaaaataggcatccagaactgggcgtggtggcatatacctgtagtcctagctactcagaaggctgaggcagaaggattgcttgagtacaggagttcaagtttagcctgggcaacatggtaagactccgtcttgtaaaaataggcatccagggctgggcgtggtggctcacgcctgtcattccagcactttgggagactgaagtgggcagatcacctgagggcaggagttcgagaccagcctgaccaacatagtaaaactccgtctctactacaaatacaaaattagccaggcatggtggcacatgcctgtaatcccagctatcgggaggctgaggcaggagaattgcttgaaccccgtggggcggaggttgcagtaagccgagattgtgccattgcattccagcctgggcaacaagagtgaaactccgtctcaaaaaaaaa

SEQ ID NO: 377815 - DNA, 1868 bp, Homo sapiens
gagggaaacggcaaactgcaccccagcccctcctggcctggcaccccttccaaatggtgcaatgagtgggtcccaggccaggaggtgccaggttagagcttggacactcagaccctccagtgcaggccttgcccggaccagcccctcctccactctcctctcccctgtgagctccacctgccccagttctcctggctttaacccctccttggccaaggccagggttgcctgcgggagccaggcgtccgctctccacacctttcacagccccagccctcagagcaacctcagcccagcccagcccagctccagctccagctccagcccgggccccatcatggccaaggactttcaagatatccagcagctgagctcggaggaaaatgaccatcctttccatcaaggtgaggggccaggcactcgcaggctgaatcccaggagaggaaatccatttttgaaagggccacctcctgcccagcccctggcacagcgtctctgctccatggtctgcttcagtctgcttgccctgagcttcaacatcctgctgctggtggtcatctgtgtgactgggtcccaaagtgagggtcacagaggtgcacagctgcaagccgagctgcggagcctgaaggaagctttcagcaacttctcctcgagcaccctgacggaggtccaggcaatcagcacccacggaggcagcgtgggtgacaagatcacatccctaggagccaagctggagaaacagcagcaggacctgaaagcagatcacgatgccctgctcttccatctgaagcacttccccgtggacctgcgcttcgtggcctgccagatggagctcctccacagcaacggctcccaaaggacctgctgccccgtcaactgggtggagcaccaaggcagctgctactggttctctcactccgggaaggcctgggctgaggcggagaagtactgccagctggagaacgcacacctggtggtcatcaactcctgggaggagcagaaattcattgtacaacacacgaaccccttcaatacctggataggtctcacggacagtgatggctcttggaaatgggtggatggcacagactataggcacaactacaagaactgggctgtcactcagccagataattggcacgggcacgagctgggtggaagtgaagactgtgttgaagtccagccggatggccgctggaacgatgacttctgcctgcaggtgtaccgctgggtgtgtgagaaaaggcggaatgccaccggcgaggtggcctgaccccagcacacctctggctaacccataccccacacctgcccagctctggcttctctgttgaggattttgaggaaaggaagaaacactgagacaggggtatggggaagagctgagcaaagagagaaaggaggtagtttaagagtccctgaccctggaggactgagatcccacctccttctgtaattcattgtaattattataatcgtcagcctcttcaatggcgtaggaaagaagaaacaaatgcttgaaaaaaaaaaaaaaaaaaaaaataaaaaaaaaaaaaaaaaaaaaaaaaaaaaacaaaaaaaaaaaaaaaataaatacacatcatacccaccacaaactactaaactacaaactctaaatctctcatacaaaaaaaaaaaacattgggccccctttcgcccaaaggtttttaaaactggggaacttttatttgccgcccgcaatatcggctttcttgggcaaataccccctatgggggggctttaaaaaaaacgtggcccgcgcttaaaacagtgtggtgtgggaaaaccctcgggggttcccccaattaaacgccttgggaacaaaccccctttttcccgcggggcga

SEQ ID NO: 377816 - DNA, 1322 bp, Homo sapiens
ggctgcaggaattcggcactaggtcatctgtgtgactgggtcccaaagtgcacagctgcaagccgagctgcggagcctgaaggaagctttcagcaacttctcctcgagcaccctgacggaggtccaggcaatcagcacccacggaggcagcgtgggtgacaagatcacatccctaggagccaagctggagaaacagcagcaggacctgaaagcagatcacgatgccctgctcttccatctgaagcacttccccgtggacctgcgcttcgtggcctgccagatggagctcctccacagcaacggctcccaaaggacctgctgccccgtcaactgggtggagcaccaaggcagctgctactggttctctcactccgggaaggcctgggctgaggcggagaagtactgccagctggagaacgcacacctggtggtcatcaactcctgggaggagcagaaattcattgtacaacacacgaaccccttcaatacctggataggtctcacggacagtgatggctcttggaaatgggtggatggcacagactataggcacaactacaagaactgggctgtcactcagccagataattggcacgggcacgagctgggtggaagtgaagactgtgttgaagtccagccggatggccgctggaacgatgacttctgcctgcaggtgtaccgctgggtgtgtgagaaaaggcggaatgccaccggcgaggtggcctgaccccagcacacctctggctaacccataccccacacctgcccagctctggcttctctgttgaggattttgaggaaaggaagaaacactgagacaggggtatggggaagagctgagcaaagagagaaaggaggtagtttaagagtccctgaccctggaggactgagatcccacctccttctgtaattcattgtaattattataatcgtcagcctcttcaatggcgtaggaaagaagaaacaaatgcttgaaaaaaaaaaaaaaaaaaaaaataaaaaaaaaaaaaaaaaaaaaaaaaaaaaacaaaaaaaaaaaaaaaataaatacacatcatacccaccacaaactactaaactacaaactctaaatctctcatacaaaaaaaaaaaacattgggccccctttcgcccaaaggtttttaaaactggggaacttttatttgccgcccgcaatatcggctttcttgggcaaataccccctatgggggggctttaaaaaaaacgtggcccgcgcttaaaacagtgtggtgtgggaaaaccctcgggggttcccccaattaaacgccttgggaacaaaccccctttttcccgcggggcga

SEQ ID NO: 377817 - DNA, 884 bp, Homo sapiens
gagggaaacggcaaactgcaccccagcccctcctggcctggcaccccttccaaatggtgcaatgagtgggtcccaggccaggaggtgccaggttagagcttggacactcagaccctccagtgcaggccttgcccggaccagcccctcctccactctcctctcccctgtgagctccacctgccccagttctcctggctttaacccctccttggccaaggccagggttgcctgcgggagccaggcgtccgctctccacacctttcacagccccagccctcagagcaacctcagcccagcccagcccagctccagctccagctccagcccgggccccatcatggccaaggactttcaagatatccagcagctgagctcggaggaaaatgaccatcctttccatcaaggtgaggggccaggcactcgcaggctgaatcccaggagaggaaatccatttttgaaaggcaagtgtgcagtttctgcggctttgctccccctctgtctcagctcatgattgctctgtccctttgaggtctctgccgcacccactctgtgaacagggactgaggagggcccgacacccccgcttgttccctcacctcaccttcctgtctaccccaggaccccaggaaaggcatgtgccagaggtgtggggagatctggaagataactgcctgcccttctcctcccaacccaagaacacatgtgccccgtatgtgcgtgtgcacgtatgtgcatatgaggaatgcagattcagctgggactctgctcgtgtgtgtgtgagtgaatgttgtgtgtgtgtatatgtgcgcgagagcgtgcatatgtgtgtgtgttatgtcgtgtatgtgagagggtatgttgtgtgtgagagtgtgttgtgtgtg

SEQ ID NO: 377818 - DNA, 1811 bp, Homo sapiens
gagggaaacggcaaactgcaccccagcccctcctggcctggcaccccttccaaatggtgcaatgagtgggtcccaggccaggaggtgccaggttagagcttggacactcagaccctccagtgcaggccttgcccggaccagcccctcctccactctcctctcccctgtgagctccacctgccccagttctcctggctttaacccctccttggccaaggccagggttgcctgcgggagccaggcgtccgctctccacacctttcacagccccagccctcagagcaacctcagcccagcccagcccagctccagctccagctccagcccgggccccatcatggccaaggactttcaagatatccagcagctgagctcggaggaaaatgaccatcctttccatcaagggccacctcctgcccagcccctggcacagcgtctctgctccatggtctgcttcagtctgcttgccctgagcttcaacatcctgctgctggtggtcatctgtgtgactgggtcccaaagtgagggtcacagaggtgcacagctgcaagccgagctgcggagcctgaaggaagctttcagcaacttctcctcgagcaccctgacggaggtccaggcaatcagcacccacggaggcagcgtgggtgacaagatcacatccctaggagccaagctggagaaacagcagcaggacctgaaagcagatcacgatgccctgctcttccatctgaagcacttccccgtggacctgcgcttcgtggcctgccagatggagctcctccacagcaacggctcccaaaggacctgctgccccgtcaactgggtggagcaccaaggcagctgctactggttctctcactccgggaaggcctgggctgaggcggagaagtactgccagctggagaacgcacacctggtggtcatcaactcctgggaggagcagaaattcattgtacaacacacgaaccccttcaatacctggataggtctcacggacagtgatggctcttggaaatgggtggatggcacagactataggcacaactacaagaactgggctgtcactcagccagataattggcacgggcacgagctgggtggaagtgaagactgtgttgaagtccagccggatggccgctggaacgatgacttctgcctgcaggtgtaccgctgggtgtgtgagaaaaggcggaatgccaccggcgaggtggcctgaccccagcacacctctggctaacccataccccacacctgcccagctctggcttctctgttgaggattttgaggaaaggaagaaacactgagacaggggtatggggaagagctgagcaaagagagaaaggaggtagtttaagagtccctgaccctggaggactgagatcccacctccttctgtaattcattgtaattattataatcgtcagcctcttcaatggcgtaggaaagaagaaacaaatgcttgaaaaaaaaaaaaaaaaaaaaaataaaaaaaaaaaaaaaaaaaaaaaaaaaaaacaaaaaaaaaaaaaaaataaatacacatcatacccaccacaaactactaaactacaaactctaaatctctcatacaaaaaaaaaaaacattgggccccctttcgcccaaaggtttttaaaactggggaacttttatttgccgcccgcaatatcggctttcttgggcaaataccccctatgggggggctttaaaaaaaacgtggcccgcgcttaaaacagtgtggtgtgggaaaaccctcgggggttcccccaattaaacgccttgggaacaaaccccctttttcccgcggggcga

SEQ ID NO: 377819 - DNA, 1956 bp, Homo sapiens
gagggaaacggcaaactgcaccccagcccctcctggcctggcaccccttccaaatggtgcaatgagtgggtcccaggccaggaggtgccaggttagagcttggacactcagaccctccagtgcaggccttgcccggaccagcccctcctccactctcctctcccctgtgagctccacctgccccagttctcctggctttaacccctccttggccaaggccagggttgcctgcgggagccaggcgtccgctctccacacctttcacagatcctacccaggccaccaccccgaacccctccgaccctgcgttccatcccaccatcaacctccacgtgaatctgcacctctgccccagccccagccctcagagcaacctcagcccagcccagcccagctccagctccagctccagcccgggccccatcatggccaaggactttcaagatatccagcagctgagctcggaggaaaatgaccatcctttccatcaaggtgaggggccaggcactcgcaggctgaatcccaggagaggaaatccatttttgaaagggccacctcctgcccagcccctggcacagcgtctctgctccatggtctgcttcagtctgcttgccctgagcttcaacatcctgctgctggtggtcatctgtgtgactgggtcccaaagtgagggtcacagaggtgcacagctgcaagccgagctgcggagcctgaaggaagctttcagcaacttctcctcgagcaccctgacggaggtccaggcaatcagcacccacggaggcagcgtgggtgacaagatcacatccctaggagccaagctggagaaacagcagcaggacctgaaagcagatcacgatgccctgctcttccatctgaagcacttccccgtggacctgcgcttcgtggcctgccagatggagctcctccacagcaacggctcccaaaggacctgctgccccgtcaactgggtggagcaccaaggcagctgctactggttctctcactccgggaaggcctgggctgaggcggagaagtactgccagctggagaacgcacacctggtggtcatcaactcctgggaggagcagaaattcattgtacaacacacgaaccccttcaatacctggataggtctcacggacagtgatggctcttggaaatgggtggatggcacagactataggcacaactacaagaactgggctgtcactcagccagataattggcacgggcacgagctgggtggaagtgaagactgtgttgaagtccagccggatggccgctggaacgatgacttctgcctgcaggtgtaccgctgggtgtgtgagaaaaggcggaatgccaccggcgaggtggcctgaccccagcacacctctggctaacccataccccacacctgcccagctctggcttctctgttgaggattttgaggaaaggaagaaacactgagacaggggtatggggaagagctgagcaaagagagaaaggaggtagtttaagagtccctgaccctggaggactgagatcccacctccttctgtaattcattgtaattattataatcgtcagcctcttcaatggcgtaggaaagaagaaacaaatgcttgaaaaaaaaaaaaaaaaaaaaaataaaaaaaaaaaaaaaaaaaaaaaaaaaaaacaaaaaaaaaaaaaaaataaatacacatcatacccaccacaaactactaaactacaaactctaaatctctcatacaaaaaaaaaaaacattgggccccctttcgcccaaaggtttttaaaactggggaacttttatttgccgcccgcaatatcggctttcttgggcaaataccccctatgggggggctttaaaaaaaacgtggcccgcgcttaaaacagtgtggtgtgggaaaaccctcgggggttcccccaattaaacgccttgggaacaaaccccctttttcccgcggggcga

SEQ ID NO: 377820 - DNA, 1899 bp, Homo sapiens
gagggaaacggcaaactgcaccccagcccctcctggcctggcaccccttccaaatggtgcaatgagtgggtcccaggccaggaggtgccaggttagagcttggacactcagaccctccagtgcaggccttgcccggaccagcccctcctccactctcctctcccctgtgagctccacctgccccagttctcctggctttaacccctccttggccaaggccagggttgcctgcgggagccaggcgtccgctctccacacctttcacagatcctacccaggccaccaccccgaacccctccgaccctgcgttccatcccaccatcaacctccacgtgaatctgcacctctgccccagccccagccctcagagcaacctcagcccagcccagcccagctccagctccagctccagcccgggccccatcatggccaaggactttcaagatatccagcagctgagctcggaggaaaatgaccatcctttccatcaagggccacctcctgcccagcccctggcacagcgtctctgctccatggtctgcttcagtctgcttgccctgagcttcaacatcctgctgctggtggtcatctgtgtgactgggtcccaaagtgagggtcacagaggtgcacagctgcaagccgagctgcggagcctgaaggaagctttcagcaacttctcctcgagcaccctgacggaggtccaggcaatcagcacccacggaggcagcgtgggtgacaagatcacatccctaggagccaagctggagaaacagcagcaggacctgaaagcagatcacgatgccctgctcttccatctgaagcacttccccgtggacctgcgcttcgtggcctgccagatggagctcctccacagcaacggctcccaaaggacctgctgccccgtcaactgggtggagcaccaaggcagctgctactggttctctcactccgggaaggcctgggctgaggcggagaagtactgccagctggagaacgcacacctggtggtcatcaactcctgggaggagcagaaattcattgtacaacacacgaaccccttcaatacctggataggtctcacggacagtgatggctcttggaaatgggtggatggcacagactataggcacaactacaagaactgggctgtcactcagccagataattggcacgggcacgagctgggtggaagtgaagactgtgttgaagtccagccggatggccgctggaacgatgacttctgcctgcaggtgtaccgctgggtgtgtgagaaaaggcggaatgccaccggcgaggtggcctgaccccagcacacctctggctaacccataccccacacctgcccagctctggcttctctgttgaggattttgaggaaaggaagaaacactgagacaggggtatggggaagagctgagcaaagagagaaaggaggtagtttaagagtccctgaccctggaggactgagatcccacctccttctgtaattcattgtaattattataatcgtcagcctcttcaatggcgtaggaaagaagaaacaaatgcttgaaaaaaaaaaaaaaaaaaaaaataaaaaaaaaaaaaaaaaaaaaaaaaaaaaacaaaaaaaaaaaaaaaataaatacacatcatacccaccacaaactactaaactacaaactctaaatctctcatacaaaaaaaaaaaacattgggccccctttcgcccaaaggtttttaaaactggggaacttttatttgccgcccgcaatatcggctttcttgggcaaataccccctatgggggggctttaaaaaaaacgtggcccgcgcttaaaacagtgtggtgtgggaaaaccctcgggggttcccccaattaaacgccttgggaacaaaccccctttttcccgcggggcga

SEQ ID NO: 377821 - DNA, 789 bp, Homo sapiens
tctttgaagcacgtattgtcagaacacagttcctgccccatttccttgttgcatcatctacagatcttctggtcgcttcctttcctccactgatgactttagcacctgtcttcatccttgatacccctgcaggtcaatgcttccccatctttttcaggttgtatcacatatagaaaagaatcaaatatgtctagcaccccgaggtaaaccagaggggatctcatgatcttcacatgaaccttagtgtcttagacaaagggggcagtggtagttttgttctattttggtttgtttttgagacgggtgatagaaaagcatgcttttgtgctgacaggaaagatctaggagagagggagaaattgatgctgccagaaagaggggacagttacagaagcgaagaccttgagaaggagatgatgagacccaggatgcaacacagaaggcttggacttagataagggcatcaaggtccctcgacagtgcctggagggaagattcctggatatcacgtgagaaggtgaggtcggtctcatcagattccatctattttctcaatggaaaatgtgagaggaagtaaccagctgagaagagaaggaagtggtcttggaggtgtgaaaggagaggagatgcagtaaaatagttacgtctcaaagggaggaagccgattgcacgaacttaactggattttgggcaggtagagccttacaattacgcattagaatgaaccagcaaataccccttactagggaagaaaatgactttaataaggccctggcacgtgaaaaaaaa

SEQ ID NO: 377822 - DNA, 140 bp, Homo sapiens
ggttcgcgggcgggccgcccctccccgggctcctagggggaccctccagctggaggggcggtgaccgcgactgtcgtgggctggccccaggtggctagggttgggggtcagaggtcagaggttctgccctctggaatgtt

SEQ ID NO: 377823 - DNA, 2461 bp, Homo sapiens
cgcggtggcagctgcgggtcgcgggtcgcgggtcgcgagtcgccggtcgccggtcgcggcggagcctgggcgctgaggtaccggggcctggacgagggggccgcggtctggctagggagccgcgcgggctcatggcggttgcagatatcaagaaagtcaacaacttcatcagagaacaagacttatatgctttgaaatctgttaagattccagtgagaaaccatgggatcctgatggagacccacaaagaactgaaaccccttctgagcccgtcttccgagaccacagtgaccgtggaactgccagaggcagacagagcaggcgcgggcaccggtgcccaggccggccaactgatgggcttctttaaggggattgaccaggatattgagcgtgcagtgcagtcagaaatctttctacatgaaagttactgcatggacacctcccatcagccactgctcccggcacctccgaagacgcctatggatggtgcagattgtggcattcagtggtggaatgctgttttcatcatgctgctgattggtattgtcttgcctgtcttttatttggtctactttaaaatacaagctagtggtgagacccctaatagcttgaacacaactgtcatccccaatggctcgatggcaatgggtacagttccagggcaagcccccagactagcagttgcagtgccagccgtcacttctgcagacagccagttcagtcagaccacccaagcggggagctaagctttgtttttaaagactcggcccagctttagcaattggctgttgatgtgcctcagctgtcactggcgatgtcctaggggtgctgcattttgcttccggggaaggatggacacttttcagaagtcactgcagtattcccaattgcactggccctgggcatggccttacccagtctaagctggcaggatctaaaacagcagcgacctcggcccctatccagagaggtgcagcaagagagccatttccctgtgacatttagtggactggccagttcatagcagcactgtgaggacccccaagttggacgtgctcggagggaaagatttatggcctctgtcgagggacctgcagcgtgagagccagtggcatctgcgcggcttgcctggctcttgctgtatcctcacttcctgtggagcggggattggctctgagaaggagtgttctctgtctgcctggcaaaggtgctgtggaataggcttggcatgccaccctgttttagagagtgacagttacagttgtaacaagcctacttcatattggccccctcagttagcctttttgaggcaatgccatttctagagttgaaaaagccctggacccaaactgcggcactgttgaataaagggcagtcctactcctgtccttttagagtggcttagtgtgacacacaggcatctcccaggccaagcacacacaggctgcgcccagttccgcaggagccgtcccacagcgtggctctctgggttctcccacttgtcctccttggaaggagctcttgctggccagtgtttggaggggaggatgagtgcctgtcactgaggcctcactatggttggcgtctgaagctgggcggtcgtcaggcctgtgctgagagccgcagcccctgtgcacacctaacacagggcgctccccctgctgcttccctggctcagttcttcggagctccagagtgagaaggccgcttcgtcctttttctctgggtgatgcccttagaataacactatatgcaatgtaactcacaatgttccaggaccaaagacttgatggaggggctagaggcgacccttgttgtaaaaggcgatcagaacacctgagggaggaaggggcttgcagttttcccagcccttctcgctgccaaggcagcagtggtgctgtggatgggctggggactgcgggacagagcctgctactacttgggagttggtgctgccctgtggcatggaggggtgggaggggctgagatggctgctggcctggcctccaagagttctggacaggaggcagacactgcccagatgctcggtggagggacagtgatggcctttgactcatgaggcctagagaaaagtatcaaaggtctcaccatgtaagagtgatttccgatttctctcctttcagttgtgtgaaaaaacagctggcctgggttccattagcaaattaaatcatcttcaatcttaaattagagaccagaatgatcttcaggataaaaagaacttctgaatctctgcaataggaaatgtttcgatcatgcaagtgctttcccagccaaatgtctgtgctctctgtgtcactgagggccacaggttcctctaacatctgtcactgtcacttcaccaggcaggccttggagttccatgacaaaatcacttttgtcagacaaagaatgtatcctttacttttctcaaatggaataaaattatttcttctgtggagga

SEQ ID NO: 377824 - DNA, 2691 bp, Homo sapiens
cgcggtggcagctgcgggtcgcgggtcgcgggtcgcgagtcgccggtcgccggtcgcggcggagcctgggcgctgagtgaagaaaatgaggcacgaggaattgttaaccaagaccttccaaggcccagctgttgtgtgtgggactccgaccagccacgtatacatgtttaagaatggcagtggggactcgggggactcttctgaagaagagtctcaccgtgtggttttgcggccccggggcaaggagcgccacaagagcggtgtccaccagcctccccaggcgggagcaggtgacgtggtgctgctgcagcgggagctggcccaggaggacagcctcaacaagctggcgctgcagtatggctgcaaagttgcagatatcaagaaagtcaacaacttcatcagagaacaagacttatatgctttgaaatctgttaagattccagtgagaaaccatgggatcctgatggagacccacaaagaactgaaaccccttctgagcccgtcttccgagaccacagtgaccgtggaactgccagaggcagacagagcaggcgcgggcaccggtgcccaggccggccaactgatgggcttctttaaggggattgaccaggatattgagcgtgcagtgcagtcagaaatctttctacatgaaagttactgcatggacacctcccatcagccactgctcccggcacctccgaagacgcctatggatggtgcagattgtggcattcagtggtggaatgctgttttcatcatgctgctgattggtattgtcttgcctgtcttttatttggtctactttaaaatacaagctagtggtgagacccctaatagcttgaacacaactgtcatccccaatggctcgatggcaatgggtacagttccagggcaagcccccagactagcagttgcagtgccagccgtcacttctgcagacagccagttcagtcagaccacccaagcggggagctaagctttgtttttaaagactcggcccagctttagcaattggctgttgatgtgcctcagctgtcactggcgatgtcctaggggtgctgcattttgcttccggggaaggatggacacttttcagaagtcactgcagtattcccaattgcactggccctgggcatggccttacccagtctaagctggcaggatctaaaacagcagcgacctcggcccctatccagagaggtgcagcaagagagccatttccctgtgacatttagtggactggccagttcatagcagcactgtgaggacccccaagttggacgtgctcggagggaaagatttatggcctctgtcgagggacctgcagcgtgagagccagtggcatctgcgcggcttgcctggctcttgctgtatcctcacttcctgtggagcggggattggctctgagaaggagtgttctctgtctgcctggcaaaggtgctgtggaataggcttggcatgccaccctgttttagagagtgacagttacagttgtaacaagcctacttcatattggccccctcagttagcctttttgaggcaatgccatttctagagttgaaaaagccctggacccaaactgcggcactgttgaataaagggcagtcctactcctgtccttttagagtggcttagtgtgacacacaggcatctcccaggccaagcacacacaggctgcgcccagttccgcaggagccgtcccacagcgtggctctctgggttctcccacttgtcctccttggaaggagctcttgctggccagtgtttggaggggaggatgagtgcctgtcactgaggcctcactatggttggcgtctgaagctgggcggtcgtcaggcctgtgctgagagccgcagcccctgtgcacacctaacacagggcgctccccctgctgcttccctggctcagttcttcggagctccagagtgagaaggccgcttcgtcctttttctctgggtgatgcccttagaataacactatatgcaatgtaactcacaatgttccaggaccaaagacttgatggaggggctagaggcgacccttgttgtaaaaggcgatcagaacacctgagggaggaaggggcttgcagttttcccagcccttctcgctgccaaggcagcagtggtgctgtggatgggctggggactgcgggacagagcctgctactacttgggagttggtgctgccctgtggcatggaggggtgggaggggctgagatggctgctggcctggcctccaagagttctggacaggaggcagacactgcccagatgctcggtggagggacagtgatggcctttgactcatgaggcctagagaaaagtatcaaaggtctcaccatgtaagagtgatttccgatttctctcctttcagttgtgtgaaaaaacagctggcctgggttccattagcaaattaaatcatcttcaatcttaaattagagaccagaatgatcttcaggataaaaagaacttctgaatctctgcaataggaaatgtttcgatcatgcaagtgctttcccagccaaatgtctgtgctctctgtgtcactgagggccacaggttcctctaacatctgtcactgtcacttcaccaggcaggccttggagttccatgacaaaatcacttttgtcagacaaagaatgtatcctttacttttctcaaatggaataaaattatttcttctgtggagga

SEQ ID NO: 377825 - DNA, 2751 bp, Homo sapiens
cgcggtggcagctgcgggtcgcgggtcgcgggtcgcgagtcgccggtcgccggtcgcggcggagcctgggcgctgaggtaccggggcctggacgagggggccgcggtctggctagggagccgcgcgggctcatggcgtgaagaaaatgaggcacgaggaattgttaaccaagaccttccaaggcccagctgttgtgtgtgggactccgaccagccacgtatacatgtttaagaatggcagtggggactcgggggactcttctgaagaagagtctcaccgtgtggttttgcggccccggggcaaggagcgccacaagagcggtgtccaccagcctccccaggcgggagcaggtgacgtggtgctgctgcagcgggagctggcccaggaggacagcctcaacaagctggcgctgcagtatggctgcaaagttgcagatatcaagaaagtcaacaacttcatcagagaacaagacttatatgctttgaaatctgttaagattccagtgagaaaccatgggatcctgatggagacccacaaagaactgaaaccccttctgagcccgtcttccgagaccacagtgaccgtggaactgccagaggcagacagagcaggcgcgggcaccggtgcccaggccggccaactgatgggcttctttaaggggattgaccaggatattgagcgtgcagtgcagtcagaaatctttctacatgaaagttactgcatggacacctcccatcagccactgctcccggcacctccgaagacgcctatggatggtgcagattgtggcattcagtggtggaatgctgttttcatcatgctgctgattggtattgtcttgcctgtcttttatttggtctactttaaaatacaagctagtggtgagacccctaatagcttgaacacaactgtcatccccaatggctcgatggcaatgggtacagttccagggcaagcccccagactagcagttgcagtgccagccgtcacttctgcagacagccagttcagtcagaccacccaagcggggagctaagctttgtttttaaagactcggcccagctttagcaattggctgttgatgtgcctcagctgtcactggcgatgtcctaggggtgctgcattttgcttccggggaaggatggacacttttcagaagtcactgcagtattcccaattgcactggccctgggcatggccttacccagtctaagctggcaggatctaaaacagcagcgacctcggcccctatccagagaggtgcagcaagagagccatttccctgtgacatttagtggactggccagttcatagcagcactgtgaggacccccaagttggacgtgctcggagggaaagatttatggcctctgtcgagggacctgcagcgtgagagccagtggcatctgcgcggcttgcctggctcttgctgtatcctcacttcctgtggagcggggattggctctgagaaggagtgttctctgtctgcctggcaaaggtgctgtggaataggcttggcatgccaccctgttttagagagtgacagttacagttgtaacaagcctacttcatattggccccctcagttagcctttttgaggcaatgccatttctagagttgaaaaagccctggacccaaactgcggcactgttgaataaagggcagtcctactcctgtccttttagagtggcttagtgtgacacacaggcatctcccaggccaagcacacacaggctgcgcccagttccgcaggagccgtcccacagcgtggctctctgggttctcccacttgtcctccttggaaggagctcttgctggccagtgtttggaggggaggatgagtgcctgtcactgaggcctcactatggttggcgtctgaagctgggcggtcgtcaggcctgtgctgagagccgcagcccctgtgcacacctaacacagggcgctccccctgctgcttccctggctcagttcttcggagctccagagtgagaaggccgcttcgtcctttttctctgggtgatgcccttagaataacactatatgcaatgtaactcacaatgttccaggaccaaagacttgatggaggggctagaggcgacccttgttgtaaaaggcgatcagaacacctgagggaggaaggggcttgcagttttcccagcccttctcgctgccaaggcagcagtggtgctgtggatgggctggggactgcgggacagagcctgctactacttgggagttggtgctgccctgtggcatggaggggtgggaggggctgagatggctgctggcctggcctccaagagttctggacaggaggcagacactgcccagatgctcggtggagggacagtgatggcctttgactcatgaggcctagagaaaagtatcaaaggtctcaccatgtaagagtgatttccgatttctctcctttcagttgtgtgaaaaaacagctggcctgggttccattagcaaattaaatcatcttcaatcttaaattagagaccagaatgatcttcaggataaaaagaacttctgaatctctgcaataggaaatgtttcgatcatgcaagtgctttcccagccaaatgtctgtgctctctgtgtcactgagggccacaggttcctctaacatctgtcactgtcacttcaccaggcaggccttggagttccatgacaaaatcacttttgtcagacaaagaatgtatcctttacttttctcaaatggaataaaattatttcttctgtggagga

SEQ ID NO: 377826 - DNA, 2333 bp, Homo sapiens
  misc_feature (2288)..(2288): n is a, c, g, or t
  misc_feature (2290)..(2290): n is a, c, g, or t
  misc_feature (2295)..(2295): n is a, c, g, or t
  misc_feature (2302)..(2302): n is a, c, g, or t
cgcggtggcagctgcgggtcgcgggtcgcgggtcgcgagtcgccggtcgccggtcgcggcggagcctgggcgctgaggtaccggggcctggacgagggggccgcggtctggctagggagccgcgcgggctcatggcggttgcagatatcaagaaagtcaacaacttcatcagagaacaagacttatatgctttgaaatctgttaagattccagtgagaaaccatgggatcctgatggagacccacaaagaactgaaaccccttctgagcccgtcttccgagaccacagtgaccgtggaactgccagaggcagacagagcaggcgcgggcaccggtgcccaggccggccaactgatgggcttctttaaggggattgaccaggatattgagcgtgcagtgcagtcagaaatctttctacatgaaagttactgcatggacacctcccatcagccactgctcccggcacctccgaagacgcctatggatggtgcagattgtggcattcagtggtggaatgctgttttcatcatgctgctgattggtattgtcttgcctgtcttttatttggtctactttaaaatacaagctagtggtgagacccctaatagcttgaacacaactgtcatccccaatggctcgatggcaatgggtacagttccagggcaagcccccagactagcagttgcagtgccagccgtcacttctgcagacagccagttcagtcagaccacccaagcggggagctaagctttgtttttaaagactcggcccagctttagcaattggctgttgatgtgcctcagctgtcactggcgatgtcctaggggtgctgcattttgcttccggggaaggatggacacttttcagaagtcactgcagtattcccaattgcactggccctgggcatggccttacccagtctaagctggcaggatctaaaacagcagcgacctcggcccctatccagagaggtgcagcaagagagccatttccctgtgacatttagtggactggccagttcatagcagcactgtgaggacccccaagttggacgtgctcggagggaaagatttatggcctctgtcgagggacctgcagcgtgagagccagtggcatctgcgcggcttgcctggctcttgctgtatcctcacttcctgtggagcggggattggctctgagaaggagtgttctctgtctgcctggcaaaggtgctgtggaataggcttggcatgccaccctgttttagagagtgacagttacagttgtaacaagcctacttcatattggccccctcagttagcctttttgaggcaatgccatttctagagttgaaaaagccctggacccaaactgcggcactgttgaataaagggcagtcctactcctgtccttttagagtggcttagtgtgacacacaggcatctcccaggccaagcacacacaggctgcgcccagttccgcaggagccgtcccacagcgtggctctctgggttctcccacttgtcctccttggaaggagctcttgctggccagtgtttggaggggaggatgagtgcctgtcactgaggcctcactatggttggcgtctgaagctgggcggtcgtcaggcctgtgctgagagccgcagcccctgtgcacacctaacacagggcgctccccctgctgcttccctggctcagttcttcggagctccagagtgagaaggccgcttcgtcctttttctctgggtgatgcccttagaataacactatatgcaatgtaactcacaattgcccagatgctcggtggagggacagtgatggcctttgactcatgaggcctagagaaaagtatcaaaggtctcaccatgtaagagtgatttccgatttctctcctttcagttgtgtgaaaaaacagctggcctgggttccattagcaaattaaatcatcttcaatcttaaattagagaccagaatgatcttcaggataaaaagaacttctgaatctctgcaataggaaatgtttcgatcatgcaagtgctttcccagccaaatgtctgtgctctctgtgtcactgagggccacaggttcctctaacatctgtcactgtcacttcaccaggcaggccttggagttccatgacaaaatcacttttgtcagacaaagaatgtatcctttacttttctcaaatggaataaaattatttcttctgtggaggaaaattgattccccctttttatttaatttttttttggagacagtctcactccttcccccaggcaggagaatcacttgaacctgggaggcggangntgcantgagccnagatcacaccactgggattcagccctgggac

SEQ ID NO: 377827 - DNA, 1323 bp, Homo sapiens
  misc_feature (15)..(15): n is a, c, g, or t
gcattccctgacganccacgcgtccgtggacgcgtgagagaaggagtgttctctgtctgcctggcaaaggtgctgtggaataggcttggcatgccaccctgttttagagagtgacagttacagttgtaacaagcctacttcatattggccccctcagttagcctttttgaggcaatgccatttctagagttgaaaaagccctggacccaaactgcggcactgttgaataaagggcagtcctactcctgtccttttagagtggcttagtgtgacacacaggcatctcccaggccaagcacacacaggctgcgcccagttccgcaggagccgtcccacagcgtggctctctgggttctcccacttgtcctccttggaaggagctcttgctggccagtgtttggaggggaggatgagtgcctgtcactgaggcctcactatggttggcgtctgaagctgggcggtcgtcaggcctgtgctgagagccgcagcccctgtgcacacctaacacagggcgctccccctgctgcttccctggctcagttcttcggagctccagagtgagaaggccgcttcgtcctttttctctgggtgatgcccttagaataacactatatgcaatgtaactcacaatgttccaggaccaaagacttgatggaggggctagaggcgacccttgttgtaaaaggcgatcagaacacctgagggaggaaggggcttgcagttttcccagcccttctcgctgccaaggcagcagtggtgctgtggatgggctggggactgcgggacagagcctgctactacttgggagttggtgctgccctgtggcatggaggggtgggaggggctgagatggctgctggcctggcctccaagagttctggacaggaggcagacactgcccagatgctcggtggagggacagtgatggcctttgactcatgaggcctagagaaaagtatcaaaggtctcaccatgtaagagtgatttccgatttctctcctttcagttgtgtgaaaaaacagctggcctgggttccattagcaaattaaatcatcttcaatcttaaattagagaccagaatgatcttcaggataaaaagaacttctgaatctctgcaataggaaatgtttcgatcatgcaagtgctttcccagccaaatgtctgtgctctctgtgtcactgagggccacaggttcctctaacatctgtcactgtcacttcaccaggcaggccttggagttccatgacaaaatcacttttgtcagacaaagaatgtatcctttacttttctcaaatggaataaaattatttcttctgtggagga

SEQ ID NO: 377828 - DNA, 390 bp, Homo sapiens
gtatgcttgcttttctcgctgctcttatttttctgaacctttcttggtggtagcttacttgacttttggtaaagttttaccttctctcgtttagaactgcatggtcttttgtatgctgtgtatctatataaccctgtttttctctaattatgttttcagcattcagagtgattaacaatggcaaagtaagtaggaaagtatttctagaattgctgcattttctcctagattgcaactgtttcactttgctaacactgtgctacagatttgtatggccttctctaggggtatataagctacttaatttaagaaatctctttctcctacaagtgtcttatctaacaaggtccaaatgtctgaaacatgttgtgtggggtgttgcggtctttc

SEQ ID NO: 377829 - DNA, 365 bp, Homo sapiens
ggttcgcgggcgggccgcccctccccgggctcctagggggaccctccagctggaggggcggtgaccgcgactgtcgtgggctggccccaggtggctagggttgggggtcagaggtcagaggttctgccctctggaatgttagggccccgcccgtggagccgtggagccctggggccgggccgctccccattttcctgtcagctcttgttgaggtgccccatcttttcgcagaagggacttggagggaagcgggcctgcgagctgctgccgccgcccctgagctcggacgcgaaggctggccccgtccccgggctgccgccgtggtcctgcaggtgaccctcaaccccccgaggaccgccggccgc

SEQ ID NO: 377830 - DNA, 517 bp, Homo sapiens
aaaagcatgcttttgtgctgacaggaaagatctaggagagagggagaaattgatgctgccagaaagaggggacagttacagaagcgaagaccttgagaaggagatgatgagacccaggatgcaacacagaaggcttggacttagataagggcatcaaggtccctcgacagtgcctggagggaagattcctggatatcacgtgagaaggtgaggtcggtctcatcagattccatctattttctcaatggaaaatgtgagaggaagtaaccagctgagaagagaaggaagtggtcttggaggtgtgaaaggagaggagatgcagtaaaatagttacgtctcaaagggaggaagccggcatgccaggaagctgcagctgcatctctgggcagtgttgagagccatttacaatttacggtcatgaggaatgaaaacagtccagaattagcccctttactcagtgaagtaaagatgatctttctaataaatggtactgggacaagttgagagccttgaaact

SEQ ID NO: 377831 - DNA, 759 bp, Homo sapiens
cgcggtggcagctgcgggtcgcgggtcgcgggtcgcgagtcgccggtcgccggtcgcggcggagcctgggcgctgaggttgcagatatcaagaaagtcaacaacttcatcagagaacaagacttatatgctttgaaatctgttaagattccagtgagaaaccatgggatcctgatggagacccacaaagaactgaaaccccttctgagcccgtcttccgagaccacagtgaccgtggaactgccagaggcagacagagcaggcgcgggcaccggtgcccaggccggccaactgatgggcttctttaaggggattgaccaggatattgagcgtgcagtgcagtcagaaatctttctacatgaaagttactgcatggacacctcccatcagccactgctcccggcacctccgaagacgcctatggatggtgcagattgtggcattcagtggtggaatgctgttttcatcatgctgctgattggaaagatctaggagagagggagaaattgatgctgccagaaagaggggacagttacagaagcgaagaccttgagaaggagatgatgagacccaggatgcaacacagaaggcttggacttagataagggcatcaaggtccctcgacagtgcctggagggaagattcctggatatcacgtgagaagctgcgtttgctttggttagctagaaagcaggcccatcatgcatctgtaagaaagtgactggagtgtaggccctggcgtctaagccgagtaagatgc

SEQ ID NO: 377832 - DNA, 2673 bp, Homo sapiens
aacattcctttcagtgccatggtggtttcgcccaaagcgatttgttgcagtcacactttaaacagtttaagaaagatctgtttttcaaaactgatcttaaattgttcaaacctgtaaatctttaggaatatctgattactaaactatatattgaggttgagtgaaagccaaaaaaacaaaatttcagcctaaactaactttgtgtacagctgcagttttccagtcttcatcagattcgtcagtgaagtgggcttgaatcatcacccagaaagattaagagccactttttggaaagttatttttaaggagctccgcatattttatgatgtttatcttcgtgccttcctaggttgcagatatcaagaaagtcaacaacttcatcagagaacaagacttatatgctttgaaatctgttaagattccagtgagaaaccatgggatcctgatggagacccacaaagaactgaaaccccttctgagcccgtcttccgagaccacagtgaccgtggaactgccagaggcagacagagcaggcgcgggcaccggtgcccaggccggccaactgatgggcttctttaaggggattgaccaggatattgagcgtgcagtgcagtcagaaatctttctacatgaaagttactgcatggacacctcccatcagccactgctcccggcacctccgaagacgcctatggatggtgcagattgtggcattcagtggtggaatgctgttttcatcatgctgctgattggtattgtcttgcctgtcttttatttggtctactttaaaatacaagctagtggtgagacccctaatagcttgaacacaactgtcatccccaatggctcgatggcaatgggtacagttccagggcaagcccccagactagcagttgcagtgccagccgtcacttctgcagacagccagttcagtcagaccacccaagcggggagctaagctttgtttttaaagactcggcccagctttagcaattggctgttgatgtgcctcagctgtcactggcgatgtcctaggggtgctgcattttgcttccggggaaggatggacacttttcagaagtcactgcagtattcccaattgcactggccctgggcatggccttacccagtctaagctggcaggatctaaaacagcagcgacctcggcccctatccagagaggtgcagcaagagagccatttccctgtgacatttagtggactggccagttcatagcagcactgtgaggacccccaagttggacgtgctcggagggaaagatttatggcctctgtcgagggacctgcagcgtgagagccagtggcatctgcgcggcttgcctggctcttgctgtatcctcacttcctgtggagcggggattggctctgagaaggagtgttctctgtctgcctggcaaaggtgctgtggaataggcttggcatgccaccctgttttagagagtgacagttacagttgtaacaagcctacttcatattggccccctcagttagcctttttgaggcaatgccatttctagagttgaaaaagccctggacccaaactgcggcactgttgaataaagggcagtcctactcctgtccttttagagtggcttagtgtgacacacaggcatctcccaggccaagcacacacaggctgcgcccagttccgcaggagccgtcccacagcgtggctctctgggttctcccacttgtcctccttggaaggagctcttgctggccagtgtttggaggggaggatgagtgcctgtcactgaggcctcactatggttggcgtctgaagctgggcggtcgtcaggcctgtgctgagagccgcagcccctgtgcacacctaacacagggcgctccccctgctgcttccctggctcagttcttcggagctccagagtgagaaggccgcttcgtcctttttctctgggtgatgcccttagaataacactatatgcaatgtaactcacaatgttccaggaccaaagacttgatggaggggctagaggcgacccttgttgtaaaaggcgatcagaacacctgagggaggaaggggcttgcagttttcccagcccttctcgctgccaaggcagcagtggtgctgtggatgggctggggactgcgggacagagcctgctactacttgggagttggtgctgccctgtggcatggaggggtgggaggggctgagatggctgctggcctggcctccaagagttctggacaggaggcagacactgcccagatgctcggtggagggacagtgatggcctttgactcatgaggcctagagaaaagtatcaaaggtctcaccatgtaagagtgatttccgatttctctcctttcagttgtgtgaaaaaacagctggcctgggttccattagcaaattaaatcatcttcaatcttaaattagagaccagaatgatcttcaggataaaaagaacttctgaatctctgcaataggaaatgtttcgatcatgcaagtgctttcccagccaaatgtctgtgctctctgtgtcactgagggccacaggttcctctaacatctgtcactgtcacttcaccaggcaggccttggagttccatgacaaaatcacttttgtcagacaaagaatgtatcctttacttttctcaaatggaataaaattatttcttctgtggagga

SEQ ID NO: 377833 - DNA, 2883 bp, Homo sapiens
cgcggtggcagctgcgggtcgcgggtcgcgggtcgcgagtcgccggtcgccggtcgcggcggagcctgggcgctgagaagggacttggagggaagcgggcctgcgagctgctgccgccgcccctgagctcggacgcgaaggctggccccgtccccgggctgccgccgtggtcctgcagtgaagaaaatgaggcacgaggaattgttaaccaagaccttccaaggcccagctgttgtgtgtgggactccgaccagccacgtatacatgtttaagaatggcagtggggactcgggggactcttctgaagaagagtctcaccgtgtggttttgcggccccggggcaaggagcgccacaagagcggtgtccaccagcctccccaggcgggagcaggtgacgtggtgctgctgcagcgggagctggcccaggaggacagcctcaacaagctggcgctgcagtatggctgcaaacacattttattttagacctaatggggctggagataccaggcagaatttaattccggatttctatgcattcagagtgattaacaatggcaaagttgcagatatcaagaaagtcaacaacttcatcagagaacaagacttatatgctttgaaatctgttaagattccagtgagaaaccatgggatcctgatggagacccacaaagaactgaaaccccttctgagcccgtcttccgagaccacagtgaccgtggaactgccagaggcagacagagcaggcgcgggcaccggtgcccaggccggccaactgatgggcttctttaaggggattgaccaggatattgagcgtgcagtgcagtcagaaatctttctacatgaaagttactgcatggacacctcccatcagccactgctcccggcacctccgaagacgcctatggatggtgcagattgtggcattcagtggtggaatgctgttttcatcatgctgctgattggtattgtcttgcctgtcttttatttggtctactttaaaatacaagctagtggtgagacccctaatagcttgaacacaactgtcatccccaatggctcgatggcaatgggtacagttccagggcaagcccccagactagcagttgcagtgccagccgtcacttctgcagacagccagttcagtcagaccacccaagcggggagctaagctttgtttttaaagactcggcccagctttagcaattggctgttgatgtgcctcagctgtcactggcgatgtcctaggggtgctgcattttgcttccggggaaggatggacacttttcagaagtcactgcagtattcccaattgcactggccctgggcatggccttacccagtctaagctggcaggatctaaaacagcagcgacctcggcccctatccagagaggtgcagcaagagagccatttccctgtgacatttagtggactggccagttcatagcagcactgtgaggacccccaagttggacgtgctcggagggaaagatttatggcctctgtcgagggacctgcagcgtgagagccagtggcatctgcgcggcttgcctggctcttgctgtatcctcacttcctgtggagcggggattggctctgagaaggagtgttctctgtctgcctggcaaaggtgctgtggaataggcttggcatgccaccctgttttagagagtgacagttacagttgtaacaagcctacttcatattggccccctcagttagcctttttgaggcaatgccatttctagagttgaaaaagccctggacccaaactgcggcactgttgaataaagggcagtcctactcctgtccttttagagtggcttagtgtgacacacaggcatctcccaggccaagcacacacaggctgcgcccagttccgcaggagccgtcccacagcgtggctctctgggttctcccacttgtcctccttggaaggagctcttgctggccagtgtttggaggggaggatgagtgcctgtcactgaggcctcactatggttggcgtctgaagctgggcggtcgtcaggcctgtgctgagagccgcagcccctgtgcacacctaacacagggcgctccccctgctgcttccctggctcagttcttcggagctccagagtgagaaggccgcttcgtcctttttctctgggtgatgcccttagaataacactatatgcaatgtaactcacaatgttccaggaccaaagacttgatggaggggctagaggcgacccttgttgtaaaaggcgatcagaacacctgagggaggaaggggcttgcagttttcccagcccttctcgctgccaaggcagcagtggtgctgtggatgggctggggactgcgggacagagcctgctactacttgggagttggtgctgccctgtggcatggaggggtgggaggggctgagatggctgctggcctggcctccaagagttctggacaggaggcagacactgcccagatgctcggtggagggacagtgatggcctttgactcatgaggcctagagaaaagtatcaaaggtctcaccatgtaagagtgatttccgatttctctcctttcagttgtgtgaaaaaacagctggcctgggttccattagcaaattaaatcatcttcaatcttaaattagagaccagaatgatcttcaggataaaaagaacttctgaatctctgcaataggaaatgtttcgatcatgcaagtgctttcccagccaaatgtctgtgctctctgtgtcactgagggccacaggttcctctaacatctgtcactgtcacttcaccaggcaggccttggagttccatgacaaaatcacttttgtcagacaaagaatgtatcctttacttttctcaaatggaataaaattatttcttctgtggagga

SEQ ID NO: 377834 - DNA, 304 bp, Homo sapiens
ggtgttgtaaggggctttttccaacttcatttccattaccaagagtcttgagtggctttattttcaacttgggttttttaagcgcttctcatgtcacctttgtttgtgtactgggcctgtctcaagtttccagagggagatgaaagacaagaaaagctaaatgactggttcttcagtgagtttcccagagtggcttcttctcattccagcactgcctaactctcaccatggctgacgccgtgggcaggcatccgcattcatggaaagccaggtcctagctggaagtgacacagggatcttcaga

SEQ ID NO: 377835 - DNA, 277 bp, Homo sapiens
ctgtagagatggggtctccctgtgttgcccaggctggtcttgaactcctaggctcaagcagtgctccaatcttgacctcatggtggcatgagccaccatacctggccttatttttttagagacagagcctcactctgtcatccaggctggagtgcagtatattttatttttattttatttttttaagtgacagagtctagctatctatatttatatttatataaggggtagaggaagtgtttgcaattaaccacaggtgttctttagctaaagatct

SEQ ID NO: 377836 - DNA, 717 bp, Homo sapiens
gacactgctaaacatgcagtgcttcgtggataggatgatgtggtcagtggaaaaagtgaccactactcagcctaagcatatgacctcagtaatgagcaaaccttttggttatctacccccagccctagaatttctctttctttgggaaatcacatgtacaaaaatcaactaaagatccagctgagccctgactcttctacatttaatttggggaccctaataatagaggccagtccagaagcagctacactggataggttgagactggattgcattagggtggggaatctgttcccactttttaacccttccaaataaaacactattgatctggcccttctcaatttatctttagtaagccaagcaggaagagcacttttatgtgtttctctggccaatactttctgccctgcacttgaatctttaaaaatattacttctttgtaaaaggtatacacaccttgattcattcttaatttggcaagtgacttacaatgttatccctgagtggaccatgcaaactatttaaataatcaaaatatgaaccaagaagtagctcggtggtagaaaagtttgcttctaaagtgaacatttgcaaatatcagtctttaggtcctgcagcccatttgctggtctgtaactgagtgattctgccatcctttggggaacacaataacatccagctgtatcagcattaatttgcctatatgcccaagat

SEQ ID NO: 377837 - DNA, 378 bp, Homo sapiens
tttttttttgagacacagtctcactctgtcgcccagaaaataactagaaattgctttaaaaattattttgattagaaattaaatatcataaaacttaacctttaaaaaaatcacaaatagacaatttgtaagatacattaaaaagtactatatacttctaagaaaaatttagctttaaaagcattgatcagaaaataagagaggtgaaaacaacagagctaagcatttcccttgggtatcagaagagaggaaacaaaaagaagtgagaataaggacaggaattggtgacaaagagaaacacaataaaaccaaagaggactaaaaaaaggtataactttaaaaatattaaaacaatagacctctagagcaagtctaatg

SEQ ID NO: 377838 - DNA, 874 bp, Homo sapiens
gctatttcagctcattttgtctaataacactcatttcttaggtttctgtcttatagcagtagtaagtatccccaatgcaatcctaatcagcaggactgctagcaggcatttggggttttcaaacaatttgtactgatattacttctgatatttcacattaatatgaattatataggttttcgtactaattcacattaatatgaattatgtaggttagggaagtttctttttattcctatttgctaagtttttgttttgttttacttttgtttttgtttttagatagggtctcactaggtcacctaagctgaagtacagtagtggtggcactatcttggctcactgcagcctcgacctcctgggctgaggcaggaggatggttcaagcccaggaggctgaggctatagtgagctatgtttgtaccaccgtacctcagcctgggcgacagaatggaaccctgtcttgaaaaaaaagaggggggaaatgtggacacagacatgcacaacgagaagatcatataaagacctagagaggatatggctgtctacaagccaaggagagaggcctcagaagaaacaaccagcagataccttgatgttgcacttcttgcctccagaactgtgaggaaataaatctctgttgtttaagccaaccagtctgtgatactttgttacagcagccctagcaaaccaagagtgagccaccttggaagtagatcctgcagtcccagtcaagccttcggatgactgaaacttcggccaattatctgactgccatcagagaacccaagccagaactacccagctaagctacttctaaattcctgacccacagaaactatgtgaattaataaatgtttcttcttattttaaat

SEQ ID NO: 377839 - DNA, 390 bp, Homo sapiens
tgatccggcttgttttccccagatgcaggcctggggtagtctcctttctggactgagaagagaagaatggagaagcccctcttcccattagtgcctttgcattggtttggctttggctacacagcactggttgtttctggtgggatcgttggctatgtaaaaacaggaatctagaaaactgtatctgaagttgttcctacctgaagccgttgcattgagaggtgctaatagatcctgcagtcccagtcaagccttcggatgactgaaacttcggccaattatctgactgccatcagagaacccaagccagaactacccagctaagctacttctaaattcctgacccacagaaactatgtgaattaataaatgtttcttcttattttaaat

SEQ ID NO: 377840 - DNA, 1350 bp, Homo sapiens
tcccgcctttctccccgccctgccgcggccccggggcgcagcgcgcacgcaatcgcgtttccggagagacctggctgctgtgtcccgcggcttgcgctccgtagtggactccgcgggccttcggcagatgcaggcctggggtagtctcctttctggactgagaagagaagaatggagaagcccctcttcccattagtgcctttgcattggtttggctttggctacacagcactggttgtttctggtgggatcgttggctatgtaaaaacaggcagcgtgccgtccctggctgcagggctgctcttcggcagtctagccggcctgggtgcttaccagctgtatcaggatccaaggaacgtttggggtttcctagccgctacatctgttacttttgttggtgttatgggaatgagatcctactactatggaaaattcatgcctgtaggtttaattgcaggtgccagtttgctgatggccgccaaagttggagttcgtatgttgatgacatctgattagcagaagtcatgttccagcttggactcatgaaggattaaaaatctgcatcttccactattttcaatgtattaagagaaataagtgcagcatttttgcatctgacattttacctaaaaaaaaaaagacaccaaatttggcggaggggtggaaaatcagttgttaccattataaccctacagaggtggtgagcatgtaacatgagcttattgagaccatcatagagatcgattcttgtatattgattttatctctttctgtatctataggtaaatctcaagggtaaaatgttaggtgttgacattgagaaccctgaaaccccattccctgctcagaggaacagtgtgaaaaaaaatctcttgagagatttagaatatcttttcttttgctcatcttagaccacagactgactttgaaattatgttaagtgaaatatcaatgaaaataaagtttactataaataataaaaaaaaaaaaaaaaaaaaaaaaaaaaaaaaaaaaaaaaaaaaaaaaaaaaaaaaaaaaaaaaaaaaaaaaaaaaaaaaaaaaaaaaaaaaaaaaaaaaaaaaaaaaaaaaaaaaaaaaaaaaaaaaaaaaaaaaataaaaaaaaaaaggggcccgtttttaaaaccgttatacttggaaaacccgtggggttccccaatttaaaccctttgggaaaaaacccctcttttcccactggggttatatttcacaaaggcccccccaatttgccttttcaaaaaatgtcgctcctctattggctaatgcgaattctcacggctaaatattttgtgaaaatccccggtaaattttggtgccggccttttttcccc

SEQ ID NO: 377841 - DNA, 877 bp, Homo sapiens
tcccgcctttctccccgccctgccgcggccccggggcgcagcgcgcacgcaatcgcgtttccggagagacctggctgctgtgtcccgcggcttgcgctccgtagtggactccgcgggccttcggcagatgcaggcctggggtagtctcctttctggactgagaagagaagaatggagaagcccctcttcccattagtgcctttgcattggtttggctttggctacacagcactggttgtttctggtgggatcgttggctatgtaaaaacagccgctacatctgttacttttgttggtgttatgggaatgagatcctactactatggaaaattcatgcctgtaggtttaattgcaggtgccagtttgctgatggccgccaaagttggagttcgtatgttgatgacatctgattagcagaagtcatgttccagcttggactcatgaaggattaaaaatctgcatcttccactattttcaatgtattaagagaaataagtgcagcatttttgcatctgacattttacctaaaaaaaaaaagacaccaaatttggcggaggggtggaaaatcagttgttaccattataaccctacagaggtggtgagcatgtaacatgagcttattgagaccatcatagagatcgattcttgtatattgattttatctctttctgtatctataggtaaatctcaagggtaaaatgttaggtgttgacattgagaaccctgaaaccccattccctgctcagaggaacagtgtgaaaaaaaatctcttgagagatttagaatatcttttcttttgctcatcttagaccacagactgactttgaaattatgttaagtgaaatatcaatgaaaataaagtttactataaataata

SEQ ID NO: 377842 - DNA, 1012 bp, Homo sapiens
acctgtgggccagaaacttgggtttgagtcccagctctagctttgcttagttgtgtgactctcagaaagtcatccaacctctgtggtgcttattttcagtgatagtacctgtgggcacataggacctgtggggaatgattaccttttagccccatcctatgacaatatggtttgtttttaaatccaggttagcactgacttctcactgacttctcttgtgttttcagagtgcctttgcattggtttggctttggctacacagcactggttgtttctggtgggatcgttggctatgtaaaaacaggcagcgtgccgtccctggctgcagggctgctcttcggcagtctagccggcctgggtgcttaccagctgtatcaggatccaaggaacgtttggggtttcctagccgctacatctgttacttttgttggtgttatgggaatgagatcctactactatggaaaattcatgcctgtaggtttaattgcaggtgccagtttgctgatggccgccaaagttggagttcgtatgttgatgacatctgattagcagaagtcatgttccagcttggactcatgaaggattaaaaatctgcatcttccactattttcaatgtattaagagaaataagtgcagcatttttgcatctgacattttacctaaaaaaaaaaagacaccaaatttggcggaggggtggaaaatcagttgttaccattataaccctacagaggtggtgagcatgtaacatgagcttattgagaccatcatagagatcgattcttgtatattgattttatctctttctgtatctataggtaaatctcaagggtaaaatgttaggtgttgacattgagaaccctgaaaccccattccctgctcagaggaacagtgtgaaaaaaaatctcttgagagatttagaatatcttttcttttgctcatcttagaccacagactgactttgaaattatgttaagtgaaatatcaatgaaaataaagtttactataaataata

SEQ ID NO: 377843 - DNA, 902 bp, Homo sapiens
tcccgcctttctccccgccctgccgcggccccggggcgcagcgcgcacgcaatcgcgtttccggagagacctggctgctgtgtcccgcggcttgcgctccgtagtggactccgcgggccttcggcagatgcaggcctggggtagtctcctttctggactgagaagagaagaatggagaagcccctcttcccattgcagcgtgccgtccctggctgcagggctgctcttcggcagtctagccggcctgggtgcttaccagctgtatcaggatccaaggaacgtttggggtttcctagccgctacatctgttacttttgttggtgttatgggaatgagatcctactactatggaaaattcatgcctgtaggtttaattgcaggtgccagtttgctgatggccgccaaagttggagttcgtatgttgatgacatctgattagcagaagtcatgttccagcttggactcatgaaggattaaaaatctgcatcttccactattttcaatgtattaagagaaataagtgcagcatttttgcatctgacattttacctaaaaaaaaaaagacaccaaatttggcggaggggtggaaaatcagttgttaccattataaccctacagaggtggtgagcatgtaacatgagcttattgagaccatcatagagatcgattcttgtatattgattttatctctttctgtatctataggtaaatctcaagggtaaaatgttaggtgttgacattgagaaccctgaaaccccattccctgctcagaggaacagtgtgaaaaaaaatctcttgagagatttagaatatcttttcttttgctcatcttagaccacagactgactttgaaattatgttaagtgaaatatcaatgaaaataaagtttactataaataata

SEQ ID NO: 377844 - DNA, 1248 bp, Homo sapiens
tcccgcctttctccccgccctgccgcggccccggggcgcagcgcgcacgcaatcgcgtttccggagagacctggctgctgtgtcccgcggcttgcgctccgtagtggactccgcgggccttcggcagatgcaggcctggggtagtctcctttctggactgagaagagaagaatggagaagcccctcttcccattagtgcctttgcattggtttggctttggctacacagcactggttgtttctggtgggatcgttggctatgtaaaaacagccgctacatctgttacttttgttggtgttatgggaatgagatcctactactatggaaaattcatgcctgtaggtttaattgcaggtgccagtttgctgatggccgccaaagttggagttcgtatgttgatgacatctgattagcagaagtcatgttccagcttggactcatgaaggattaaaaatctgcatcttccactattttcaatgtattaagagaaataagtgcagcatttttgcatctgacattttacctaaaaaaaaaaagacaccaaatttggcggaggggtggaaaatcagttgttaccattataaccctacagaggtggtgagcatgtaacatgagcttattgagaccatcatagagatcgattcttgtatattgattttatctctttctgtatctataggtaaatctcaagggtaaaatgttaggtgttgacattgagaaccctgaaaccccattccctgctcagaggaacagtgtgaaaaaaaatctcttgagagatttagaatatcttttcttttgctcatcttagaccacagactgactttgaaattatgttaagtgaaatatcaatgaaaataaagtttactataaataataaaaaaaaaaaaaaaaaaaaaaaaaaaaaaaaaaaaaaaaaaaaaaaaaaaaaaaaaaaaaaaaaaaaaaaaaaaaaaaaaaaaaaaaaaaaaaaaaaaaaaaaaaaaaaaaaaaaaaaaaaaaaaaaaaaaaaaaataaaaaaaaaaaggggcccgtttttaaaaccgttatacttggaaaacccgtggggttccccaatttaaaccctttgggaaaaaacccctcttttcccactggggttatatttcacaaaggcccccccaatttgccttttcaaaaaatgtcgctcctctattggctaatgcgaattctcacggctaaatattttgtgaaaatccccggtaaattttggtgccggccttttttcccc

SEQ ID NO: 377845 - DNA, 790 bp, Homo sapiens
tcccgcctttctccccgccctgccgcggccccggggcgcagcgcgcacgcaatcgcgtttccggagagacctggctgctgtgtcccgcggcttgcgctccgtagtggactccgcgggccttcggcagatgcaggcctggggtagtctcctttctggactgagaagagaagaatggagaagcccctcttcccattagtgcctttgcattggtttggctttggctacacagcactggttgtttctggtgggatcgttggctatgtaaaaacaggcagcgtgccgtccctggctgcagggctgctcttcggcagtctagccggcctgggtgcttaccagctgtatcaggatccaaggaacgtttggggtttcctagccgctacatctgttacttttgttggtgttatgggaatgagatcctactactatggaaaattcatgcctgtaggtttaattgcaggtgccaggaatctagaaaactgtatctgaagttgttcctacctgaagccgttgcattgagaggtgctaagtggatcctctggccagctgactgcacttcttttttgagaaaggaaggaatatatcctgactgattcagccctagcaaaccaagagtgagccaccttggaagtagatcctgcagtcccagtcaagccttcggatgactgaaacttcggccaattatctgactgccatcagagaacccaagccagaactacccagctaagctacttctaaattcctgacccacagaaactatgtgaattaataaatgtttcttcttattttaaat

SEQ ID NO: 377846 - DNA, 839 bp, Homo sapiens
tcccgcctttctccccgccctgccgcggccccggggcgcagcgcgcacgcaatcgcgtttccggagagacctggctgctgtgtcccgcggcttgcgctccgtagtggactccgcgggccttcggcagatgcaggcctggggtagtctcctttctggactgagaagagaagaatggagaagcccctcttcccattagtgcctttgcattggtttggctttggctacacagcactggttgtttctggtgggatcgttggctatgtaaaaacaggcagcgtgccgtccctggctgcagggctgctcttcggcagtctagccggcctgggtgcttaccagctgtatcaggatccaaggaacgtttggggtttcctagccgctacatctgttacttttgttggtgttatgggaatgagatcctactactatggaaaattcatgcctgtaggtttaattgcaggtgccaggaatctagaaaactgtatctgaagttgttcctacctgaagccgttgcattgagaggtgctaagtggatcctctggccagctgactgcacttcttttttgagaaaggaaggaatatatcctgactgattgtggagcactgcccaacacacagtagatactgcatgtggcagacacacgcagccctagcaaaccaagagtgagccaccttggaagtagatcctgcagtcccagtcaagccttcggatgactgaaacttcggccaattatctgactgccatcagagaacccaagccagaactacccagctaagctacttctaaattcctgacccacagaaactatgtgaattaataaatgtttcttcttattttaaat

SEQ ID NO: 377847 - DNA, 557 bp, Homo sapiens
tcccgcctttctccccgccctgccgcggccccggggcgcagcgcgcacgcaatcgcgtttccggagagacctggctgctgtgtcccgcggcttgcgctccgtagtggactccgcgggccttcggcagatgcaggcctggggtagtctcctttctggactgagaagagaagaatggagaagcccctcttcccattagtgcctttgcattggtttggctttggctacacagcactggttgtttctggtgggatcgttggctatgtaaaaacaggcagcgtgccgtccctggctgcagggctgctcttcggcagtctagccggcctgggtgcttaccagctgtatcaggatccaaggaacgtttggggtttcctaggtgggccacatccaatcagtggaaggtcttaagagcaaaaactgaggttcctcagagaagaaggaaatgttttaagacttcagcatcaattcctgcctgagtttctagcctgctggcctgctctacaaatttcaagcttgctagccctcacaatcacatgaataaattccttaaaataaaatca

SEQ ID NO: 377848 - DNA, 571 bp, Homo sapiens
tcccgcctttctccccgccctgccgcggccccggggcgcagcgcgcacgcaatcgcgtttccggagagacctggctgctgtgtcccgcggcttgcgctccgtagtggactccgcgggccttcggcagatgcaggcctggggtagtctcctttctggactgagaagagaagaatggagaagcccctcttcccattagtgcctttgcattggtttggctttggctacacagcactggttgtttctggtgggatcgttggctatgtaaaaacaggcagcgtgccgtccctggctgcagggctgctcttcggcagtctagccggcctgggtgcttaccagctgtatcaggatccaaggaacgtttggggtttcctagcagccctagcaaaccaagagtgagccaccttggaagtagatcctgcagtcccagtcaagccttcggatgactgaaacttcggccaattatctgactgccatcagagaacccaagccagaactacccagctaagctacttctaaattcctgacccacagaaactatgtgaattaataaatgtttcttcttattttaaat

SEQ ID NO: 377849 - DNA, 581 bp, Homo sapiens
tcccgcctttctccccgccctgccgcggccccggggcgcagcgcgcacgcaatcgcgtttccggagagacctggctgctgtgtcccgcggcttgcgctccgtagtggactccgcgggccttcggcagatgcaggcctggggtagtctcctttctggactgagaagagaagaatggagaagcccctcttcccattagtgcctttgcattggtttggctttggctacacagcactggttgtttctggtgggatcgttggctatgtaaaaacaggcagcgtgccgtccctggctgcagggctgctcttcggcagtctagccggcctgggtgcttaccagctgtatcaggatccaaggaacgtttggggtttcctaggaatctagaaaactgtatctgaagttgttcctacctgaagccgttgcattgagaggtgctaagtggatcctctggccagctgactgcacttcttttttgagaaaggaaggaatatatcctgactgattgatctggctctgttatccaggttggagtgcagtggagcaatcatggctcactacagcctcaccctcccgggctcaaaaga

SEQ ID NO: 377850 - DNA, 758 bp, Homo sapiens
acctgtgggccagaaacttgggtttgagtcccagctctagctttgcttagttgtgtgactctcagaaagtcatccaacctctgtggtgcttattttcagtgatagtacctgtgggcacataggacctgtggggaatgattaccttttagccccatcctatgacaatatggtttgtttttaaatccaggttagcactgacttctcactgacttctcttgtgttttcagagtgcctttgcattggtttggctttggctacacagcactggttgtttctggtgggatcgttggctatgtaaaaacaggaatctagaaaactgtatctgaagttgttcctacctgaagccgttgcattgagaggtgctaagtggatcctctggccagctgactgcacttcttttttgagaaaggaaggaatatatcctgactgattatagggtctcactaggtcacctaagctgaagtacagtagtggtggcactatcttggctcactgcagcctcgacctcctgggctcaagcaatcctcccacctcagcctcccgagtggctgggactatagcagccctagcaaaccaagagtgagccaccttggaagtagatcctgcagtcccagtcaagccttcggatgactgaaacttcggccaattatctgactgccatcagagaacccaagccagaactacccagctaagctacttctaaattcctgacccacagaaactatgtgaattaataaatgtttcttcttattttaaat

SEQ ID NO: 377851 - DNA, 774 bp, Homo sapiens
tcccgcctttctccccgccctgccgcggccccggggcgcagcgcgcacgcaatcgcgtttccggagagacctggctgctgtgtcccgcggcttgcgctccgtagtggactccgcgggccttcggcagatgcaggcctggggtagtctcctttctggactgagaagagaagaatggagaagcccctcttcccattagtgcctttgcattggtttggctttggctacacagcactggttgtttctggtgggatcgttggctatgtaaaaacaggaatctagaaaactgtatctgaagttgttcctacctgaagccgttgcattgagaggtgctaagtggatcctctggccagctgactgcacttcttttttgagaaaggaaggaatatatcctgactgattgtggagcactgcccaacacacagtagatactgcatgtggcagacacacgatagggtctcactaggtcacctaagctgaagtacagtagtggtggcactatcttggctcactgcagcctcgacctcctgggctcaagcaatcctcccacctcagcctcccgagtggctgggactatagcagccctagcaaaccaagagtgagccaccttggaagtagatcctgcagtcccagtcaagccttcggatgactgaaacttcggccaattatctgactgccatcagagaacccaagccagaactacccagctaagctacttctaaattcctgacccacagaaactatgtgaattaataaatgtttcttcttattttaaat

SEQ ID NO: 377852 - DNA, 469 bp, Homo sapiens
tcccgcctttctccccgccctgccgcggccccggggcgcagcgcgcacgcaatcgcgtttccggagagacctggctgctgtgtcccgcggcttgcgctccgtagtggactccgcgggccttcggcagatgcaggcctggggtagtctcctttctggactgagaagagaagaatggagaagcccctcttcccattagtgcctttgcattggtttggctttggctacacagcactggttgtttctggtgggatcgttggctatgtaaaaacagcagccctagcaaaccaagagtgagccaccttggaagtagatcctgcagtcccagtcaagccttcggatgactgaaacttcggccaattatctgactgccatcagagaacccaagccagaactacccagctaagctacttctaaattcctgacccacagaaactatgtgaattaataaatgtttcttcttattttaaat

SEQ ID NO: 377853 - DNA, 372 bp, Homo sapiens
ggatcactggacctgtgggccagaaacttgggtttgagtcccagctctagctttgcttagttgtgtgactctcagaaagtcatccaacctctgtggtgcttattttcagtgatagtacctgtgggcacataggacctgtggggaatgattaccttttagccccatcctatgacaatatggtttgtttttaaatccaggttagcactgacttctcactgacttctcttgtgttttcagagtgcctttgcattggtttggctttggctacacagcactggttgtttctggtgggatcgttggctatgtaaaaacaggtagggttttgttgttacttagcctcttaacatcttcacgttgttccagtgaaatgtg

SEQ ID NO: 377854 - DNA, 979 bp, Homo sapiens
tcccgcctttctccccgccctgccgcggccccggggcgcagcgcgcacgcaatcgcgtttccggagagacctggctgctgtgtcccgcggcttgcgctccgtagtggactccgcgggccttcggcagatgcaggcctggggtagtctcctttctggactgagaagagaagaatggagaagcccctcttcccattagtgcctttgcattggtttggctttggctacacagcactggttgtttctggtgggatcgttggctatgtaaaaacaggcagcgtgccgtccctggctgcagggctgctcttcggcagtctagccggcctgggtgcttaccagctgtatcaggatccaaggaacgtttggggtttcctagccgctacatctgttacttttgttggtgttatgggaatgagatcctactactatggaaaattcatgcctgtaggtttaattgcaggtgccagtttgctgatggccgccaaagttggagttcgtatgttgatgacatctgattagcagaagtcatgttccagcttggactcatgaaggattaaaaatctgcatcttccactattttcaatgtattaagagaaataagtgcagcatttttgcatctgacattttacctaaaaaaaaaaagacaccaaatttggcggaggggtggaaaatcagttgttaccattataaccctacagaggtggtgagcatgtaacatgagcttattgagaccatcatagagatcgattcttgtatattgattttatctctttctgtatctataggtaaatctcaagggtaaaatgttaggtgttgacattgagaaccctgaaaccccattccctgctcagaggaacagtgtgaaaaaaaatctcttgagagatttagaatatcttttcttttgctcatcttagaccacagactgactttgaaattatgttaagtgaaatatcaatgaaaataaagtttactataaataata

SEQ ID NO: 377855 - DNA, 1606 bp, Homo sapiens
tcccgcctttctccccgccctgccgcggccccggggcgcagcgcgcacgcaatcgcgtttccggagagacctggctgctgtgtcccgcggcttgcgctccgtagtggactccgcgggccttcggcagatgcaggcctggggtagtctcctttctggactgagaagagaagaatggagaagcccctcttcccattagtgcctttgcattggtttggctttggctacacagcactggttgtttctggtgggatcgttggctatgtaaaaacaggcagcgtgccgtccctggctgcagggctgctcttcggcagtctagccggcctgggtgcttaccagctgtatcaggatccaaggaacgtttggggtttcctagccgctacatctgttacttttgttggtgttatgggaatgagatcctactactatggaaaattcatgcctgtaggtttaattgcaggtgccagatggagtatggctcttgttgcccaagctggggtgcaatggtgcgatctcagctcattgcaacctccacctcccaggttcaagcgattctcctgccttaccctcctgagtagctgggatttcaggtgtgcaccaccacacccagctaattttttgtatttttagtagagatggggtttcaccatgttggccaggctggtcttgaactgacctcaggtgatccacctgtcttgcctcccaaagtgctggaattacaggcatgagccaccgcaccaggccaagatctaattctttttaatggcttttaagttgtacggatgattactatttagtttactattcccctactgatagaaatatgtcttgtttaatgcctttgatagccgggagcagtggctcatgcttgtaatcccaacactttgggaggctgaggtgggcagatcccctgaggcctttgatattacaaaggatggtgtaccaagaaatatcctcatggaaatccccgtgaacatgtgcaaaggaatctgtaggttacattcctaaatgctgagtcagagcatctcagcatttaaaattgtgattgccttcagaagaggatgcaccaatttatcctcccactagtggtggctttgtgtaattggactttgtaaaaatctttgacacattaagctggaagtctgcaaacttgttctgtaaagggccagatagtgaatattttaggcttctcaggccatctgtgtcccagctgttcacctctgcctttgtagaatgaaagcagccacagccaatcaataaacgagtgtgactgttccaataaaactatgtatgggccctgaaatctggatttcatatgatttctacatatcacaaaatagtcttattttgatttttttcaaccatttcaaaatgcaaatctattcttagcttgctctctgcacaaaaacaggcaatggactagaattggctcactgaccatagtcatgcctgtaagagttaaagaaagaagaaagaaacatgaaacgtggctttgtagtcaaagacaggttttctttacttaaaacctgagaggcttcccggctaatttcggttaggagcactttctcttacagaccctgcacttgatggatcacctggcaccgcccaa

SEQ ID NO: 377856 - DNA, 1184 bp, Homo sapiens
tcccgcctttctccccgccctgccgcggccccggggcgcagcgcgcacgcaatcgcgtttccggagagacctggctgctgtgtcccgcggcttgcgctccgtagtggactccgcgggccttcggcagatgcaggcctggggtagtctcctttctggactgagaagagaagaatggagaagcccctcttcccattagtgcctttgcattggtttggctttggctacacagcactggttgtttctggtgggatcgttggctatgtaaaaacaggcagcgtgccgtccctggctgcagggctgctcttcggcagtctagccggcctgggtgcttaccagctgtatcaggatccaaggaacgtttggggtttcctagccgctacatctgttacttttgttggtgttatgggaatgagatcctactactatggaaaattcatgcctgtaggtttaattgcaggtgccaggaatctagaaaactgtatctgaagttgttcctacctgaagccgttgcattgagaggtgctaagtggatcctctggccagctgactgcacttcttttttgagaaaggaaggaatatatcctgactgattatagggtctcactaggtcacctaagctgaagtacagtagtggtggcactatcttggctcactgcagcctcgacctcctgggctgaggcaggaggatggttcaagcccaggaggctgaggctatagtgagctatgtttgtaccaccgtacctcagcctgggcgacagaatggaaccctgtcttgaaaaaaaagaggggggaaatgtggacacagacatgcacaacgagaagatcatataaagacctagagaggatatggctgtctacaagccaaggagagaggcctcagaagaaacaaccagcagataccttgatgttgcacttcttgcctccagaactgtgaggaaataaatctctgttgtttaagccaaccagtctgtgatactttgttacagcagccctagcaaaccaagagtgagccaccttggaagtagatcctgcagtcccagtcaagccttcggatgactgaaacttcggccaattatctgactgccatcagagaacccaagccagaactacccagctaagctacttctaaattcctgacccacagaaactatgtgaattaataaatgtttcttcttattttaaat

SEQ ID NO: 377857 - DNA, 918 bp, Homo sapiens
tcccgcctttctccccgccctgccgcggccccggggcgcagcgcgcacgcaatcgcgtttccggagagacctggctgctgtgtcccgcggcttgcgctccgtagtggactccgcgggccttcggcagatgcaggcctggggtagtctcctttctggactgagaagagaagaatggagaagcccctcttcccattagtgcctttgcattggtttggctttggctacacagcactggttgtttctggtgggatcgttggctatgtaaaaacaggcagcgtgccgtccctggctgcagggctgctcttcggcagtctagccggcctgggtgcttaccagctgtatcaggatccaaggaacgtttggggtttcctagccgctacatctgttacttttgttggtgttatgggaatgagatcctactactatggaaaattcatgcctgtaggtttaattgcaggtgccaggaatctagaaaactgtatctgaagttgttcctacctgaagccgttgcattgagaggtgctaagtggatcctctggccagctgactgcacttcttttttgagaaaggaaggaatatatcctgactgattatagggtctcactaggtcacctaagctgaagtacagtagtggtggcactatcttggctcactgcagcctcgacctcctgggctcaagcaatcctcccacctcagcctcccgagtggctgggactatagcagccctagcaaaccaagagtgagccaccttggaagtagatcctgcagtcccagtcaagccttcggatgactgaaacttcggccaattatctgactgccatcagagaacccaagccagaactacccagctaagctacttctaaattcctgacccacagaaactatgtgaattaataaatgtttcttcttattttaaat

SEQ ID NO: 377858 - DNA, 512 bp, Homo sapiens
cacggccagctaatttttgtattttttagtagagacagggtttcaccatgttggccaggctggtctcgaactgagctcaagcgatccactcacctctgcctcccaaagtgctgggattacaggcatgagccactgcacccaggcggaaccacctttttgaagaattacagaacgaatgtataggaaaaggggacagcctgtgcaaagtccctgaggtgatcagatattccaggaactggcagagaccttcttggctacagcatagtgatcagagtaaaatgagatgaggctggagaggcaggtaacagccttatcatgcagggcctagtttgccataataatgaatttgataaaataatttgtaatcacttttatgaaccaatcatggcacgtcatcatcatatgtcctggcacggtccctcccctgttgtatttatttttccctactcattcttgcccttgtctcccctcccatagtccccactttctcttagttatatgtccccccattt

SEQ ID NO: 377859 - DNA, 2101 bp, Homo sapiens
caactaatacggctaggtacgagcgcgggtttggtggcgcgtttcagcgaagtcgcacgtgaaggatagcagtggcctgagaaagacccagtcatggcagcctccagcatcagttcaccatggggaaagcatgtgttcaaagccattctgatggtcctagtggcccttatcctcctccactcagcattggcccagtcccgtcgagactttgcaccaccaggccaacagaagagagaagccccagttgatgtcttgacccagataggtcgatctgtgcgagggacactggatgcctggattgggccagagaccatgcacctggtgtcagagtcttcgtcccaagtgttgtgggccatctcatcagccatttctgtggccttctttgctctgtctgggatcgccgcacagctgctgaatgccttgggactagctggtgattacctcgcccagggcctgaagctcagccctggccaggtccagaccttcctgctgtggggagcaggggccctggtcgtctactggctgctgtctctgctcctcggcttggtcttggccttgctggggcggatcctgtggggcctgaagcttgtcatcttcctggccggcttcgtggccctgatgaggtcggtgcccgacccttccacccgggccctgctactcctggccttgctgatcctctacgccctgctgagccggctcactggctcccgagcctctggggcccaactcgaggccaaggtgcgagggctggaacgccaggtggaggagctgcgctggcgccagaggcgagcggccaagggggcccgcagtgtggaggaggagtgagccggatgccccacacaccgccagtgtcataccaaagagctgagctgcttcggggccatgcagccctcctgccagccccctgcccttttcttgccctgtctctgaaccttcagaacattgatccttgccgcagccccactagccaagagaaacagagaaagaccattccccctgcctgtccttgcggccctgtcttctgaggttctctgtctggggttggctctcttaaccctttctctgctcccagcctgcctcaccagggaaggttggaggggcctccctctggcttctgcatctgcgccagcaaacatcactgccgttggtctctcatgacttaactggcttccctctgctgctgccttggcttcctcctaatgctcgtgctctcctgtccttctgaagttgctccttggccaaatctccagctcccttcttgttttcctcatcctcctaccctgtactcccaccaaaccatggtcctttaaggcacgctcctgtcctcctcattgcccagcagtagggaggggcaggggtaaggggacctgaggataaagggtggggaaacagggtcccctgaggcctgtgggggctgcaggggaggaggatgtaccttgtgtctctttcaagtgccttaatccgagccagcagggccttctgcttgcctgctgccatactgtatgtaggaaagtgttctgtggctgctttgtgtcaagaaaagagcagtcactctcagaatcttgattccccatcagccaaagcaaaagatggctgctgctttgtaggcatgtgcctgcaagtgggaccttgctgggcattatatgccctgtgggggtttcagagaccctgaaagaggagggaggacccgcctccttgtctgcacaactgcatgcacttctctccccatcgctccacaacctgaaaccgagaaggagttgctgaccagtgcccaccccggcagcccgggaggaacacaggcagctcctttcccttcacgtggtctgcagagagcagggtgagctgccagctgcccctctccaccagggtaccctgtcttggtggttaggggccacttttcctttgaggctctagtggaggtggatgtccttctctgccaggcttggcacatgatgtgaagaataaatgcccaattcttactgttcaggtttgatgtggaatcacagctgcagtgatatatattttttatcagtgcttggttggttttaaataaagtgcacgctattttattatcttgttctgaataaaatgtatttactcc

SEQ ID NO: 377860 - DNA, 2547 bp, Homo sapiens
aacatttgtagctctagaactacatgacccaaaatgccgagtggtggcaagaggaggattagcttccactccgatttcaaagatccagtttacccactctacagcccagatatagtcacttatttcccctttccagccagagacttccgttccctgctggaacttccgatcccattcttctctcggtgggaatgcttgtggggggaaaaagaaacgcaatagataaagcggggcgcatgcgctcccggcacaggcttcgattgtgaggaaggccggctagtctccgagctcatcccgccttgcgcatgcggagaaggtaaaccagcgccccgagttgaggcgcgggtttggtggcgcgtttcagcgaagtcgcacgtgaaggatagcagtggcctgagaaagacccagtcatggcagcctccagcatcagttcaccatggggaaagcatgtgttcaaagccattctgatggtcctagtggcccttatcctcctccactcagcattggcccagtcccgtcgagactttgcaccaccaggccaacagaagagagaagccccagttgatgtcttgacccagataggtcgatctgtgcgagggacactggatgcctggattgggccagagaccatgcacctggtgtcagagtcttcgtcccaagtgttgtgggccatctcatcagccatttctgtggccttctttgctctgtctgggatcgccgcacagctgctgaatgccttgggactagctggtgattacctcgcccagggcctgaagctcagccctggccaggtccagaccttcctgctgtggggagcaggggccctggtcgtctactggctgctgtctctgctcctcggcttggtcttggccttgctggggcggatcctgtggggcctgaagcttgtcatcttcctggccggcttcgtggccctgatgaggtcggtgcccgacccttccacccgggccctgctactcctggccttgctgatcctctacgccctgctgagccggctcactggctcccgagcctctggggcccaactcgaggccaaggtgcgagggctggaacgccaggtggaggagctgcgctggcgccagaggcgagcggccaagggggcccgcagtgtggaggaggagtgagccggatgccccacacaccgccagtgtcataccaaagagctgagctgcttcggggccatgcagccctcctgccagccccctgcccttttcttgccctgtctctgaaccttcagaacattgatccttgccgcagccccactagccaagagaaacagagaaagaccattccccctgcctgtccttgcggccctgtcttctgaggttctctgtctggggttggctctcttaaccctttctctgctcccagcctgcctcaccagggaaggttggaggggcctccctctggcttctgcatctgcgccagcaaacatcactgccgttggtctctcatgacttaactggcttccctctgctgctgccttggcttcctcctaatgctcgtgctctcctgtccttctgaagttgctccttggccaaatctccagctcccttcttgttttcctcatcctcctaccctgtactcccaccaaaccatggtcctttaaggcacgctcctgtcctcctcattgcccagcagtagggaggggcaggggtaaggggacctgaggataaagggtggggaaacagggtcccctgaggcctgtgggggctgcaggggaggaggatgtaccttgtgtctctttcaagtgccttaatccgagccagcagggccttctgcttgcctgctgccatactgtatgtaggaaagtgttctgtggctgctttgtgtcaagaaaagagcagtcactctcagaatcttgattccccatcagccaaagcaaaagatggctgctgctttgtaggcatgtgcctgcaagtgggaccttgctgggcattatatgccctgtgggggtttcagagaccctgaaagaggagggaggacccgcctccttgtctgcacaactgcatgcacttctctccccatcgctccacaacctgaaaccgagaaggagttgctgaccagtgcccaccccggcagcccgggaggaacacaggcagctcctttcccttcacgtggtctgcagagagcagggtgagctgccagctgcccctctccaccagggtaccctgtcttggtggttaggggccacttttcctttgaggctctagtggaggtggatgtccttctctgccaggcttggcacatgatgtgaagaataaatgcccaattcttactgttcaggtttgatgtggaatcacagctgcagtgatatatattttttatcagtgcttggttggttttaaataaagtgcacgctattttattatcttgttctgaataaaatgtatttactcccaaaaaaaaaaaacgcaaaaaacactctcagttgttctgatttttcttgttccaaaggcgtccttaaaaacttgggggggtgggccccacggggaattaaccgtgggcacgggggttaccccttgaacg

SEQ ID NO: 377861 - DNA, 2184 bp, Homo sapiens
aacatttgtagctctagaactacatgacccaaaatgccgagtggtggcaagaggaggattagcttccactccgatttcaaagatccagtttacccactctacagcccagatatagtcacttatttcccctttccagccagagacttccgttccctgctggaacttccgatcccattcttctctcggtgggaatgcttgtggggggaaaaagaaacgcaatagataaagcggggcgcatgcgctcccggcacaggcttcgattgtgaggaaggccggctagtctccgagctcatcccgccttgcgcatgcggagaaggtaaaccagcgccccgagttgaggcgcgggtttggtggcgcgtttcagcgaagtcgcacgtgaaggatagcagtggcctgagaaagacccagtcatggcagcctccagcatcagttcaccatggggaaagcatgtgttcaaagccttctttgctctgtctgggatcgccgcacagctgctgaatgccttgggactagctggtgattacctcgcccagggcctgaagctcagccctggccaggtccagaccttcctgctgtggggagcaggggccctggtcgtctactggctgctgtctctgctcctcggcttggtcttggccttgctggggcggatcctgtggggcctgaagcttgtcatcttcctggccggcttcgtggccctgatgaggtcggtgcccgacccttccacccgggccctgctactcctggccttgctgatcctctacgccctgctgagccggctcactggctcccgagcctctggggcccaactcgaggccaaggtgcgagggctggaacgccaggtggaggagctgcgctggcgccagaggcgagcggccaagggggcccgcagtgtggaggaggagtgagccggatgccccacacaccgccagtgtcataccaaagagctgagctgcttcggggccatgcagccctcctgccagccccctgcccttttcttgccctgtctctgaaccttcagaacattgatccttgccgcagccccactagccaagagaaacagagaaagaccattccccctgcctgtccttgcggccctgtcttctgaggttctctgtctggggttggctctcttaaccctttctctgctcccagcctgcctcaccagggaaggttggaggggcctccctctggcttctgcatctgcgccagcaaacatcactgccgttggtctctcatgacttaactggcttccctctgctgctgccttggcttcctcctaatgctcgtgctctcctgtccttctgaagttgctccttggccaaatctccagctcccttcttgttttcctcatcctcctaccctgtactcccaccaaaccatggtcctttaaggcacgctcctgtcctcctcattgcccagcagtagggaggggcaggggtaaggggacctgaggataaagggtggggaaacagggtcccctgaggcctgtgggggctgcaggggaggaggatgtaccttgtgtctctttcaagtgccttaatccgagccagcagggccttctgcttgcctgctgccatactgtatgtaggaaagtgttctgtggctgctttgtgtcaagaaaagagcagtcactctcagaatcttgattccccatcagccaaagcaaaagatggctgctgctttgtaggcatgtgcctgcaagtgggaccttgctgggcattatatgccctgtgggggtttcagagaccctgaaagaggagggaggacccgcctccttgtctgcacaactgcatgcacttctctccccatcgctccacaacctgaaaccgagaaggagttgctgaccagtgcccaccccggcagcccgggaggaacacaggcagctcctttcccttcacgtggtctgcagagagcagggtgagctgccagctgcccctctccaccagggtaccctgtcttggtggttaggggccacttttcctttgaggctctagtggaggtggatgtccttctctgccaggcttggcacatgatgtgaagaataaatgcccaattcttactgttcaggtttgatgtggaatcacagctgcagtgatatatattttttatcagtgcttggttggttttaaataaagtgcacgctattttattatcttgttctgaataaaatgtatttactcc

SEQ ID NO: 377862 - DNA, 3046 bp, Homo sapiens
aacatttgtagctctagaactacatgacccaaaatgccgagtggtggcaagaggaggattagcttccactccgatttcaaagatccagtttacccactctacagcccagatatagtcacttatttcccctttccagccagagacttccgttccctgctggaacttccgatcccattcttctctcggtgggaatgcttgtggggggaaaaagaaacgcaatagataaagcggggcgcatgcgctcccggcacaggcttcgattgtgaggaaggccggctagtctccgagctcatcccgccttgcgcatgcggagaaggtaaaccagcgccccgagttgaggcgcgggtttggtggcgcgtttcagcgaagtcgcacgtgaaggatagcagtggcctgagaaagacccagtcatggcagcctccagcatcagttcaccatggggaaagcatgtgttcaaagccattctgatggtcctagtggcccttatcctcctccactcagcattggcccagtcccgtcgagactttgcaccaccaggccaacagaagagagaagccccagttgatgtcttgacccagataggtcgatctgtgcgagggacactggatgcctggattgggccagagaccatgcacctggtgtcagagtcttcgtcccaagtgttgtgggccatctcatcagccatttctgtggccttctttgctctgtctgggatcgccgcacagctgctgaatgccttgggactagctggtgattacctcgcccagggcctgaagctcagccctggccaggtccagaccttcctgctgtggggagcaggggccctggtcgtctactggctgctgtctctgctcctcggcttggtcttggccttgctggggcggatcctgtggggcctgaagcttgtcatcttcctggccggcttcgtggccctgatgaggtcggtgcccgacccttccacccgggccctgctactcctggccttgctgatcctctacgccctgctgagccggctcactggctcccgagcctctggggcccaactcgaggccaaggtgcgagggctggaacgccaggtggaggagctgcgctggcgccagaggcgagcggccaagggggcccgcagtgtggaggaggagtgagccggatgccccacacaccgccagtgtcataccaaagagctgagctgcttcggggccatgcagccctcctgccagccccctgcccttttcttgccctgtctctgaaccttcagaacattgatccttgccgcagccccactagccaagagaaacagagaaagaccattccccctgcctgtccttgcggccctgtcttctgaggttctctgtctggggttggctctcttaaccctttctctgctcccagcctgcctcaccagggaaggttggaggggcctccctctggcttctgcatctgcgccagcaaacatcactgccgttggtctctcatgacttaactggcttccctctgctgctgccttggcttcctcctaatgctcgtgctctcctgtccttctgaagttgctccttggccaaatctccagctcccttcttgttttcctcatcctcctaccctgtactcccaccaaaccatggtcctttaaggcacgctcctgtcctcctcattgcccagcagtagggaggggcaggggtaaggggacctgaggataaagggtggggaaacagggtcccctgaggcctgtgggggctgcaggggaggaggatgtaccttgtgtctctttcaagtgccttaatccgagccagcagggccttctgcttgcctgctgccatactgtatgtaggaaagtgttctgtggctgctttgtgtcaagaaaagagcagtcactctcagaatcttgattccccatcagccaaagcaaaagatggctgctgctttgtaggcatgtgcctgcaagtgggaccttgctgggcattatatgccctgtgggggtttcagagaccctgaaagaggagggaggacccgcctccttgtctgcacaactgcatgcacttctctccccatcgctccacaacctgaaaccgagaaggagttgctgaccagtgcccaccccggcagcccgggaggaacacaggcagctcctttcccttcacgtggtctgcagagagcagggtgagctgccagctgcccctctccaccagggtaccctgtcttggtggttaggggccacttttcctttgaggctctagtggaggtggatgtccttctctgccaggcttggcacatgatgtgaagaataaatgcccaattcttactgttcaggtttgatgtggaatcacagctgcagtgatatatattttttatcagtgcttggttggttttaaataaagtgcacgctattttattaaaaaaaaaaaaaaaaaaaaaaaaaaaaaaaaaaaaaaaaaaaaaaaaaaaaaaaaaaaaaaaaaaagggggggcggcgccgcctgcaaagaaatcctcccgccgggggaggacaccaaatggcacaagcgacaagccgacgatgtgtttgtgtagcaacaaaaggggggccccccacagaaggagggacagtatcaaaataaagcgagagagagacagcgcgcgagcgaggatgataacaacaagagcggagcaagagaagtgggggagaacaacgcgggtgcacagggagggggaaaacccactggggggggagaagaagagacaccaccaacataaacacgagggggggggggggcgggggccacacaatgggtggggggggcaacacaaatactttctccagccggagagaagatatatttttaaacgagcgtctctcagggaggggagagcataaattatcaaagaaaagagttctgacaagcagggtgtattaatcagaaggggtggtggttacacacacagccaggcgcggggaaaaattaatagagtagcgtcggtagacgagagtaggagaaaagaaatattgttgctgcaccagccgcgagaggaagttatactaaccttgtatgtagcagaaaacaaaaaattatgt

SEQ ID NO: 377863 - DNA, 1310 bp, Homo sapiens
  misc_feature (22)..(22): n is a, c, g, or t
caaagattaagccatgcatgtntaagtacgcacggccggatgccccacacaccgccagtgtcataccaaagagctgagctgcttcggggccatgcagccctcctgccagccccctgcccttttcttgccctgtctctgaaccttcagaacattgatccttgccgcagccccactagccaagagaaacagagaaagaccattccccctgcctgtccttgcggccctgtcttctgaggttctctgtctggggttggctctcttaaccctttctctgctcccagcctgcctcaccagggaaggttggaggggcctccctctggcttctgcatctgcgccagcaaacatcactgccgttggtctctcatgacttaactggcttccctctgctgctgccttggcttcctcctaatgctcgtgctctcctgtccttctgaagttgctccttggccaaatctccagctcccttcttgttttcctcatcctcctaccctgtactcccaccaaaccatggtcctttaaggcacgctcctgtcctcctcattgcccagcagtagggaggggcaggggtaaggggacctgaggataaagggtggggaaacagggtcccctgaggcctgtgggggctgcaggggaggaggatgtaccttgtgtctctttcaagtgccttaatccgagccagcagggccttctgcttgcctgctgccatactgtatgtaggaaagtgttctgtggctgctttgtgtcaagaaaagagcagtcactctcagaatcttgattccccatcagccaaagcaaaagatggctgctgctttgtaggcatgtgcctgcaagtgggaccttgctgggcattatatgccctgtgggggtttcagagaccctgaaagaggagggaggacccgcctccttgtctgcacaactgcatgcacttctctccccatcgctccacaacctgaaaccgagaaggagttgctgaccagtgcccaccccggcagcccgggaggaacacaggcagctcctttcccttcacgtggtctgcagagagcagggtgagctgccagctgcccctctccaccagggtaccctgtcttggtggttaggggccacttttcctttgaggctctagtggaggtggatgtccttctctgccaggcttggcacatgatgtgaagaataaatgcccaattcttactgttcaggtttgatgtggaatcacagctgcagtgatatatattttttatcagtgcttggttggttttaaataaagtgcacgctattttattatcttgttctgaataaaatgtatttactcc

SEQ ID NO: 377864 - DNA, 1391 bp, Homo sapiens
aacatttgtagctctagaactacatgacccaaaatgccgagtggtggcaagaggaggattagcttccactccgatttcaaagatccagtttacccactctacagcccagatatagtcacttatttcccctttccagccagagacttccgttccctgctggaacttccgatcccattcttctctcggtgggaatgcttgtggggggaaaaagaaacgcaatagataaagcggggcgcatgcgctcccggcacaggcttcgattgtgaggaaggccggctagtctccgagctcatcccgccttgcgcatgcggagaaggtaaaccagcgccccgagttgaggcgcgggtttggtggcgcgtttcagcgaagtcgcacgtgaaggatagcagtggcctgagaaagttctgcatctgcgccagcaaacatcactgccgttggtctctcatgacttaactggcttccctctgctgctgccttggcttcctcctaatgctcgtgctctcctgtccttctgaagttgctccttggccaaatctccagctcccttcttgttttcctcatcctcctaccctgtactcccaccaaaccatggtcctttaaggcacgctcctgtcctcctcattgcccagcagtagggaggggcaggggtaaggggacctgaggataaagggtggggaaacagggtcccctgaggcctgtgggggctgcaggggaggaggatgtaccttgtgtctctttcaagtgccttaatccgagccagcagggccttctgcttgcctgctgccatactgtatgtaggaaagtgttctgtggctgctttgtgtcaagaaaagagcagtcactctcagaatcttgattccccatcagccaaagcaaaagatggctgctgctttgtaggcatgtgcctgcaagtgggaccttgctgggcattatatgccctgtgggggtttcagagaccctgaaagaggagggaggacccgcctccttgtctgcacaactgcatgcacttctctccccatcgctccacaacctgaaaccgagaaggagttgctgaccagtgcccaccccggcagcccgggaggaacacaggcagctcctttcccttcacgtggtctgcagagagcagggtgagctgccagctgcccctctccaccagggtaccctgtcttggtggttaggggccacttttcctttgaggctctagtggaggtggatgtccttctctgccaggcttggcacatgatgtgaagaataaatgcccaattcttactgttcaggtttgatgtggaatcacagctgcagtgatatatattttttatcagtgcttggttggttttaaataaagtgcacgctattttattatcttgttctgaataaaatgtatttactcc

SEQ ID NO: 377865 - DNA, 1982 bp, Homo sapiens
aacatttgtagctctagaactacatgacccaaaatgccgagtggtggcaagaggaggattagcttccactccgatttcaaagatccagtttacccactctacagcccagatatagtcacttatttcccctttccagccagagacttccgttccctgctggaacttccgatcccattcttctctcggtgggaatgcttgtggggggaaaaagaaacgcaatagataaagcggggcgcatgcgctcccggcacaggcttcgattgtgaggaaggccggctagtctccgagctcatcccgccttgcgcatgcggagaaggtaaaccagcgccccgagttgaggcgcgggtttggtggcgcgtttcagcgaagtcgcacgtgaaggatagcagtggcctgagaaagacccagtcatggcagcctccagcatcagttcaccatggggaaagcatgtgttcaaagccattctgatggtcctagtggcccttatcctcctccactcagcattggcccagtcccgtcgagactttgcaccaccaggccaacagaagagagaagccccagttgatgtcttgacccagataggtcgatctgtgcgagggacactggatgcctggattgggccagagaccatgcacctggtgtcagagtcttcgtcccaagtgttgtgggccatctcatcagccatttctgtggccttctttgctctgtctgggatcgccgcacagctgctgaatgccttgggactagctggtgattacctcgcccagggcctgaagctcagccctggccaggtccagaccttcctgctgtggggagcaggggccctggtcgtctactggctgctgtctctgctcctcggcttggtcttggccttgctggggcggatcctgtggggcctgaagcttgtcatcttcctggccggcttcgtggccctgatgaggtcggtgcccgacccttccacccgggccctgctactcctggccttgctgatcctctacgccctgctgagccggctcactggctcccgagcctctggggcccaactcgaggccaaggtgcgagggctggaacgccaggtggaggagctgcgctggcgccagaggcgagcggccaagggggcccgcagtgtggaggaggagtgagccggatgccccacacaccgccagtgtcataccaaagagctgagctgcttcggggccatgcagccctcctgccagccccctgcccttttcttgccctgtctctgaaccttcagaacattgatccttgccgcagccccactagccaagagaaacagagaaagaccattccccctgcctgtccttgcggccctgtcttctgaggttctctgtctggggttggctctcttaaccctttctctgctcccagcctgcctcaccagggaaggttggaggggcctccctctggcttctgcatctgcgccagcaaacatcactgccgttggtctctcatgacttaactggcttccctctgctgctgccttggcttcctcctaatgctcgtgctctcctgtccttctgaagttgctccttggccaaatctccagctcccttcttgttttcctcatcctcctaccctgtactcccaccaaaccatggtcctttaaggcacgctcctgtcctcctcattgcccagcagtagggaggggcaggggtaaggggacctgaggataaagggtggggaaacagggtcccctgaggcctgtgggggctgcaggggaggaggatgtaccttgtgtctctttcaagtgccttaatccgagccagcagggctacggttgccgatgcccactggtttaggcaaggtctgggcaggtggggcacaaaagagggccccgaacgtatccccggcagcacgagcgcgctgagcacacccacagacacgggcacgagggcccagaggaacgccccgcgagagacccccccgaagagagaaccccccggagtactcagagcacaccg

SEQ ID NO: 377866 - DNA, 1167 bp, Homo sapiens
  misc_feature (891)..(891): n is a, c, g, or t
  misc_feature (904)..(905): n is a, c, g, or t
  misc_feature (907)..(907): n is a, c, g, or t
  misc_feature (910)..(910): n is a, c, g, or t
  misc_feature (924)..(924): n is a, c, g, or t
  misc_feature (940)..(941): n is a, c, g, or t
  misc_feature (944)..(945): n is a, c, g, or t
  misc_feature (947)..(947): n is a, c, g, or t
  misc_feature (951)..(951): n is a, c, g, or t
  misc_feature (964)..(964): n is a, c, g, or t
  misc_feature (966)..(966): n is a, c, g, or t
  misc_feature (971)..(971): n is a, c, g, or t
  misc_feature (979)..(981): n is a, c, g, or t
  misc_feature (986)..(986): n is a, c, g, or t
  misc_feature (989)..(989): n is a, c, g, or t
  misc_feature (1006)..(1006): n is a, c, g, or t
  misc_feature (1060)..(1060): n is a, c, g, or t
  misc_feature (1062)..(1064): n is a, c, g, or t
  misc_feature (1067)..(1068): n is a, c, g, or t
  misc_feature (1072)..(1072): n is a, c, g, or t
  misc_feature (1076)..(1080): n is a, c, g, or t
  misc_feature (1082)..(1083): n is a, c, g, or t
  misc_feature (1085)..(1085): n is a, c, g, or t
  misc_feature (1088)..(1088): n is a, c, g, or t
  misc_feature (1090)..(1090): n is a, c, g, or t
  misc_feature (1092)..(1092): n is a, c, g, or t
  misc_feature (1127)..(1127): n is a, c, g, or t
aacatttgtagctctagaactacatgacccaaaatgccgagtggtggcaagaggaggattagcttccactccgatttcaaagatccagtttacccactctacagcccagatatagtcacttatttcccctttccagccagagacttccgttccctgctggaacttccgatcccattcttctctcggtgggaatgcttgtggggggaaaaagaaacgcaatagataaagcggggcgcatgcgctcccggcacaggcttcgattgtgaggaaggccggctagtctccgagctcatcccgccttgcgcatgcggagaaggtaaaccagcgccccgagttgaggcgcgggtttggtggcgcgtttcagcgaagtcgcacgtgaaggatagcagtggcctgagaaagacccagtcatggcagcctccagcatcagttcaccatggggaaagcatgtgttcaaagccattctgatggtcctagtggcccttatcctcctccactcagcattggcccagtcccgtcgagactttgcaccaccaggccaacagaagagagaagccccagttgatgtcttgacccagataggtcgatctgtgcgagggacactggatgcctggattgggccagagaccatgcacctggtgtcagagtcttcgtcccaagtgttgtgggccatctcatcagccatttctgtggccttctttgctctgtctgggatcgccgcacagctgctgaatgccttgggactagctggtgattacctcgcccagggcctgaagctcagccctggccaggtccagaccttcctgctgtggggagcaggggccctggtcgtctactggctgctgtctctgctcctcggcttggtcttggccttgctggggcggatccctnttttccctaatcnntncancaacccttccttcnactattcccctaatannacnnancccnacccaaccacccntnccccncaacaccnnncccancanaaccacaactcccctcntatccttcacacattcaccctatcccccttttcccaacactattccaattttcnannnccnnaacnccannnnnannanccncncnttctccatatttaatcttccaatttttccctcatntttttattattatatatccttaatccccacacacctccat

SEQ ID NO: 377867 - DNA, 208 bp, Homo sapiens
gcggccgcctactactactactgctcgaattcaagcttctaacgatgtacggggacatgatgtgaagaataaatgcccaattcttactgttcaggtttgatgtggaatcacagctgcagtgatatatattttttatcagtgcttggttggttttaaataaagtgcacgctattttattatcttgttctgaataaaatgtatttactcc

SEQ ID NO: 377868 - DNA, 2418 bp, Homo sapiens
aacatttgtagctctagaactacatgacccaaaatgccgagtggtggcaagaggaggattagcttccactccgatttcaaagatccagtttacccactctacagcccagatatagtcacttatttcccctttccagccagagacttccgttccctgctggaacttccgatcccattcttctctcggtgggaatgcttgtggggggaaaaagaaacgcaatagataaagcggggcgcatgcgctcccggcacaggcttcgattgtgaggaaggccggctagtctccgagctcatcccgccttgcgcatgcggagaaggtaaaccagcgccccgagttgaggcgcgggtttggtggcgcgtttcagcgaagtcgcacgtgaaggatagcagtggcctgagaaagacccagtcatggcagcctccagcatcagttcaccatggggaaagcatgtgttcaaagccattctgatggtcctagtggcccttatcctcctccactcagcattggcccagtcccgtcgagactttgcaccaccaggccaacagaagagagaagccccagttgatgtcttgacccagataggtcgatctgtgcgagggacactggatgcctggattgggccagagaccatgcacctggtgtcagagtcttcgtcccaagtgttgtgggccatctcatcagccatttctgtggccttctttgctctgtctgggatcgccgcacagctgctgaatgccttgggactagctggtgattacctcgcccagggcctgaagctcagccctggccaggtccagaccttcctgctgtggggagcaggggccctggtcgtctactggctgctgtctctgctcctcggcttggtcttggccttgctggggcggatcctgtggggcctgaagcttgtcatcttcctggccggcttcgtggccctgatgaggtcggtgcccgacccttccacccgggccctgctactcctggccttgctgatcctctacgccctgctgagccggctcactggctcccgagcctctggggcccaactcgaggccaaggtgcgagggctggaacgccaggtggaggagctgcgctggcgccagaggcgagcggccaagggggcccgcagtgtggaggaggagtgagccggatgccccacacaccgccagtgtcataccaaagagctgagctgcttcggggccatgcagccctcctgccagccccctgcccttttcttgccctgtctctgaaccttcagaacattgatccttgccgcagccccactagccaagagaaacagagaaagaccattccccctgcctgtccttgcggccctgtcttctgaggttctctgtctggggttggctctcttaaccctttctctgctcccagcctgcctcaccagggaaggttggaggggcctccctctggcttctgcatctgcgccagcaaacatcactgccgttggtctctcatgacttaactggcttccctctgctgctgccttggcttcctcctaatgctcgtgctctcctgtccttctgaagttgctccttggccaaatctccagctcccttcttgttttcctcatcctcctaccctgtactcccaccaaaccatggtcctttaaggcacgctcctgtcctcctcattgcccagcagtagggaggggcaggggtaaggggacctgaggataaagggtggggaaacagggtcccctgaggcctgtgggggctgcaggggaggaggatgtaccttgtgtctctttcaagtgccttaatccgagccagcagggccttctgcttgcctgctgccatactgtatgtaggaaagtgttctgtggctgctttgtgtcaagaaaagagcagtcactctcagaatcttgattccccatcagccaaagcaaaagatggctgctgctttgtaggcatgtgcctgcaagtgggaccttgctgggcattatatgccctgtgggggtttcagagaccctgaaagaggagggaggacccgcctccttgtctgcacaactgcatgcacttctctccccatcgctccacaacctgaaaccgagaaggagttgctgaccagtgcccaccccggcagcccgggaggaacacaggcagctcctttcccttcacgtggtctgcagagagcagggtgagctgccagctgcccctctccaccagggtaccctgtcttggtggttaggggccacttttcctttgaggctctagtggaggtggatgtccttctctgccaggcttggcacatgatgtgaagaataaatgcccaattcttactgttcaggtttgatgtggaatcacagctgcagtgatatatattttttatcagtgcttggttggttttaaataaagtgcacgctattttattatcttgttctgaataaaatgtatttactcc

SEQ ID NO: 377869 - DNA, 2176 bp, Homo sapiens
accggccggagctcgaggccggcggcggcgggagagcgacccgggcggcctcgtagcggggccccgctacgagggtaaaccagcgccccgagttgaggcgcgggtttggtggcgcgtttcagcgaagtcgcacgtgaaggatagcagtggcctgagaaagacccagtcatggcagcctccagcatcagttcaccatggggaaagcatgtgttcaaagccattctgatggtcctagtggcccttatcctcctccactcagcattggcccagtcccgtcgagactttgcaccaccaggccaacagaagagagaagccccagttgatgtcttgacccagataggtcgatctgtgcgagggacactggatgcctggattgggccagagaccatgcacctggtgtcagagtcttcgtcccaagtgttgtgggccatctcatcagccatttctgtggccttctttgctctgtctgggatcgccgcacagctgctgaatgccttgggactagctggtgattacctcgcccagggcctgaagctcagccctggccaggtccagaccttcctgctgtggggagcaggggccctggtcgtctactggctgctgtctctgctcctcggcttggtcttggccttgctggggcggatcctgtggggcctgaagcttgtcatcttcctggccggcttcgtggccctgatgaggtcggtgcccgacccttccacccgggccctgctactcctggccttgctgatcctctacgccctgctgagccggctcactggctcccgagcctctggggcccaactcgaggccaaggtgcgagggctggaacgccaggtggaggagctgcgctggcgccagaggcgagcggccaagggggcccgcagtgtggaggaggagtgagccggatgccccacacaccgccagtgtcataccaaagagctgagctgcttcggggccatgcagccctcctgccagccccctgcccttttcttgccctgtctctgaaccttcagaacattgatccttgccgcagccccactagccaagagaaacagagaaagaccattccccctgcctgtccttgcggccctgtcttctgaggttctctgtctggggttggctctcttaaccctttctctgctcccagcctgcctcaccagggaaggttggaggggcctccctctggcttctgcatctgcgccagcaaacatcactgccgttggtctctcatgacttaactggcttccctctgctgctgccttggcttcctcctaatgctcgtgctctcctgtccttctgaagttgctccttggccaaatctccagctcccttcttgttttcctcatcctcctaccctgtactcccaccaaaccatggtcctttaaggcacgctcctgtcctcctcattgcccagcagtagggaggggcaggggtaaggggacctgaggataaagggtggggaaacagggtcccctgaggcctgtgggggctgcaggggaggaggatgtaccttgtgtctctttcaagtgccttaatccgagccagcagggccttctgcttgcctgctgccatactgtatgtaggaaagtgttctgtggctgctttgtgtcaagaaaagagcagtcactctcagaatcttgattccccatcagccaaagcaaaagatggctgctgctttgtaggcatgtgcctgcaagtgggaccttgctgggcattatatgccctgtgggggtttcagagaccctgaaagaggagggaggacccgcctccttgtctgcacaactgcatgcacttctctccccatcgctccacaacctgaaaccgagaaggagttgctgaccagtgcccaccccggcagcccgggaggaacacaggcagctcctttcccttcacgtggtctgcagagagcagggtgagctgccagctgcccctctccaccagggtaccctgtcttggtggttaggggccacttttcctttgaggctctagtggaggtggatgtccttctctgccaggcttggcacatgatgtgaagaataaatgcccaattcttactgttcaggtttgatgtggaatcacagctgcagtgatatatattttttatcagtgcttggttggttttaaataaagtgcacgctattttattatcttgttctgaataaaatgtatttactcc

SEQ ID NO: 377870 - DNA, 2318 bp, Homo sapiens
  misc_feature (57)..(57): n is a, c, g, or t
  misc_feature (60)..(60): n is a, c, g, or t
  misc_feature (65)..(65): n is a, c, g, or t
  misc_feature (106)..(106): n is a, c, g, or t
  misc_feature (128)..(128): n is a, c, g, or t
  misc_feature (156)..(156): n is a, c, g, or t
  misc_feature (163)..(163): n is a, c, g, or t
ctggaagaattcgcggcccgcagtgtggaggaggagtgagccggatgccccacacancgncaggncaaccaaagagctgagctgcttcggggccatgcagccctcntgccagccccctgcccttttcntgccctgtctctgaaccttcagaacatngatcctngccgcagccccactagccaagagaaacagagaaagaccattccccctgcctgtccttgcggccctgtcttctgaggttctctgtctggggttggctctcttaaccctttctctgctcccagcctgcctcaccagggaaggttggaggggcctccctctggcttctgcatctgcgccagcaaacatcactgccgttggtctctcatgacttaactggcttccctctgctgctgcctcagcattggcccagtcccgtcgagactttgcaccaccaggccaacagaagagagaagccccagttgatgtcttgacccagataggtcgatctgtgcgagggacactggatgcctggattgggccagagaccatgcacctggtgtcagagtcttcgtcccaagtgttgtgggccatctcatcagccatttctgtggccttctttgctctgtctgggatcgccgcacagctgctgaatgccttgggactagctggtgattacctcgcccagggcctgaagctcagccctggccaggtccagaccttcctgctgtggggagcaggggccctggtcgtctactggctgctgtctctgctcctcggcttggtcttggccttgctggggcggatcctgtggggcctgaagcttgtcatcttcctggccggcttcgtggccctgatgaggtcggtgcccgacccttccacccgggccctgctactcctggccttgctgatcctctacgccctgctgagccggctcactggctcccgagcctctggggcccaactcgaggccaaggtgcgagggctggaacgccaggtggaggagctgcgctggcgccagaggcgagcggccaagggggcccgcagtgtggaggaggagtgagccggatgccccacacaccgccagtgtcataccaaagagctgagctgcttcggggccatgcagccctcctgccagccccctgcccttttcttgccctgtctctgaaccttcagaacattgatccttgccgcagccccactagccaagagaaacagagaaagaccattccccctgcctgtccttgcggccctgtcttctgaggttctctgtctggggttggctctcttaaccctttctctgctcccagcctgcctcaccagggaaggttggaggggcctccctctggcttctgcatctgcgccagcaaacatcactgccgttggtctctcatgacttaactggcttccctctgctgctgccttggcttcctcctaatgctcgtgctctcctgtccttctgaagttgctccttggccaaatctccagctcccttcttgttttcctcatcctcctaccctgtactcccaccaaaccatggtcctttaaggcacgctcctgtcctcctcattgcccagcagtagggaggggcaggggtaaggggacctgaggataaagggtggggaaacagggtcccctgaggcctgtgggggctgcaggggaggaggatgtaccttgtgtctctttcaagtgccttaatccgagccagcagggccttctgcttgcctgctgccatactgtatgtaggaaagtgttctgtggctgctttgtgtcaagaaaagagcagtcactctcagaatcttgattccccatcagccaaagcaaaagatggctgctgctttgtaggcatgtgcctgcaagtgggaccttgctgggcattatatgccctgtgggggtttcagagaccctgaaagaggagggaggacccgcctccttgtctgcacaactgcatgcacttctctccccatcgctccacaacctgaaaccgagaaggagttgctgaccagtgcccaccccggcagcccgggaggaacacaggcagctcctttcccttcacgtggtctgcagagagcagggtgagctgccagctgcccctctccaccagggtaccctgtcttggtggttaggggccacttttcctttgaggctctagtggaggtggatgtccttctctgccaggcttggcacatgatgtgaagaataaatgcccaattcttactgttcaggtttgatgtggaatcacagctgcagtgatatatattttttatcagtgcttggttggttttaaataaagtgcacgctattttattatcttgttctgaataaaatgtatttactcc

SEQ ID NO: 377871 - DNA, 1706 bp, Homo sapiens
caactaatacggctaggtacgagcgcgggtttggtggcgcgtttcagcgaagtcgcacgtgaagctcagccctggccaggtccagaccttcctgctgtggggagcaggggccctggtcgtctactggctgctgtctctgctcctcggcttggtcttggccttgctggggcggatcctgtggggcctgaagcttgtcatcttcctggccggcttcgtggccctgatgaggtcggtgcccgacccttccacccgggccctgctactcctggccttgctgatcctctacgccctgctgagccggctcactggctcccgagcctctggggcccaactcgaggccaaggtgcgagggctggaacgccaggtggaggagctgcgctggcgccagaggcgagcggccaagggggcccgcagtgtggaggaggagtgagccggatgccccacacaccgccagtgtcataccaaagagctgagctgcttcggggccatgcagccctcctgccagccccctgcccttttcttgccctgtctctgaaccttcagaacattgatccttgccgcagccccactagccaagagaaacagagaaagaccattccccctgcctgtccttgcggccctgtcttctgaggttctctgtctggggttggctctcttaaccctttctctgctcccagcctgcctcaccagggaaggttggaggggcctccctctggcttctgcatctgcgccagcaaacatcactgccgttggtctctcatgacttaactggcttccctctgctgctgccttggcttcctcctaatgctcgtgctctcctgtccttctgaagttgctccttggccaaatctccagctcccttcttgttttcctcatcctcctaccctgtactcccaccaaaccatggtcctttaaggcacgctcctgtcctcctcattgcccagcagtagggaggggcaggggtaaggggacctgaggataaagggtggggaaacagggtcccctgaggcctgtgggggctgcaggggaggaggatgtaccttgtgtctctttcaagtgccttaatccgagccagcagggccttctgcttgcctgctgccatactgtatgtaggaaagtgttctgtggctgctttgtgtcaagaaaagagcagtcactctcagaatcttgattccccatcagccaaagcaaaagatggctgctgctttgtaggcatgtgcctgcaagtgggaccttgctgggcattatatgccctgtgggggtttcagagaccctgaaagaggagggaggacccgcctccttgtctgcacaactgcatgcacttctctccccatcgctccacaacctgaaaccgagaaggagttgctgaccagtgcccaccccggcagcccgggaggaacacaggcagctcctttcccttcacgtggtctgcagagagcagggtgagctgccagctgcccctctccaccagggtaccctgtcttggtggttaggggccacttttcctttgaggctctagtggaggtggatgtccttctctgccaggcttggcacatgatgtgaagaataaatgcccaattcttactgttcaggtttgatgtggaatcacagctgcagtgatatatattttttatcagtgcttggttggttttaaataaagtgcacgctattttattatcttgttctgaataaaatgtatttactcc

SEQ ID NO: 377872 - DNA, 1321 bp, Homo sapiens
ccccgactagcccgacagccccgactagcccgacagccccgactagcccgacagccccgactagcccgacagccccgactagcccgacaggcccgactagcccgacagccctcctgccagccccctgcccttttcttgccctgtctctgaaccttcagaacattgatccttgccgcagccccactagccaagagaaacagagaaagaccattccccctgcctgtccttgcggccctgtcttctgaggttctctgtctggggttggctctcttaaccctttctctgctcccagcctgcctcaccagggaaggttggaggggcctccctctggcttctgcatctgcgccagcaaacatcactgccgttggtctctcatgacttaactggcttccctctgctgctgccttggcttcctcctaatgctcgtgctctcctgtccttctgaagttgctccttggccaaatctccagctcccttcttgttttcctcatcctcctaccctgtactcccaccaaaccatggtcctttaaggcacgctcctgtcctcctcattgcccagcagtagggaggggcaggggtaaggggacctgaggataaagggtggggaaacagggtcccctgaggcctgtgggggctgcaggggaggaggatgtaccttgtgtctctttcaagtgccttaatccgagccagcagggccttctgcttgcctgctgccatactgtatgtaggaaagtgttctgtggctgctttgtgtcaagaaaagagcagtcactctcagaatcttgattccccatcagccaaagcaaaagatggctgctgctttgtaggcatgtgcctgcaagtgggaccttgctgggcattatatgccctgtgggggtttcagagaccctgaaagaggagggaggacccgcctccttgtctgcacaactgcatgcacttctctccccatcgctccacaacctgaaaccgagaaggagttgctgaccagtgcccaccccggcagcccgggaggaacacaggcagctcctttcccttcacgtggtctgcagagagcagggtgagctgccagctgcccctctccaccagggtaccctgtcttggtggttaggggccacttttcctttgaggctctagtggaggtggatgtccttctctgccaggcttggcacatgatgtgaagaataaatgcccaattcttactgttcaggtttgatgtggaatcacagctgcagtgatatatattttttatcagtgcttggttggttttaaataaagtgcacgctattttattatcttgttctgaataaaatgtatttactcc

SEQ ID NO: 377873 - DNA, 478 bp, Homo sapiens
gcggcgcctactactactaaattcgcggccgcgtcgacagagaccctgaaagaggagggaggacccgcctccttgtctgcacaactgcatgcacttctctccccatcgctccacaacctgaaaccgagaaggagttgctgaccagtgcccaccccggcagcccgggaggaacacaggcagctcctttcccttcacgtggtctgcagagagcagggtgagctgccagctgcccctctccaccagggtaccctgtcttggtggttaggggccacttttcctttgaggctctagtggaggtggatgtccttctctgccaggcttggcacatgatgtgaagaataaatgcccaattcttactgttcaggtttgatgtggaatcacagctgcagtgatatatattttttatcagtgcttggttggttttaaataaagtgcacgctattttattatcttgttctgaataaaatgtatttactcc

SEQ ID NO: 377874 - DNA, 325 bp, Homo sapiens
gcaaaaagtagagaggaagcaaaggttgtaggaattgagaaagtcacagaaccctaatagcttcatggtgtaaagagagggagaaagaaatgtagcattctgttagtgctaaaagaacacatatatttctgatcatatcattcatttaacaaataactattagagcatcaacccatgtgctaggtactattccaggtcctgggggaaaaaaacaataaataaaacatttattgtgggctttatattctggtaaggaagatacacaatataaaatgtcagatacagtttcctttctctgcagcccttctcaattgtgtctctgttc

SEQ ID NO: 377875 - DNA, 215 bp, Homo sapiens
tttttttttgctgctctgcaaggagcagggctaactttaaggccagagttggccttaagatgtattcttgaaatatacatttctgcttgtgggagcactcagagattactagaagttttttaaaagaaagttttcaaaaactggataatgctcttctttgttctatacagaaatcatgtttaatcttatacagaacaaagattaaaccagctgag

SEQ ID NO: 377876 - DNA, 603 bp, Homo sapiens
ttaaggattagaagtaaaatttttagcctttcagagttttcattgacttaattaaaaaacatacatgtgttttaggagattccatggtagaatagaaattgtacagtcttcaatgccatatataacagacccctctttaggttttggctctaccacttacaaactctgtggccttcaataagatacttggcttctttcattttaaatttgtcatggataaaatgatctctgtggctatgaaaagttagaacacataatcctacaagaacataatatttttaaacattatttatgtttccaagcccatctttaaaagttattcaacctataaatgaatctataaaatatagttgaagtgcagtgccaatgctactatagaaacaaataatatttatgataatatttctttgggaaaatacattgatgtccagcatgttagcactaaagcaaaaggactgggaattatccagatgtgagctactccacaatcccatatttggagctagagttcagtgtgtgggtggatggcgagtgatgggacagaaggacagaactggagatcttagggagagaatggttaaaaacaaaataagggcctggtgt

SEQ ID NO: 377877 - DNA, 998 bp, Homo sapiens
gaggtggggttttaccatgttgcccaggctggtgttgaacttctggactcaagtgatcttcctgccttggcctcccaaagtgctggtattacagacatgggacaccactcccggctgttctttctttaaaagtaataacgaagttctatttatttttatttttctgtatctccagagcctcaaaatgtacatttccaattctggtattttcctataccagtgaatggaaatagatgactatagagagtaaattggtttaccaattcagtaaataatattctgaatagttttggaaaattctatggaaacatttagaaattaccatattttttgtgagagaccaggaccctaacattaggacctacacttgcctgttggatttgaatttcaatcttatagatacctcatactgaggtctaaatctaaatttctcttcattcaaattagtttctttctgaggcttggtatttcatattcctcttagctttttctctcctatttctgggtgctagttaaggtggatggaatactataatatatcttgctctgtcctctttgattcccattgttgtcttcctcttccacgtcatcattggctcatgcctgcactagtggaatattcttttaattggtttgtcttcctgcagtctcttcttttggctgaacaacctaaaaaccctaatttgatggacatactttcttgttcaaaaatctaaaatactatttattgctttccttaattaatcacagctgattttttggtccgtgtaaaaaaaacttgagtggttttattggttgcaggggttcctagtgggaaccctaacgtatcctatttaactatgactctactgggtctggtagtggacatataattgataagactagatagtgtggaccaccccccctgctgagagcaattacaaaaatcagaccacaggactaacaaagtgaattatagggccaggatctaagagaagaaggaaactcagatagaggaa

SEQ ID NO: 377878 - DNA, 867 bp, Homo sapiens
  misc_feature (320)..(320): n is a, c, g, or t
cgtgaacccgggaggcagagcttgcagggaggcggacttgcagcgagccgagatagtgccactgcagtggggcctgggcaaagagtgagactccatctcaaaaaaaaaaaaaaagaaagaaatgtgttgctggtatcagatatcagaccaagaacacttcagtctctctaaggatgccctgagctacctcactgttaaaggacgacatcaacacagaatgcactaaacaggaaataagctgtaatctagagaatttccattatgtgttactttttggtgactaacatggaatgttgaaaaggaagagctggaaagctcangttgttttccttgttcctctgacattgtccaggcaagagggcatcctgatcagatgagtagatttggctgagaaaaaccctagagtaaggcaggcactttgtggaggtggatgatgatggctcataaaaacgtttgttctcagtccagttcagggctctgccagcagtctttcagatttgaactgcttaaacaaaccctacagataaattggcactctgatttgtaattctgtttgtacaagtttagagcagcctagctcgagtcctcaaccccagtcctcttagaagtgaactgattgcactggatccctaaacccacaatgttgaggacacatgtgatgactccacttgctcagccagctggcctcttgcactttcccctgcccaccacttgtaactaccacttaattatcttgtgttaattgcttttgttgtgttgggtctgtatttttgtggtcagtgcctgcaggcagaaatgtgaaagcatttggtatgttgaagatacttgcttcttttttaataaaattaaaagtgcagcaaaaaaaaa

SEQ ID NO: 377879 - DNA, 360 bp, Homo sapiens
  misc_feature (1)..(1): n is a, c, g, or t
ngtgacaagaaaaaacatgctcctggctacaaaacagatatgcaaagagttcaccgacctgctggctcaggaccgatctcccctggggaactcacggcccaaccccatcctggagcccggcatccagagctgcttgacccacttcaacctcatctcccacggcttcggcagccccgcggtgtgtgccgcggtcacggccctgcagaactatctcaccgaggccctcaaggccatggacaaaatgtacctcagcaacaaccccaacagccacacggacaacaacgccaaaagcagtgacaaagaggagaagcacagaaagtgaggctctcctcccgccccgcccctcccacgcctcaccag

SEQ ID NO: 377880 - DNA, 1916 bp, Homo sapiens
  misc_feature (1137)..(1137): n is a, c, g, or t
aagagttaaatgaaatactggttttttaaatggttagaacagagactgatgcacataagtattcattattataattcagtttttgcattctttaaagtgaagctgtgttgttgcagtattttaaggatatattgttccccaaatttttgggtaaaattgactgttaaggaagatgagtcatgtttaaactgtaattgtgagtagaccaccctttatccttgaagggctttctcaaccaggtgaatggcatggctgtggtgggaaatacagggccctgtgagacaggaaatctagggggttgtctagctccattaccatcctcttcttttatggattcagtgtcttgttcttttgttccatgtgagaatcatccctgccctgcctacgttataaagctggagaaaaatgaaataagtaaaaacacatggaaaacgtactaaaatattaatgcaaggatgcaaggtataatctttgctggaacattagttcctcatttattagtaacattacaggcatttgaaattatgtactttatatgggacctatattttaaatatatgctaatcatcctagaagccctacaaggtaggtgttacttttttccattttaccattaaggaaattatccaggtttacacaacttgaacccaggtctctgtcagtaaaaaactgtctactcttccaaaccattttatctatccatatttatttcctccatcaaacattagttgaatgcaatgtggtgtatcacccaaggtcggctggcatcttgaaaacaataactatgtgttactcagcatcttagcacctagcaaagagtggagaatataacagtctttcaattaagttttgtcgaagaaagaaatgaaggctcttggtctttagaaattcacaaatcagctgaggagacagacatactaaccaacagcatatgatcagcatgttctaattggtactgtctctggaataaaacagctggcagcaaaaaatgtctgacttttgcagagaaactcctaatatgagtttgactgctgtcccacatctacctatgtggtcgtagtgctgtagtcactgttgttaccctaagaggacagccttgttcctccaggtctcttacaactctcttttaaggagctngtattagatccctagagctgctgtaatgcattgcccaaatcttgtgacttaaaccaacagaaatttattatctcatagttctggaggctagaagcctgaaatgaaggtgtctgcaggcttcactctctctgaaatttttatgagaacatttttcatgtgatttagagcccacctgggtaatccaggatgatatcatctcaagattcctaacttaattacacctgtaaaatccatttttccaaataaggtcatattcacaagttctgaagactaaggcatggacagatctcattggaaaccatcattcaacccactgcaaagctttagccaattcccagctatgaattcttccaagatgaaaggataccaagctcaagactctcccttgttcatttgaggccttcccaaagatgactgacattttcacaaattttatttggtttcatttcctatcttaacgaaaacaatgataatttcctatcttaatgaaaaaaatgataatgtttatactgtatgataattaaaacatcatgtaaagattactctttatctaaatgtttgcacatactctttgaacatctatcatttttccagcagttatgagtttttcttcccaggaatatgggaatgaagtgaaattgacaacttttcccccacgcattgtatcctcttttaatgccaccccctgtgtttaacagcctctgacacaatgtaggagcaatccatggtactcaaagaatattatggaatttaacaacaagtatatatatttgtcttga

SEQ ID NO: 377881 - DNA, 543 bp, Homo sapiens
cagccctgtgctcttgtctgtcctcactgacagacaaaaataactcatcagtcggttctcagacccacagtcccatgacatttcttgactgtttcagaagtaatgcctcaaggaccagcttgcagaaagtggaggacctgccccctggaccttacaagtagcaggccactcttaaaaatgcaaggaccacagatgtcaccatgactgaaaaatagaggctggccctgcctctgaagatgctgcaatggacttgtgttcaaagagaaattggctgtaacttcccttattgagatataatcgggctcatcgttaagctgtggtcagccagaagtgtagctgtgcccctgggattgaaatcagcaatcaatctggacatcctttttctatcttcatgaggcacctccccagtaccaaccaaatttcttggggatcccccgggacttctcataaatggaattgatttgaactcaggaaaccctcaaataggccagaacaactcactaattaaattcatcccctcccaaaaacaaaaacaaaaacaaa

SEQ ID NO: 377882 - DNA, 571 bp, Homo sapiens
aaggtcgccagcttcgggccagatgttgactagagccgcaaggatttttgggaactgtagtctagagcaggaaggggtgaggcgctggggcaagtggaaggaggtcgcttaaatgacttcctgccccaagccgactcagtgcagaacgcacccaggaccccggactgtactaggcgttataacgctctctgagaatgctagactgactaaatcgtcatttttgccttcatccgtggataagccacatactgtatgactgcatttataggaaatatttaaaatagtcaaatctacggaaaaggagtaagttagagttttttaggactagcaggattagggggaactgtgagtgattggtaatagctaaagggttcatttttggggtaatgcaaagcttcttgaattagataatgatgtttgcacaactctgaatacactaaaagtgactgaatggtacaccataaacgagctaatgttatagtttgtaaattatatttgtgtgcatgttttttaaaaatcaactttactgaagaataatttagatacaataaaatgcactcattttaagtga

SEQ ID NO: 377883 - DNA, 652 bp, Homo sapiens
aaggtcgccagcttcgggccagatgttgactagagccgcaaggatttttgggaactgtagtctagagcaggaaggggtgaggcgctggggcaagtggaaggaggtcgcttaaatgacttcctgccccaagccgactcagtgcagaacgcacccaggaccccggactgtactaggcgttataacgctctctgagaatgctagactgactaaatcgtcatttttgccttcatccgtggataagccacatactgtatgactgcatttataggaaatatttaaaatagtcaaatctacggaaaaggagtaagttagagttttttaggactagcaggattagggggaactgtgagtgattggtaatagctaaagggttcatttttggggtaatgcaaagcttcttgaattagataatgatgtttgcacaactctgaatacactaaaagtgactgaatggtacaccataaacgagctaatgttatagtttgtaaattatatttgtgtgcatgttttttaaaaatcaactttactgaagaataatttagatacaataaaatgcactcattttaagtgaactgttcggtaagcttcaacgcatgtctaaacccttgtcaccaccatcgtaatcaggatatagaatattttttaaaattaa

SEQ ID NO: 377884 - DNA, 2785 bp, Homo sapiens
gggaaaggctttacttctatttcacgacttaatagacaccgaataattcatactggagagaaattgtataattgtaatgaatgtggtaaagccttaagctcccactcaacacttattattcatgagcgaattcatactggagaaaaaccatgtaaatgtaaagtatgtggaaaagccttcagacagagttccgctctcattcaacatcagagaatgcatactggagaaagaccctataagtgtaacgaatgtgacaaaacattcaggtgtaactcatcgcttagtaatcaccagagaattcatactggagagaaaccatatcgatgtttagaatgtgggatgtcttttggccaaagtgcagctcttatacaacatcagaggattcatacaggagaaaaaccctttaaatgtaatacatgtggaaaaacttttagacaaagctcatcacttattgcacatcaaagaattcatactggagagaaaccctatgaatgtaatgcatgtgggaaactctttagccagaggtcatcccttactaatcattataaaattcacattgaagaggactccttaaaagccgatttgcatgtgtgaaagccttaaaccaaaactcatcagagaatacatgcttgagagtgatttattaaatataatgaatatgagaaaactcttagttctcatcagatactaagttttaagaataaactttagctatgtaataacttatgggaaaagcttttatacttgtcactcactttttaaaatatcccgagacagttcactgttgcagacattgaaattggccatttgtaagataaaagaatacaaatggagagatttgcatgggatgcagaaatatggaagactaaccaagcagaccaggagagaccagcaatagtgtcccagagaccatgatgtctgagcccagttttggaagaatactttctttccaggctgggcatggtggctcacacctgtaatcccagcactttgggaggccaagacaagaggattgcttgagcccaggaaggagttggagaccagcctgagcaacaacaacaacaaaattagccaggcataagtggtgcacatttgtagtccagctactctggaggttgaggtaagaagaattgcttgagctcaggaggttgaggctgcagtgagctgtgatcccaccactgcactccagcttggggaaagagcaagactctgcctcccccacatgcgcccccccacccctgcccctgccagaaaaattgtttgtggatccctgttatcagaataaggacattccctcatattcctagtgtgatgtgagtttttatcataaaagggagtagtattttgtcatgtccattttctgcattggttgaaatgatcattttgtttttctcttcattcttttaatagataattgtttgaattttggtgttaaccaatgtttcattcctgaaataaattctacttggtcatgatatatcatcatgtatgtgtatatgtatataagatcaggtttcttccttagtaaacagaagcctgatgaagtgcccaacgttgtgttctaagaacttagagcaaaaggaaattatccaagtctcaaggaaagatgtaataatacatggaaatgaggtactcttggaaggcaaggcctgggagcaaaaggctcagaggaagaataaatctagcatttgtagggacctgtagggagactggctttgctggtgtagagggctcctggtaggataaaataaaaatatttgaaatgaaagctacagttaccctgtcagagactttgaatgctgtctaagactgtaggagtttggatatgatgatggacatattaattcactatatttctgaggagcaaatgaccaatttgagactattttaggaagaattatctgatagaatagatgattcaaagattatttgatcatttctgattatgatcaaatgattcaaagattatctgatcattgagaaactgaaggactgattgttgggagtaggtctttgggcgagtctgtgagaagagttcttaatgagaactaaaaaggttatttctgttcttggtgtcccaaactgttctggtattttgccaaatactacagatagtaaaattcttaattaaagctgacatggttatatttttaaaaatttaggtgcaattagtctttcaagatcagaagatatttagttagtatcatagttcagtctgttccaagctgtaaagtcagttatttcagtaatgtaatttctaagatctataaaaaatgaaaatattttattttcttatataactttctgtgagagcattgaacagtcaagaaacttgtatgttttccagcccccattctgcttcaagttacatggtgtctagccttttcagctctagaaattctacattattatgtaatatcctgctttatgggtcttggtggtatatggtatagatcaactcaaaatttaaaattttcatcgtatgaatttttgtgtagagatttcaagatgagttgatctgagaacaaaaagaactccaaagaaatcttactattttcctgttggtatatattgttcaataaaacactatattggtatatattgttcaataaaacactatattggtatatattgttcaataaaataattatgtattacgaattaaattttcaacctaaaaatcagattattccaggaagatggaatagacagatgtacctttccttatttatcccatacatctgaaaccttgtatattataaataaacataagactctggtgagt

SEQ ID NO: 377885 - DNA, 1780 bp, Homo sapiens
gttccctttgcaattgccttgggtcctgccgcacagagcggcctgtctttatcagaggtccctctgccagggggagggccccagagaaaaccagaaagagggtgagagactgaggaagataaagcgtcccagggcctcctacaccagcgcctgagcaggaagcgggaggggccatgactacgaggccctgggaggtcactttagggagggctgtcctaaaaccagaagcttggagcagaaagtgaaaccctggtgctccagacaaagatcttagtcgggactagccggccaaggatgaagcctcacttcagaaacacagtggagcgaatgtatcgagacacattctcctacaacttttataatagacccatcctttctcgtcggaataccgtctggctgtgctacgaagtgaaaacaaagggtccctcaaggccccctttggacgcaaagatctttcgaggccaggtgtattccgaacttaagtaccacccagagatgagattcttccactggttcagcaagtggaggaagctgcatcgtgaccaggagtatgaggtcacctggtacatatcctggagcccctgcacaaagtgtacaagggatatggccacgttcctggccgaggacccgaaggttaccctgaccatctttgttgcccgcctctactacttctgggacccagattaccaggaggcgcttcgcagcctgtgtcagaaaagagacggtccgcgtgccaccatgaagatcatgaattatgacgaatttcagcactgttggagcaagttcgtgtacagccaaagagagctatttgagccttggaataatctgcctaaatattatatattactgcacatcatgctgggggagattctcagacactcgatggatccacccacattcactttcaactttaacaatgaaccttgggtcagaggacggcatgagacttacctgtgttatgaggtggagcgcatgcacaatgacacctgggtcctgctgaaccagcgcaggggctttctatgcaaccaggctccacataaacacggtttccttgaaggccgccatgcagagctgtgcttcctggacgtgattcccttttggaagctggacctggaccaggactacagggttacctgcttcacctcctggagcccctgcttcagctgtgcccaggaaatggctaaattcatttcaaaaaacaaacacgtgagcctgtgcatcttcactgcccgcatctatgatgatcaaggaagatgtcaggaggggctgcgcaccctggccgaggctggggccaaaatttcaataatgacatacagtgaatttaagcactgctgggacacctttgtggaccaccagggatgtcccttccagccctgggatggactagatgagcacagccaagacctgagtgggaggctgcgggccattctccagaatcaggaaaactgaaggatgggcctcagtctctaaggaaggcagagacctgggttgagcctcagaataaaagatcttcttccaagaaatgcaaacaggctgttcaccaccatctccagctgatcacagacaccagcaaagcaatgcactcctgaccaagtagattcttttaaaaattagagtgcattactttgaatcaaaaatttatttatatttcaagaataaagtactaagattgtgctcaatacacagaaaagtttcaaacctactaatccagcgacaatttgaatcggttttgtaggtagaggaataaaatgaaatactaaatctttctgtaaaaaaaaaa

SEQ ID NO: 377886 - DNA, 892 bp, Homo sapiens
  misc_feature (79)..(79): n is a, c, g, or t
tggcgatacattcacacagaacagttgactgatacgattatacgactcatataggaattgccctcgagccagaatcgcnacgagccaggggagggccccagagaaaaccagaaagagggtgagagactgaggaagataaagcgtcccaggcctcctacaccagcgcctgagcaggaagggggaggggccatgactacgaggccctgggaggtcactttagggagggctgtcctgaaacctggagcctggagcagaaagtgaaaccctggtgctccagacaaagatcttagtcgggactagccggccaaggatgaagcctcacttcagaaacacagtggagcgaatgtatcgagacacattctcctacaacttttataatagacccatcctttctcgtcggaataccgtctggctgtgctacgaagtgaaaacaaagggtccctcaaggccccgtttggacgcaaagatctttcgaggccaggtgcccaggtctttcatcagagccccatttcaagtgctcagtagcccctttggccagtgcgccccaccacatgggacagcgcaggtccagtggcctccccagctgaccgcaggcagggaacaaggcagaccctagagggccaggccacagcaggggctgaggatgcctggtgaatggatgcctgggagaatggatgccagaattcacgcatgaggctctgaacagggctgggaaaacttccaaacgaagggaagctcatgtcttggtgcactttgtgatgatgcttcaacagcaggactgagatggggacatttacaataaacagaaatgtatgggctcgaaaaaaagcctctgggaagtccactgtcaatgcaccagcaactttccagggcctgcgagctgcacagtcac

SEQ ID NO: 377887 - DNA, 1061 bp, Homo sapiens
gttccctttgcaattgccttgggtcctgccgcacagagcggcctgtctttatcagaggtccctctgccagggggagggccccagagaaaaccagaaagagggtgagagactgaggaagataaagcgtcccagggcctcctacaccagcgcctgagcaggaagcgggaggggccatgactacgaggccctgggaggtcactttagggagggctgtcctaaaaccagaagcttggagcagaaagtgaaaccctggtgctccagacaaagatcttagtcgggactagccggccaaggatgaagcctcacttcagaaacacagtggagcgaatgtatcgagacacattctcctacaacttttataatagacccatcctttctcgtcggaataccgtctggctgtgctacgaagtgaaaacaaagggtccctcaaggccccctttggacgcaaagatctttcgaggccaggtaccacccggactccaatcactttgcaggcaggagctaagccagctgggaaagcaaaccacgcactgataagtgaagtgcccggcggcgggctatccagtgtgtccttctctcccacactttccaagtccgtggccctgaccttcctgctggaccgtcctgggatcggatcgtggagggggtttgcctctgcacaaaaggccttgtgtttccgtttttcttttcttttcttttttcttttttttttttgagacagagtttcactcttgttgctcaggctggagtgcaatgacgcgatctcggctcacagcaacctctgcctcctgggttcaagcgatgctgtcgcctcagactcgcaagtagctgcgattacaggtgcccaccaccacgcccagctgattttttttttgtatttttagtacagatggggtttcaccatattcaccaggctggtctcgaacttctgacctcaggtgatccacctgcctcggcctcccaaagtgttgggattacaggtgtgagccacagcgccggcctaattttaatatttaattaatccaatgtggctaacatattacttcaacattaattaacat

SEQ ID NO: 377888 - DNA, 387 bp, Homo sapiens
gttccctttgcaattgccttgggtcctgccgcacagagcggcctgtctttatcagaggtccctctgccagggggagggccccagagaaaaccagaaagagggtgagagactgaggaagataaagcgtcccagggcctcctacaccagcgcctgagcaggaagcgggaggggccatgactacgaggccctgggaggtcaactttgggaggccaaggcgggcagatcacctgaagttagatattcaaaaccggcctgggcaacatggtgaaatcccatctctactaaaaatacaaaaaaaaaaaaaattagccaggcatggtggcagtcacctgtaatcccagctactcgggaggctgaggcaggagaaccgcttgatcccatgaggca

SEQ ID NO: 377889 - DNA, 1780 bp, Homo sapiens
gttccctttgcaattgccttgggtcctgccgcacagagcggcctgtctttatcagaggtccctctgccagggggagggccccagagaaaaccagaaagagggtgagagactgaggaagataaagcgtcccagggcctcctacaccagcgcctgagcaggaagcgggaggggccatgactacgaggccctgggaggtcactttagggagggctgtcctaaaaccagaagcttggagcagaaagtgaaaccctggtgctccagacaaagatcttagtcgggactagccggccaaggatgaagcctcacttcagaaacacagtggagcgaatgtatcgagacacattctcctacaacttttataatagacccatcctttctcgtcggaataccgtctggctgtgctacgaagtgaaaacaaagggtccctcaaggccccctttggacgcaaagatctttcgaggccaggtgtattccgaacttaagtaccacccagagatgagattcttccactggttcagcaagtggaggaagctgcatcgtgaccaggagtatgaggtcacctggtacatatcctggagcccctgcacaaagtgtacaagggatatggccacgttcctggccgaggacccgaaggttaccctgaccatctttgttgcccgcctctactacttctgggacccagattaccaggaggcgcttcgcagcctgtgtcagaaaagagacggtccgcgtgccaccatgaagatcatgaattatgacgaatttcagcactgttggagcaagttcgtgtacagccaaagagagctatttgagccttggaataatctgcctaaatattatatattactgcacatcatgctgggggagattctcagacactcgatggatccacccacattcactttcaactttaacaatgaaccttgggtcagaggacggcatgagacttacctgtgttatgaggtggagcgcatgcacaatgacacctgggtcctgctgaaccagcgcaggggctttctatgcaaccaggctccacataaacacggtttccttgaaggccgccatgcagagctgtgcttcctggacgtgattcccttttggaagctggacctggaccaggactacagggttacctgcttcacctcctggagcccctgcttcagctgtgcccaggaaatggctaaattcatttcaaaaaacaaacacgtgagcctgtgcatcttcactgcccgcatctatgatgatcaaggaagatgtcaggaggggctgcaaatgctgcgggatgctggggcccaagtctccatcatgacctacgatgaatttaagcactgctgggacacctttgtggaccaccagggatgtcccttccagccctgggatggactagatgagcacagccaagacctgagtgggaggctgcgggccattctccagaatcaggaaaactgaaggatgggcctcagtctctaaggaaggcagagacctgggttgagcctcagaataaaagatcttcttccaagaaatgcaaacaggctgttcaccaccatctccagctgatcacagacaccagcaaagcaatgcactcctgaccaagtagattcttttaaaaattagagtgcattactttgaatcaaaaatttatttatatttcaagaataaagtactaagattgtgctcaatacacagaaaagtttcaaacctactaatccagcgacaatttgaatcggttttgtaggtagaggaataaaatgaaatactaaatctttctgtaaaaaaaaaa

SEQ ID NO: 377890 - DNA, 1780 bp, Homo sapiens
  misc_feature (1705)..(1705): n is a, c, g, or t
gttccctttgcaattgccttgggtcctgccgcacagagcggcctgtctttatcagaggtccctctgccagggggagggccccagagaaaaccagaaagagggtgagagactgaggaagataaagcgtcccagggcctcctacaccagcgcctgagcaggaagcgggaggggccatgactacgaggccctgggaggtcactttagggagggctgtcctaaaaccagaagcttggagcagaaagtgaaaccctggtgctccagacaaagatcttagtcgggactagccggccaaggatgaagcctcacttcagaaacacagtggagcgaatgtatcgagacacattctcctacaacttttataatagacccatcctttctcgtcggaataccgtctggctgtgctacgaagtgaaaacaaagggtccctcaaggccccctttggacgcaaagatctttcgaggccaggtgtattccgaacttaagtaccacccagagatgagattcttccactggttcagcaagtggaggaagctgcatcgtgaccaggagtatgaggtcacctggtacatatcctggagcccctgcacaaagtgtacaagggatatggccacgttcctggccgaggacccgaaggttaccctgaccatctttgttgcccgcctctactacttctgggacccagattaccaggaggcgcttcgcagcctgtgtcagaaaagagacggtccgcgtgccaccatgaagatcatgaattatgacgaatttcagcactgttggagcaagttcgtgtacagccaaagagagctatttgagccttggaataatctgcctaaatattatatattactgcacatcatgctgggggagattctcagacactcgatggatccacccacattcactttcaactttaacaatgaaccttgggtcagaggacggcatgagacttacctgtgttatgaggtggagcgcatgcacaatgacacctgggtcctgctgaaccagcgcaggggctttctatgcaaccaggctccacataaacacggtttccttgaaggccgccatgcagagctgtgcttcctggacgtgattcccttttggaagctggacctggaccaggactacagggttacctgcttcacctcctggagcccctgcttcagctgtgcccaggaaatggctaaattcatttcaaaaaacaaacacgtgagcctgtgcatcttcactgcccgcatctatgatgatcaaggaagatgtcaggaggggctgcgcaccctggccgaggctggggccaaaatttcaataatgacatacagtgaatttaagcactgctgggacacctttgtggaccaccagggatgtcccttccagccctgggatggactagatgagcacagccaagacctgagtgggaggctgcgggccattctccagaatcaggaaaactgaaggatgggcctcagtctctaaggaaggcagagacctgggttgagcctcagaataaaagatcttcttccaagaaatgcaaacaggctgttcaccaccatctccagctgatcacagacaccagcaaagcaatgcactcctgaccaagtagattcttttaaaaattagagtgcattactttgaatcaaaaatttatttatatttcaagaataaagtactaagattgtgctcaatattcccagaatagttttcaatgtantaatgaagtgattaattggctccatatttagactaataaaacattaagaatcttccataaaaaaaaaaaagtcga

SEQ ID NO: 377891 - DNA, 1796 bp, Homo sapiens
  misc_feature (79)..(79): n is a, c, g, or t
tggcgatacattcacacagaacagttgactgatacgattatacgactcatataggaattgccctcgagccagaatcgcnacgagccaggggagggccccagagaaaaccagaaagagggtgagagactgaggaagataaagcgtcccaggcctcctacaccagcgcctgagcaggaagggggaggggccatgactacgaggccctgggaggtcactttagggagggctgtcctgaaacctggagcctggagcagaaagtgaaaccctggtgctccagacaaagatcttagtcgggactagccggccaaggatgaagcctcacttcagaaacacagtggagcgaatgtatcgagacacattctcctacaacttttataatagacccatcctttctcgtcggaataccgtctggctgtgctacgaagtgaaaacaaagggtccctcaaggccccctttggacgcaaagatctttcgaggccaggtgtattccgaacttaagtaccacccagagatgagattcttccactggttcagcaagtggaggaagctgcatcgtgaccaggagtatgaggtcacctggtacatatcctggagcccctgcacaaagtgtacaagggatatggccacgttcctggccgaggacccgaaggttaccctgaccatctttgttgcccgcctctactacttctgggacccagattaccaggaggcgcttcgcagcctgtgtcagaaaagagacggtccgcgtgccaccatgaagatcatgaattatgacgaatttcagcactgttggagcaagttcgtgtacagccaaagagagctatttgagccttggaataatctgcctaaatattatatattactgcacatcatgctgggggagattctcagacactcgatggatccacccacattcactttcaactttaacaatgaaccttgggtcagaggacggcatgagacttacctgtgttatgaggtggagcgcatgcacaatgacacctgggtcctgctgaaccagcgcaggggctttctatgcaaccaggctccacataaacacggtttccttgaaggccgccatgcagagctgtgcttcctggacgtgattcccttttggaagctggacctggaccaggactacagggttacctgcttcacctcctggagcccctgcttcagctgtgcccaggaaatggctaaattcatttcaaaaaacaaacacgtgagcctgtgcatcttcactgcccgcatctatgatgatcaaggaagatgtcaggaggggctgcgcaccctggccgaggctggggccaaaatttcaataatgacatacagtgaatttaagcactgctgggacacctttgtggaccaccagggatgtcccttccagccctgggatggactagatgagcacagccaagacctgagtgggaggctgcgggccattctccagaatcaggaaaactgaaggatgggcctcagtctctaaggaaggcagagacctgggttgagcctcagaataaaagatcttcttccaagaaatgcaaacaggctgttcaccaccatctccagctgatcacagacaccagcaaagcaatgcactcctgaccaagtagattcttttaaaaattagagtgcattactttgaatcaaaaatttatttatatttcaagaataaagtactaagattgtgctcaatacacagaaaagtttcaaacctactaatccagcgacaatttgaatcggttttgtaggtagaggaataaaatgaaatactaaatctttctgtaaaaaaaaaa

SEQ ID NO: 377892 - DNA, 1613 bp, Homo sapiens
gaaagaggggctgaagtcgcccttgaataaccacagcagtggcacccacaaaggtgcagttcccacagcctcatagctgcttgtaggtgccacctcttaaggccattaccatagcaattaatactgaacatgagctttggagcagacaaacactcaaaccgaacagggggatggaggaaaggagcttcaatggcaagatctcctggactcctgtcctggcccctcctccccctgccccacccctgctctcctcctgctccccctctcagagcttgccctgaccctgctcctctcccaggtgtattccgaacttaagtaccacccagagatgagattcttccactggttcagcaagtggaggaagctgcatcgtgaccaggagtatgaggtcacctggtacatatcctggagcccctgcacaaagtgtacaagggatatggccacgttcctggccgaggacccgaaggttaccctgaccatctttgttgcccgcctctactacttctgggacccagattaccaggaggcgcttcgcagcctgtgtcagaaaagagacggtccgcgtgccaccatgaagatcatgaattatgacgaatttcagcactgttggagcaagttcgtgtacagccaaagagagctatttgagccttggaataatctgcctaaatattatatattactgcacatcatgctgggggagattctcagacactcgatggatccacccacattcactttcaactttaacaatgaaccttgggtcagaggacggcatgagacttacctgtgttatgaggtggagcgcatgcacaatgacacctgggtcctgctgaaccagcgcaggggctttctatgcaaccaggctccacataaacacggtttccttgaaggccgccatgcagagctgtgcttcctggacgtgattcccttttggaagctggacctggaccaggactacagggttacctgcttcacctcctggagcccctgcttcagctgtgcccaggaaatggctaaattcatttcaaaaaacaaacacgtgagcctgtgcatcttcactgcccgcatctatgatgatcaaggaagatgtcaggaggggctgcgcaccctggccgaggctggggccaaaatttcaataatgacatacagtgaatttaagcactgctgggacacctttgtggaccaccagggatgtcccttccagccctgggatggactagatgagcacagccaagacctgagtgggaggctgcgggccattctccagaatcaggaaaactgaaggatgggcctcagtctctaaggaaggcagagacctgggttgagcctcagaataaaagatcttcttccaagaaatgcaaacaggctgttcaccaccatctccagctgatcacagacaccagcaaagcaatgcactcctgaccaagtagattcttttaaaaattagagtgcattactttgaatcaaaaatttatttatatttcaagaataaagtactaagattgtgctcaatacacagaaaagtttcaaacctactaatccagcgacaatttgaatcggttttgtaggtagaggaataaaatgaaatactaaatctttctgtaaaaaaaaaa

SEQ ID NO: 377893 - DNA, 1216 bp, Homo sapiens
gttccctttgcaattgccttgggtcctgccgcacagagcggcctgtctttatcagaggtccctctgccagggggagggccccagagaaaaccagaaagagggtgagagactgaggaagataaagcgtcccagggcctcctacaccagcgcctgagcaggaagcgggaggggccatgactacgaggccctgggaggtcactttagggagggctgtcctaaaaccagaagcttggagcagaaagtgaaaccctggtgctccagacaaagatcttagtcgggactagccggccaaggatgaagcctcacttcagaaacacagtggagcgaatgtatcgagacacattctcctacaacttttataatagacccatcctttctcgtcggaataccgtctggctgtgctacgaagtgaaaacaaagggtccctcaaggccccctttggacgcaaagatctttcgaggccaggctccacataaacacggtttccttgaaggccgccatgcagagctgtgcttcctggacgtgattcccttttggaagctggacctggaccaggactacagggttacctgcttcacctcctggagcccctgcttcagctgtgcccaggaaatggctaaattcatttcaaaaaacaaacacgtgagcctgtgcatcttcactgcccgcatctatgatgatcaaggaagatgtcaggaggggctgcgcaccctggccgaggctggggccaaaatttcaataatgacatacagtgaatttaagcactgctgggacacctttgtggaccaccagggatgtcccttccagccctgggatggactagatgagcacagccaagacctgagtgggaggctgcgggccattctccagaatcaggaaaactgaaggatgggcctcagtctctaaggaaggcagagacctgggttgagcctcagaataaaagatcttcttccaagaaatgcaaacaggctgttcaccaccatctccagctgatcacagacaccagcaaagcaatgcactcctgaccaagtagattcttttaaaaattagagtgcattactttgaatcaaaaatttatttatatttcaagaataaagtactaagattgtgctcaatacacagaaaagtttcaaacctactaatccagcgacaatttgaatcggttttgtaggtagaggaataaaatgaaatactaaatctttctgtaaaaaaaaaa

SEQ ID NO: 377894 - DNA, 964 bp, Homo sapiens
gagcggcctgtctttatcagaggtccctctgccagggggagggccccagagaaaaccagaaagagggtgagagactgaggaagataaagcgtcccaggcctcctacaccagcgcctgagcaggaagggggaggggccatgactacgaggccctgggaggtcactttagggagggctgtcctgaaacctggagcctggagcagaaagtgaaaccctggtgctccagacaaagatcttagtcgggactagccggccaaggatgaagcctcacttcagaaacacagtggagcgaatgtatcgagacacattctcctacaacttttataatagacccatcctttctcgtcggaataccgtctggctgtgctacgaagtgaaaacaaagggtccctcaaggccccgtttggacgcaaagatctttcgaggccaggtgtattcccagcctgagcaccacgcagaaatgtgcttcctctcttggttctgtggcaaccagctgcctgcttacaagtgtttccagatcacctggtttgtatcctggaccccctgcccggactgtgtggcgaagctggccgaattcctggctgagcaccccaatgtcaccctgaccatctccgccgcccgcctctactactactgggaaagagattaccgaagggcgctctgcaggctgagtcaggcaggggcccgcgtgaagattatggacgatgaagaatttgcatactgctgggaaaactttgtgtacagtgaaggtcagccattcatgccttggtacaaattcgatgacaattatgcattcctgcaccgcacgctaaaggagattctcagaaacccgatggaggcaatgtatccacacatattctacttccactttaaaaacctacgcaaagcctatggtcggaacgaaagctggctgtgcttcaccatggaagttgtaaagcaccactcacctgtctcctggaagaggg

SEQ ID NO: 377895 - DNA, 386 bp, Homo sapiens
gagggcagatcacctgaggttgggagtttgagaccagcctgaaccacatggagaaaccccttttctactagaaatacaaaattagcctggtgtggtggtgcatgcctgtaatcctagctacttgtacactccagcctgggcaacaagagtgaaactctgtctcaaaaaaaaaaaagattacctcatggcttgctttcttttctaggctccacataaacacggtttccttgaaggccgccatgcagagctgtgcttcctggacgtgattcccttttggaagctggacctggaccaggactacagggttacctgcttcacctcctggagcccctgcttcagctgtgcccaggaaatggctaaattcatttcaaaaaacaaacacgtga

SEQ ID NO: 377896 - DNA, 2337 bp, Homo sapiens
gaaagaggggctgaagtcgcccttgaataaccacagcagtggcacccacaaaggtgcagttcccacagcctcatagctgcttgtaggtgccacctcttaaggccattaccatagcaattaatactgaacatgagctttggagcagacaaacactcaaaccgaacagggggatggaggaaaggagcttcaatggcaagatctcctggactcctgtcctggcccctcctccccctgccccacccctgctctcctcctgctccccctctcagagcttgccctgaccctgctcctctcccaggtgtattccgaacttaagtaccacccagagatgagattcttccactggttcagcaagtggaggaagctgcatcgtgaccaggagtatgaggtcacctggtacatatcctggagcccctgcacaaagtgtacaagggatatggccacgttcctggccgaggacccgaaggttaccctgaccatctttgttgcccgcctctactacttctgggacccagattaccaggaggcgcttcgcagcctgtgtcagaaaagagacggtccgcgtgccaccatgaagatcatgaattatgacgaatttcagcactgttggagcaagttcgtgtacagccaaagagagctatttgagccttggaataatctgcctaaatattatatattactgcacatcatgctgggggagattctcaggtgagggtctccctccaggctcatcgcctcgctcctctcacctcctgctcatcctcttgaggcctcccctctgttccagaccaggtcctctcctggccaggccctcctgccttccctcctgccccctgcctgccctcgtggttacactccctcacccacactcctcgtgctccctccacctccctgcctcccacctgctttcctgggcccttcctgtgagtgagaggccccttctgcctccagagcaacctccatccacccccacagcctgggagccccaacctggccccttccatctccctggcataaccgaatttgtcgtaaaactggacgtagtaagtgggcatgaatagtcacaagcccggcagtcagaagctttgagcaacatccttaaaggccaacctgagcccctgagaaggagctgcctccatggaaacagagcttcaggcttcggctgccatagaagatggccgggctgggtgcccacagggcaggcatttattttctcacacatctggaggctgcaagtccaaggtggaggggtgggcggggttgtgtcttctgcagtcgctcctcctggctggcagggggtcccttccggccctgtcctctctggcctttcctctgtgcacctgcactcgtggggtctctctgcctccaaatgtcctcctcgtttatggaccccagtcatgtgaatttgggcccacactgaaggtctcatttaagttaatcatctgatgaaaggacctgtctccaggccaggtgcagaggctcatgcctgtaatcccagcactttgggagtccaaggcgggtggatcacctgaggtcaggagttcgacaccagcctggccaacatgttaaaaccccatctctaccaaaaatacaaaaattagccgggagtggtggtgggcgcctataattctagctactcggaaggctgaggcaggagaatcgcttgaacccgggaggcggaggttgcggtgagcccagactgcgccgctgcactccagcctgggcaaaaaagcgaaacttcttctcaaacaaacaaacaagaaagaaaggacctgtttccaaatacagccaccctttgagggagcgggggttaaggcttcaatacattgattttggggagaaacagtgaaggccacggcaagaagctgcagtcattgtgggcgggcctgggtggggagtgcaggggttcctgtcctgtgtgtctgtttcccaggggagtcctgacctgactctcacagcccctccacccagatgttcctgtgtgcttcacccaccccattccttctgcacccaacactcctgagcccctccttagctcccccgacaggctcccctgctcccccactcccgggctgctcctcttctcagcctctctctgggcctctctggggtccggacatgacccctcagctgatgcctgtggcttccccagccagaatcttcccagttccaggctgggctctgcagagtcctatcaaaggtggcatcctcccctctgtccactccagggtgaagatctggtgtttctggtttggaaatgcctctgcactgggtgctaataattcacttttacctttataattgtggttttgtaaggacaggtatttttggcaacag

SEQ ID NO: 377897 - DNA, 571 bp, Homo sapiens
agtccgtggccctgaccttcctgctggaccgtcctgggatcggatcgtggagggggtttgcctttgcactccagcctgggcaacaagagtgaaactacgtctcaaaacaaaaacaaaaaacaaaaaaagataaatgagcggtgtatggtgtatttttcaggtgcccaggtctttcatcagagccccatttcaagtgctcagtagcccctttggccagtgcgccccaccacatgggacagcgcaggtccagtggcctccccagctgaccgcaggcagggaacaaggcagaccctagagggccaggccacagcaggggctgaggatgcctggtgaatggatgcctgggagaatggatgccagaattcacgcatgaggctctgaacagggctgggaaaacttccaaacgaagggaagctcatgtcttggtgcactttgtgatgatgcttcaacagcaggactgagatggggacatttacaataaacagaaatgtatgggctcgaaaaaaagcctctgggaagtccactgtcaatgcaccagcaactttccagggcctgcgagctgcacagtcac

SEQ ID NO: 377898 - DNA, 1726 bp, Homo sapiens
gttccctttgcaattgccttgggtcctgccgcacagagcggcctgtctttatcagaggtccctctgccagggggagggccccagagaaaaccagaaagagggtgagagactgaggaagataaagcgtcccagggcctcctacaccagcgcctgagcaggaagcgggaggggccatgactacgaggccctgggaggtcactttagggagggctgtcctaaaaccagaagcttggagcagaaagtgaaaccctggtgctccagacaaagatcttagtcgggactagccggccaaggatgaagcctcacttcagaaacacagtggagcgaatgtatcgagacacattctcctacaacttttataatagacccatcctttctcgtcggaataccgtctggctgtgctacgaagtgaaaacaaagggtccctcaaggccccctttggacgcaaagatctttcgaggccaggtgtattccgaacttaagtaccacccagagatgagattcttccactggttcagcaagtggaggaagctgcatcgtgaccaggagtatgaggtcacctggtacatatcctggagcccctgcacaaagtgtacaagggatatggccacgttcctggccgaggacccgaaggttaccctgaccatctttgttgcccgcctctactacttctgggacccagattaccaggaggcgcttcgcagcctgtgtcagaaaagagacggtccgcgtgccaccatgaagatcatgaattatgacgaatttcagcactgttggagcaagttcgtgtacagccaaagagagctatttgagccttggaataatctgcctaaatattatatattactgcacatcatgctgggggagattctcagacactcgatggatccacccacattcactttcaactttaacaatgaaccttgggtcagaggacggcatgagacttacctgtgttatgaggtggagcgcatgcacaatgacacctgggtcctgctgaaccagcgcaggggctttctatgcaaccaggctccacataaacacggtttccttgaaggccgccatgcagagctgtgcttcctggacgtgattcccttttggaagctggacctggaccaggactacagggttacctgcttcacctcctggagcccctgcttcagctgtgcccaggaaatggctaaattcatttcaaaaaacaaacacgtgagcctgtgcatcttcactgcccgcatctatgatgatcaaggaagatgtcaggaggggctgcgcaccctggccgaggctggggccgaccaccagggatgtcccttccagccctgggatggactagatgagcacagccaagacctgagtgggaggctgcgggccattctccagaatcaggaaaactgaaggatgggcctcagtctctaaggaaggcagagacctgggttgagcctcagaataaaagatcttcttccaagaaatgcaaacaggctgttcaccaccatctccagctgatcacagacaccagcaaagcaatgcactcctgaccaagtagattcttttaaaaattagagtgcattactttgaatcaaaaatttatttatatttcaagaataaagtactaagattgtgctcaatacacagaaaagtttcaaacctactaatccagcgacaatttgaatcggttttgtaggtagaggaataaaatgaaatactaaatctttctgtaaaaaaaaaa

SEQ ID NO: 377899 - DNA, 1626 bp, Homo sapiens
gttccctttgcaattgccttgggtcctgccgcacagagcggcctgtctttatcagaggtccctctgccagggggagggccccagagaaaaccagaaagagggtgagagactgaggaagataaagcgtcccagggcctcctacaccagcgcctgagcaggaagcgggaggggccatgactacgaggccctgggaggtcactttagggagggctgtcctaaaaccagaagcttggagcagaaagtgaaaccctggtgctccagacaaagatcttagtcgggactagccggccaaggatgaagcctcacttcaggtgtattccgaacttaagtaccacccagagatgagattcttccactggttcagcaagtggaggaagctgcatcgtgaccaggagtatgaggtcacctggtacatatcctggagcccctgcacaaagtgtacaagggatatggccacgttcctggccgaggacccgaaggttaccctgaccatctttgttgcccgcctctactacttctgggacccagattaccaggaggcgcttcgcagcctgtgtcagaaaagagacggtccgcgtgccaccatgaagatcatgaattatgacgaatttcagcactgttggagcaagttcgtgtacagccaaagagagctatttgagccttggaataatctgcctaaatattatatattactgcacatcatgctgggggagattctcagacactcgatggatccacccacattcactttcaactttaacaatgaaccttgggtcagaggacggcatgagacttacctgtgttatgaggtggagcgcatgcacaatgacacctgggtcctgctgaaccagcgcaggggctttctatgcaaccaggctccacataaacacggtttccttgaaggccgccatgcagagctgtgcttcctggacgtgattcccttttggaagctggacctggaccaggactacagggttacctgcttcacctcctggagcccctgcttcagctgtgcccaggaaatggctaaattcatttcaaaaaacaaacacgtgagcctgtgcatcttcactgcccgcatctatgatgatcaaggaagatgtcaggaggggctgcgcaccctggccgaggctggggccaaaatttcaataatgacatacagtgaatttaagcactgctgggacacctttgtggaccaccagggatgtcccttccagccctgggatggactagatgagcacagccaagacctgagtgggaggctgcgggccattctccagaatcaggaaaactgaaggatgggcctcagtctctaaggaaggcagagacctgggttgagcctcagaataaaagatcttcttccaagaaatgcaaacaggctgttcaccaccatctccagctgatcacagacaccagcaaagcaatgcactcctgaccaagtagattcttttaaaaattagagtgcattactttgaatcaaaaatttatttatatttcaagaataaagtactaagattgtgctcaatacacagaaaagtttcaaacctactaatccagcgacaatttgaatcggttttgtaggtagaggaataaaatgaaatactaaatctttctgtaaaaaaaaaa

SEQ ID NO: 377900 - DNA, 1599 bp, Homo sapiens
gttccctttgcaattgccttgggtcctgccgcacagagcggcctgtctttatcagaggtccctctgccagggggagggccccagagaaaaccagaaagagggtgagagactgaggaagataaagcgtcccagggcctcctacaccagcgcctgagcaggaagcgggaggggccatgactacgaggccctgggaggtcactttagggagggctgtcctaaaaccagaagcttggagcagaaagtgaaaccctggtgctccagacaaagatcttagtcgggactagccggccaaggatgaagcctcacttcagaaacacagtggagcgaatgtatcgagacacattctcctacaacttttataatagacccatcctttctcgtcggaataccgtctggctgtgctacgaagtgaaaacaaagggtccctcaaggccccctttggacgcaaagatctttcgaggccaggtgtattccgaacttaagtaccacccagagatgagattcttccactggttcagcaagtggaggaagctgcatcgtgaccaggagtatgaggtcacctggtacatatcctggagcccctgcacaaagtgtacaagggatatggccacgttcctggccgaggacccgaaggttaccctgaccatctttgttgcccgcctctactacttctgggacccagattaccaggaggcgcttcgcagcctgtgtcagaaaagagacggtccgcgtgccaccatgaagatcatgaattatgacgaatttcagcactgttggagcaagttcgtgtacagccaaagagagctatttgagccttggaataatctgcctaaatattatatattactgcacatcatgctgggggagattctcagacactcgatggatccacccacattcactttcaactttaacaatgaaccttgggtcagaggacggcatgagacttacctgtgttatgaggtggagcgcatgcacaatgacacctgggtcctgctgaaccagcgcaggggctttctatgcaaccaggctccacataaacacggtttccttgaaggccgccatgcagagctgtgcttcctggacgtgattcccttttggaagctggacctggaccaggactacagggttacctgcttcacctcctggagcccctgcttcagctgtgcccaggaaatggctaaattcatttcaaaaaacaaacacgtgagcacagccaagacctgagtgggaggctgcgggccattctccagaatcaggaaaactgaaggatgggcctcagtctctaaggaaggcagagacctgggttgagcctcagaataaaagatcttcttccaagaaatgcaaacaggctgttcaccaccatctccagctgatcacagacaccagcaaagcaatgcactcctgaccaagtagattcttttaaaaattagagtgcattactttgaatcaaaaatttatttatatttcaagaataaagtactaagattgtgctcaatacacagaaaagtttcaaacctactaatccagcgacaatttgaatcggttttgtaggtagaggaataaaatgaaatactaaatctttctgtaaaaaaaaaa

SEQ ID NO: 377901 - DNA, 692 bp, Homo sapiens
catcattggcacattactgcaaaatgatggcagagatattttcaagaatgtacatcaagttatatttccttgacatccttttttcaattggtcaaggttacagattcagaggataaagggtagtttcatttagaataaattcatgtctactggcaatctatatataaaagtgacctgcccaagaaccaaaaactttaaatgctaatgaagcttttgaaaaataatttttaaacaaattaattttaaaagggtgttacacgtacccagtttttactttttagttgatgaaacccatcctataatatacatttgagcaaagtacacatattaagaaaaacatggacatttacttgtttaatagtcaaaatgatgaggaaatgttagctgtttttaagtgggactggtggggtgtcctttgtcacaaggaatgcttttttagcttgtttgtgggcataagagatgttaaccctttgctgattctaccacacaactgtaaagaacctaatgaatctacaagtttaatattcagaaaaagctaggaactccgctctttaccagtacagtggaacaggcccgttattcaaggtgatgcctcacagctatagaacaactattcaaagacccagagttaaatggtacatgtgtatatgtgtgtgtgtgtgtgcacacgcacacacttcagataagtatca

SEQ ID NO: 377902 - DNA, 681 bp, Homo sapiens
gagttagtgggtgcagcgcaccagcatggcacatgtatacatatgtaactaacctgcacaatgtgcacatgtaccctaaaacttaaagtataataataaaagaaaaaaaagatttgtataatacattacaaaaattaataacatgctttcactacgttgaagtgacttacatagctagtagtagaatcagatgaagtggtagaatcagttgagcccattttcttttgttttgatggaacatatgaaactctaagtgtttcagtcattatcttagccgttaaaagcttatactctggagtcagcagatcaagatttactatttacttacatgagtaacctttggaaagttattgatcctctctaaccttctgcttcccttctgtaaaatgctaattttaaaatcgttattactgctactaccaacaccactgccaccaccattattaccttagaaattacctattgttattactagattttaatttgaatagattcttaggaaaaaacctgtctttcaaaacatagctttaggggctttattgtactgtatgacacaatacaactctttctggttagttgttatggatatgaacttcatttttgcttcagagaacaagtttgtgctggataaattattttttgagctcaaggtctttcaggaagtttgtagatttttttgta

SEQ ID NO: 377903 - DNA, 1782 bp, Homo sapiens
tgcagatgccctgtgccgtgcagctcagcatgcataggtggggtagttggttgatgagcttttctttaggagaacagattttgagctatctttttttgttggaaccctgcacacaactgtcattatgtagatggttttcctctcaggtggttggttttctccagagaagaacccttgaatctcctgcctgtggaggtggacgtgtggttggtgttctgggtgccccttgccctgagctctgttctccatggtgcctgtttcctgggtctgcagccccttctcagtttctctgaagagtaaacctctcccctgcttggggaggagcatgggggttacgtagtagcctggctgcataacatgggcttagtagctcagttttccatcatgaaccagagcctcatctttcatggttcctgtgcctccgagggctgggctactggggtgtctgtcagtccagatggctttgttctcaagtttcctccacagtggatatgaatgtttgcaacttacactcaattacaacgctttcctctacttttctccaagtttgctgaaatctttatttgtggatatctcctctctttttgctttgtcctcataggttaaaacgttttaaaattccctaacagtaggaaatttagtagggttttggaagggagaggaggtgtaagatggtcactcttccatgtttaactggaagtggaaagtctaggcttttgcttcaggcctgggaggtgcacatgaaacagtccctcccagtggctgcctggggggtccctgaagggtgtgagaccaccgtgaatcctggggcagggcacttgcagtacatgtgctatgtgtttgctagtattgttttagatgtttgatctcctagcctttgcttttctttgtatttttcctgctttagtccatttcccttctagctccttctgttctcatttatcttctgctgctgcttggagttacattttcagcaagtctgtaacacctctctgaaccaaaggctctcaagttcatctttctttctccaagcctacgcctgtgctgctgtcatgagtggcgagcttctgtttcttctgtcttcttgtcagtcccaagtgcccttttacagagaatgcctgtttttcactgtctagctcagttaccaggagtccctgtgaatgacacccacaggtccctcaaagaagtcagatttctcttggacctgataaagcaaacaaaatgtgacccaagcaggctgagttggacgggtcccttcttaccttcgccctctgccatgttgacattcttatctgatggcacaggctgggagttcaggatccacttagatggggtccgttcaggggataccagcgttcacatttttccttttaagaaagggtcttggcctgaatgttccccatccggacacaggctgcatgtctctgtgagtgtcaaagctgccatgaccatctcggtaacctactcttactccacaatgtctatattcactgcagggctctatgattagtccataatgtaaatgcctggcccaagacgtatggcctgagtttatccaaggcccaaacaattaccaaacattcctcttagatagaagacagatttctttcccttggcaaagatcttctactaagatatgttacaggatgttttacattctcttggtcttataataacaccacgcccaatccagtatttgatgcgtcggtggtcactcggaaggttgttattttaaaaatacttattgttctcagtctgcagttctcacagctgtaaaaaaaa

SEQ ID NO: 377904 - DNA, 1056 bp, Homo sapiens
  misc_feature (1)..(1): n is a, c, g, or t
  misc_feature (5)..(5): n is a, c, g, or t
ntttnggggcccccctttttgggggggggggggggggggtttccccccttggaaaggggtgtgagaccaccgtgaatcctggggcagggcacttgcagtacatgtgctatgtgtttgctagtattgttttagatgtttgatctcctagcctttgcttttctttgtatttttcctgctttagtccatttcccttctagctccttctgttctcatttatcttctgctgctgcttggagttacattttcagcaagtctgtaacacctctctgaaccaaaggctctcaagttcatctttctttctccaagcctacgcctgtgctgctgtcatgagtggcgagcttctgtttcttctgtcttcttgtcagtcccaagtgcccttttacagagaatgcctgtttttcactgtctagctcagttaccaggagtccctgtgaatgacacccacaggtccctcaaagaagtcagatttctcttggacctgataaagcaaacaaaatgtgacccaagcaggctgagttggacgggtcccttcttaccttcgccctctgccatgttgacattcttatctgatggcacaggctgggagttcaggatccacttagatggggtccgttcaggggataccagcgttcacatttttccttttaagaaagggtcttggcctgaatgttccccatccggacacaggctgcatgtctctgtgagtgtcaaagctgccatgaccatctcggtaacctactcttactccacaatgtctatattcactgcagggctctatgattagtccataatgtaaatgcctggcccaagacgtatggcctgagtttatccaaggcccaaacaattaccaaacattcctcttagatagaagacagatttctttcccttggcaaagatcttctactaagatatgttacaggatgttttacattctcttggtcttataataacaccacgcccaatccagtatttgatgcgtcggtggtcactcggaaggttgttattttaaaaatacttattgttctcagtctgcagttctcacagctgtaaaaaaaa

SEQ ID NO: 377905 - DNA, 752 bp, Homo sapiens
agaggattccccggtacgggagtggtgttattataagaccaagagaatgtaaaacatcctgtaacatatcttagtagaagatcttgccaagggaaagaaatctgtcttctatctaagaggaatgtttggtaattgtttgggcccttggataaactcaggccatttctcttggacctgataaagcaaacaaaatgtgacccaagcaggctgagttggacgggtcccttcttaccttcgccctctgccatgttgacattcttatctgatggcacaggctgggagttcaggatccacttagatggggtccgttcaggggataccagcgttcacatttttccttttaagaaagggtcttggcctgaatgttccccatccggacacaggctgcatgtctctgtgagtgtcaaagctgccatgaccatctcggtaacctactcttactccacaatgtctatattcactgcagggctctatgattagtccataatgtaaatgcctggcccaagacgtatggcctgagtttatccaaggcccaaacaattaccaaacattcctcttagatagaagacagatttctttcccttggcaaagatcttctactaagatatgttacaggatgttttacattctcttggtcttataataacaccacgcccaatccagtatttgatgcgtcggtggtcactcggaaggttgttattttaaaaatacttattgttctcagtctgcagttctcacagctgtaaaaaaaa

SEQ ID NO: 377906 - DNA, 2018 bp, Homo sapiens
cgtctccaaagacggagggagccgggaggagacagcacacaggccttgccgtggttcccaccgaccaccctcagctcaccccttgtcctgtcatgcttccccacgacctctgtgtcctcatccaacctagcatagaaagcgctcaggcgttactgtctcttcgggtctccgctgccccttcgggtcgccgctgcctcttcgggtctgcactatctcttccggtctgcgctgccttaggaaggcttccataccacatgggacttactaagtaaatccgtgtaattttctcgttaagcttaacttacagggctccagctgaagaatttaggagggtaggggaaaagggtatattgtttccctcccctgctgttttcttggttgtgagctttgaccattagcaggaacacatttgaaattaaaagttgagagaaaagttcgaatttcgcaggatcagctctgtcccatagaaacatactgtgagctacgtatgtaattttaaaatttctggcagtcacattaagttttttaaaaggtgaaattaattttaatattgtatctgacccaacagatccaaaatattatcacttcaacgtttattaattgaatacagtactttgttttttttggtatttttgtttggtttggtggagacagcatctcgctctgtcacccaaactggagtgcttggggccatcaatgctcactcagcctcggcctcccgggctcaagccatcctacactagaaaggtctgagtcattacagagtggccaccagtgtcatctgaggcacgggtaggtggctcattcagggccacaccagcggctcctttttagtacatgtgaagagtgtaaagcaaaggagaataaggtgtgtaaaaggttgtgccaatggtgactgtcagccacacttcctgccctcttgcttgtcctttcaagtacagagctgtggctcacccagagatgacatttcccattcccccatgcccaggtggggccacgtgaagtagttcttccagatggacgtggctcatgtctcttctgggtgttctccaggcccggggggtggcagataaagggcagagggagacagttcccgagccccacaggctggcatgttgcctgcaagccaggacacctgaactgtcctatgagaccgaagctctggctttcagtcactgaaattcggggggttatttgtccagcagtgagaagtgccgattcagcagttacatctgcttcatggaatccggcttgaagcacaaagaaggatgaaatgaacaagtcccgtggagatctcacacatttagatatgtgatggggaaaatgcattttggatggtccatgactgtccaggtttcaaatattctagtctactggagtcctcacgttcactttttctttcttttttttttttattaatgtggagcaacctggcagaacgtagtgtgtatttaaatcaccagacttctgaaggtgcctttgaggacatggagttctcttccaattctctcccttctgcaaaaagatcgtgagacagcgcagggtcgagtgctgtggagactatgagctgcctttctccctgggatgttagaagaatgagtattggctttaaggatgagaggtccttttgagtaaagaacattctgtgaacacagcaggcagtccacaagggttggggtttgaatgaagggggtggctgaggatcttccaggcacctgtgttttgggattagccgtacttggaagcctggtggaagctgcttttctatttatgagtcaaattctctttcactctgaatgtaattataattgccaagcagctgtatcttaatttagggtcttgaatcggtaacgtttcctaaggctttaattttaattttctttattccttggcctttcaaatatctaataatatctaaataaattattgaaagtagaagagttctctatacattgtaaaaggaaaaattacttggaaatatacacagttacctcccaattgatgctttgtaattcagg

SEQ ID NO: 377907 - DNA, 354 bp, Homo sapiens
ggtcgacaaattagctgccataaacccaacttattcaaagaactttgcttgaactaacaatatttaatgtgcaaaatacttcgtaacctttctgatattaatatcaatagtagatcaacactatgaaaatacatttcttggccaggcatggtggcttacgccggtaatcccagtactttgggaggccaaggtgggcagatcacctgaggtcaggagtttgagatcagcttggccaacatggtgaaacctgtctctactaaaaatacaaaattagccaggcgtggtggtgcatgcctgtaatcccagatactcaggagactgaggtaggagaatcacttgaacccaggaggcaga

SEQ ID NO: 377908 - DNA, 206 bp, Homo sapiens
aaatgtaaaatggagtactgatatatctaactacctcatggagttgagacaaaaatagagttcattaatatgcataaagctcttatcacagtacttggcatatgttacacactaagtgttagctatggacattataatcagtgtagctatatatttatatgcattcatgattatctccttaggttaaattcttgacaatataattg

SEQ ID NO: 377909 - DNA, 539 bp, Homo sapiens
ggacaaaggccattcaaattctttattatacaacaggcatgcttcacactgtcgccatcaaagctacctttgatgggttgcctctttacatcctgagccttcctattccatcaggacatgaatgagggcctaaaatccaccatccccagtcagtcaatagaagttggggaagattagaaatagtttgctgcctgtgaacaggaacagggggtggggggtcactaattatgggcggattcttaatataactctctagattttgtttttattgatacacgagtctgtcctattggcaaattacattcttgaggtcaggaatggtctaattgcctttgtctacaagcacacgtgctgtgtgctcagaaattgtccctctgttggaacagattgcccatctagctttgttgggggcatggtgagttcttttggctgtctgaatgatacagcttagccttattctaggcatccccagccaagaaagctgactcaatgagaaggaatagaggacgagtatggtggctcaagactgtaatcccagc

SEQ ID NO: 377910 - DNA, 277 bp, Homo sapiens
tgcctggtgagcgggtataatcactcttgaagatattttttggataatcattggaaaggactatttttggagatgaagagcttttccaactttcctttggacagaaatgaattcagggagtttgcagcactcgctacccctcactgtggcaatcagccagtaaggctcaaccccaccgagaatttggtattggcccctcccgcctgttccccagagaggaccaggtacaatgcagaagcatttggctcagctctctagggtgctattttgctgctat

SEQ ID NO: 377911 - DNA, 1247 bp, Homo sapiens
agagcttgttatcatccaaactaaaaccctcactaactcgatgtgtccctggatgactccctagtttatttcttcccttccctccactaagtcagttgtctccctatgcaccccaggagtagccattttccacagcggccaccacctctcctccagaaaatgggcggctcaaaatggagcccttcctctcctccggacctcaaatctgccacctgtctgctccattcatcattagttagctatagagcctgatttttctccaaactgtatgtatttaatccctgatttcttcctcacccccacgatgtgacatcctttcagcattttacctgctgggaaccagcgctctcttgtttctttttactgtgggtcacttgctagagtttgaaggaaaactttttgatgtgaacacatttcagttttttttccaatttacactggagagaggaatgaaggggagagggggctctggcccctgttacttcctgtttgtttttgttctggagaatgcagaccatctgtgtctctcagaagctattcttctacagccaccgtgctgaggctgatatttaatttcttagtttttccctcgtttctctctaatgtccttttcctcttccaaaaactcctaagcccctcattaaatctttcttcctgaattttcttatcttaatagtacctctggatacggttctgtccccattaaggccagaatttcaaattaagtaaatgataattggagagagaaaacaggagagaagggaacaaggaatcagtaagcaaacagaaaaaaaaaaagtgggttgactttttaaacatggagttcgctgattctcagagccacttcccatgtcctggcatccattgttcagctgatgtctcacctgttagatggaccttgtctttctcagaagaaacatctgctggatgttgggtctctctctgagttgcctgagaaggtccctccctaatttatttttcctgccacccagacttcgataaaggctatactttctcatgataatcaagatggttattttctagaactagtagagatattctccctcttctgagagctgcctgatgaatcccaacatatagtcaccctatatctctaaacaactaggtcctctttcagtagataattctataacttatgaaatttcaagtgtttcataagaagcatctttctgaggcacatcttcatttcagatgtcattgcagtttaggacacaatatttccctca

SEQ ID NO: 377912 - DNA, 547 bp, Homo sapiens
catttactcctcagcatgattctctgaggtagatactagtattgtacttacttattttgtaggagaaagccaaggctcacagaatctgagtatttactcaaagtcacagagctcataagtgccatagccaggttttgtccccaagctggtttgctggcaaagcccatgtactaatccacactgccatactacccccattgtgcattcacaaagtatttcatctcactttagctctgagaggtaagcagagaattaaccatactctccatttgacagtagaggaaacaagttaaagtgatttcaccaagggcacatggtgggacagctgagcagctggggctgggcatgaaatccagtgcttgttctacttaccacattgttgtttatagtctcagggccaccctgatgaactataataccctgggagtttgggactgaagtggcatcagttaactgttggattagaaaaaaaattctcatggtgcaatttccctgatctcaactgtggctgaattggaggaaggcagttgactgagccatgcccttg

SEQ ID NO: 377913 - DNA, 406 bp, Homo sapiens
agaatttcatgatgtttttcctacttcaaagaatatatttcctcccatttaaattaagtattttgttcaatcaacgaacacaggttttttaatattacagtgctagttactatggttaagatttaatactggccagatgcggtggctcacacctgtaatcccagcactttgggaggccgaggcgggtggatcacctgaggtcggaagttccagaccagcctgaccaacatggagaaaccctgtctctactaaaaatacaaaattagccgagcgtggtggcgcatgcctgtaatcccagctactcaggagcctgaggcaggagaatcacttgaacctgagaggtggaggttgcggtgagccgagatcgtgccattgcactccagcctgggcaacaagagtttgtctc

SEQ ID NO: 377914 - DNA, 447 bp, Homo sapiens
gtcagatttcactgacaagattgttagggcctggttgggtaggtgggtggggagggaagagttcaacaagtgagtccagatgcacgaggaggttaggaagaagttacgttgaatgttctagagtgggggacacaggaactgctctcccacaggtgaccagtgacctccaggggatctcattacccaaccctgatcctcatctgacttgacttctctgtggcatctaacacttcatttcctgtggcttctctgatctcacatccctacaatacatggcctttgtgtctggcttctttcacttagcatcgtgcttgaaggttcatccgtggtgtggcacgtgtcctttctatggcggaatcacagtacattgtatggatagatcaaacaatgtatagtctttcatctggttttttgttttgtttttgtttttgtgagacagggtctcac

SEQ ID NO: 377915 - DNA, 489 bp, Homo sapiens
  misc_feature (451)..(451): n is a, c, g, or t
gcggccgcgggctccgggggctcggctcagtggcagaagtgccgcctgctcctgcgcagggctgtggccgaggaacgcttccgcctggagttcttcgtgccgcccaaagtgagttaccccataatcccacctagcctggggggaccagaggaggcacctgggcagcagctgagggtgccagggactgcctttggggaccgcgtggtctaatctggttgacagggtgaagtatttggtgccaggaccctgggaggtgggcctgtcatgcctcttgaacaagtcaccccttcaaccccggttcttcctttgcgaggaagggtcctctggctacaccaaagggttctggggcactaattttttcttttcgtgtgtgtgtgtgtgtgtgtccgtgtgtgtgtgtgtgtgtgtgtgcgcgcgcgtgtgtgtgtgggtgacagagaccctgtctcanaataataataaaatagggcccatgtaaatccttttaaa

SEQ ID NO: 377916 - DNA, 304 bp, Homo sapiens
gcggccgcgggctccgggggctcggctcagtggcagaagtgccgcctgctcctgcgcagggctgtggccgaggaacgcttccgcctggagttcttcgtgccgcccaaagcctccaggcccaaggtcagcatcccactgtcagccatcattgaggtccgcaccaccatgcccctggaaatgccagagaaggataacacattcgtcctcaaggtagagaatggagccgaatacatcttggagaccatcgactctctgcagaagcactcgtgggtagctgacatccagggctgcgtggaccccgggt

SEQ ID NO: 377917 - DNA, 410 bp, Homo sapiens
gaaaagcaaaacctattcatatgtactataacttggatgagtctcaaaatgattatgctgagtgaaaaaagtgctaaagagtacatgcactatgactgcatttatatgaaattccagaacaggcagaagtatccaacggagcaagtcacctatttattcactcaaactaatattttaaccttcaatcagagagctttcagtctatgcagaatgccttcataacctgaaaaaatcacttacacaattattcaaaaattctttactgagcagctgtgactgtgctttgggcacaagcactaaggctgcggcagctagcactgcgtgttgtcgaggagaccactttctaggggaggaagacaggaaaaacatcaaatgtgtaaacaataaaaatatactaaatgctcactatg

SEQ ID NO: 377918 - DNA, 608 bp, Homo sapiens
gatgatgctggcattcacactaggaagcttcctaagtactaaggcagttctcctaactgctgaactttcgctgagggccagtccaatcctacaaaggcttcccaagccattctctagcaagtgcactgtaagaacaaaaaatgaacaagacccactcctaccctccagatctagtgagggagaaactcagaagtctcagatggaagttggggggtgatcaaggaagattgcacaatggagatggcatttgaatcagtccttgaagaggtaaaatgtcagcagctggagggacatgcaggaaacagaaatgacctcaccttgagctgagatctgttccctgagtcagcccttggctccagaagccccagtcaccattcctcgaacatgttctagagttcctccaagatgcaggtcactctcctctggaaaagccctttttccttgtcccttgcactgtgtagtgcccagagataccatcagcaaagtatgtttggacaagacggtgggaaaactttgccactcaggagaagaatctagaaagtgcacccttatctgtaataacaagcactatccaatccaggtgtgcttcactctaaggaaaaaaaaaa

SEQ ID NO: 377919 - DNA, 508 bp, Homo sapiens
gagagaatctgtgggagatggcgcgggtataggggaaaaaatgaacaagacccactcctaccctccagatctagtgagggagaaactcagaagtctcagatggaagttggggggtgatcaaggaagattgcacaatggagatggcatttgaatcagtccttgaagaggtaaaatgtcagcagctggagggacatgcaggaaacagaaatgacctcaccttgagctgagatctgttccctgagtcagcccttggctccagaagccccagtcaccattcctcgaacatgttctagagttcctccaagatgcaggtcactctcctctggaaaagccctttttccttgtcccttgcactgtgtagtgcccagagataccatcagcaaagtatgtttggacaagacggtgggaaaactttgccactcaggagaagaatctagaaagtgcacccttatctgtaataacaagcactatccaatccaggtgtgcttcactctaaggaaaaaaaaaa

SEQ ID NO: 377920 - DNA, 418 bp, Homo sapiens
tttttagagatggggtctcattcttttgctgaggctggagagcagtggtgcgatcatggctcactgcagcctcaacctcccagactcaagcaatcctcctgtctcagcctcctgagtaacagctaggactacaggcacatgccaccaagcccggccttttaaaatttttggtagaggccaggtgtggtggctcatgcttgtaatcccagcactttgggaggtccaggcgagtggatcactcctggtcttaagtaatccgcccacctctgccatcaaagtttctgtttcttaagttggctgccgagtacacaggttttctttgtaaaataattatttaaattgttaatatgcattacttatatgcttttcatttacaatgtatttcacaagaaaaataaaacaaagcaaataagaaaac

SEQ ID NO: 377921 - DNA, 387 bp, Homo sapiens
gaaataaatatattttcagatgatgatttgccactattaaatatatttctggagagttgaaaacactgtcccccaaaataagaatactatgcatttaagtgataacatttgaagaattagtgtcgagagggaaagactaggtggataaatgaataaaagtcactaatttgaaggggacttgactcatttggagcgagttctaaaatgtttggtcacaatacagttcatgttgttttattgttaatgcttcatgtctaacctttgggcaaagtaccaaattgggcagtgttaaagaactagaaaacttaaatgaacttgtaactcaagctgtgcgtcacaaagaaccagaatataaatgatatttttagaagtcttccagtaatcttt

SEQ ID NO: 377922 - DNA, 3883 bp, Homo sapiens
tatattaactaaacaagtcacagtctttatttttaatttctacagtcacctcgtgagacaggtattagaactccggagtggcatcaaaatgagggaaaggcctcagggccagcgcctttgcgtcctggaccggcgtacagacgggagaaaggccgaccaatccgagagcaggctgaggcctggtcccgcccctgggggcagagcctcgcctcttttccgcctcaccctttgggagtaggggtgtgcggctggcttgtcccgcccctgcccctgagtgacagaaccgtggacagcaacatttcccacaggacacgaagtttgtcggcccttgccttggcagagctgagtaagaaaaatcaccaagaatattatttttggtatttggaattgaatttgccaggaatgcaagcactgctacctaactaaagaccttggctttggaaacatcttaccccttggcagctctccagagtttagacttggcagcatcaaagacacaacgcaagcaggcattttggagatcaaagatgggtagaaaagatgctgctactataaaacttcctgttgatcagtacagaaaacaaattggtaaacaggattataaaaaaactaaacctattttacgagcaaccaaattaaaagcagaagcaaagaaaacagcaataggcataaaggaagttggccttgtacttgcagctatattggcactactactggctttctatgctttcttttatctcagactcaccacggatgttgaccctgatctggaccaagatgaagattagctaagcaacaatcaatgcatgaaagagaaataactttacgaaagcaccttttgggaccaaaactttcaatactgaaactgtaacatctttaattctttctgctaatattttcagtttgcagacatatgatttttgatagttgcataggatgtcaggaaaagaaccttacctagcaatgcagtatagtatgtgctactggatacttttatatatctttctgctttgacagccaccctatacatggtacatttagatgaaatgggaaccagatcctaaatttttcaaatgtcattgccaatttatgtgtataattccatcacttcctgatgagtaagtctatttttgttctatatacatcataagttagtatatattcttatttacagaaacatgctcaaatcacattcagaaagaacaaaaagtcatgggaaattttttattttacaacaaagccctgctttctttctggacgtattttacatcattagagagactatctgcacatacatctaccataatctttttccttctttgccaactgttcagtgcacatgtgctgcatcagaaatggcacctggatgacagaagctcaaagagtcacatatgtctctaaaatagagttcttttcctcttgggctgtctgaactggtgtaaatagaagctcagttgatcttggttttaattaacttattactctattaatataaccttggaattctattctaattatgttgttctggctgcttgtagtatcagttcgcccctcttgttagggagatatgtaacaatctgtcatttaattgagcagtctttttcacataacagtaatagcaaaaatcctacctactcagaatcatcttcttaggttgtctcctaaatctgaacaatacagttgttttataaaattacattttgtctcttgagatttaatcaattagaactctttagggagaaaataaataatagaagaaaatatatgcctcatatttcatatgtaattatctgttgatataatttttcaatgtattttgtatttgtgggagcataatgacctgtacattcaatatttttactggtaattcaatttttaaatatgtttttacaatgcttgaacacataaaccttagaaaactggaaaatacgtgtccacagaaagagttattagctactaccttatgtaaagatgcatagaaaatgaaattgttggaaacatgtgcacaaagtgttttatattatatacattgtatttatgaagaataaataaaatattaagattgttttcctgctagccaagagaagaaatccttgggaaatatctaaggagtatatggggctttataagcactgtttctaaaagatattctctggtacttttgcaaaaagtcgactgtgactgtgtagcattatgttctgtagaatttttttcaagtagcataatttatttcattggtgtgaaaacagccaaaggttccaatatcctcacaaatcatttatgccaaacatctgagggcaaaatttagccggtgttatttactagattcttccctttgaactcacagactcaagagacagaccaagagttcttatatactcaccacagcggaccaatccaagtggcatttttaggaaaggttgcagcatttaatgccatgtggtatgtctgttcgtcaagtgggtggcaagggaatatccaagctggcattttggatatgatgggccttttactttcctgagtgacatgccacatgtcaagaaatactgctccccacccccccactcccatcacatttacgtgaacaattttcatttagttatttcccgttccatatggtgttaaaacagtcgtattaaataaagattatttctagttttcagtggtaatttaaatgagaggatatgtaataattgcttattagatacttatccaaatgaaatataacagagtttacagtacttaaaatggctggttatggtcttggaaatgtttgaaaattcattatcctgaaaaaaactttaccattctgttttacccttgaggtattttttggggaaaaatgtttttgataactattaatctaaatatagtataattataggcaaatttcactgcctagttttattgatatcctgagtctacagctagtccattcgtatgactgattgatttatgatagctccagagaaccataaatttcaaaggctaaactctctgattttagtaaatagtaggtaaagtgacacaatatatgtttacacaacactgttttcatgaaatgcaaactttgcaaaactcacattaactgggaagcagccaaccctctgtagagaaatcccagattgggagtctggtttgaatctttgaagacagaaaggtgatatccggcctgctgttttaaagggaccacacttttgaatacctactggtgtttggcagaaatctgagactggcaccagacacaaattttagacatgggtatcttccctccagtaattcactgctcagagtaatttagaagacaaaaacagaaaaaattgtaatgattttttaagtgttagaatatgtttgttaacatactctgcaaaataaatttcaactaatgcaatagacttaaaatatagcctatggaatactgtgattgaagtttgaaggcttgctggttcttattttgcatgcaagtttagacagggtaaagaatgtataaatttatttgagatgagatacagtattgtaaaaatataacctcatctagaattgcttttaaaacaagcaaaagcctattttagtacaaatgtagggtgggtagttgttttaaggtagcaaaatacttcaagattttctatctttttaatttttcatgaagacagaagaaatactttcaccccaaccaatgactgtaagatcttgagagtatgttcttactcatttctgtaattgcagtagtgtagtcatctgcatataaatttaataaatgcatgttaaaatttaagttgatgccttttagtcctctcagagtctgtcacagtttctttgtgtaaatgataaaaaagtttgaatttaatcaataaaacttaaaaatcacaatatcaatcaaaaa

SEQ ID NO: 377923 - DNA, 3774 bp, Homo sapiens
tatattaactaaacaagtcacagtctttatttttaatttctacagtcacctcgtgagacaggtattagaactccggagtggcatcaaaatgagggaaaggcctcagggccagcgcctttgcgtcctggaccggcgtacagacgggagaaaggccgaccaatccgagagcaggctgaggcctggtcccgcccctgggggcagagcctcgcctcttttccgcctcaccctttgggagtaggggtgtgcggctggcttgtcccgcccctgcccctgagtgacagaaccgtggacagcaacatttcccacaggacacgaagtttgtcggcccttgccttggcagagctgagtaagaaaaatcaccaagaatattatttttggtatttggaattgaatttgccaggaatgcaagcactgctacctaactaaagaccttggctttggaaacatcttaccccttggcagctctccagagtttagacttggcagcatcaaagacacaacgcaagcaggcattttggagatcaaagatgggtagaaaagatgctgctactataaaacttcctgttgatcagtacagaaaacaaattggtaaacaggattataaaaaaactaaacctattttacgagcaaccaaattaaaagcagaagcaaagaaaacagcaataggcataaaggaagttggccttgtacttgcagctatattggcactactactggctttctatgctttcttttatctcagactcaccacggatgttgaccctgatctggaccaagatgaagattagctaagcaacaatcaatgcatgaaagagaaataactttacgaaagcaccttttgggaccaaaactttcaatactgaaactgtaacatctttaattctttctgctaatattttcagtttgcagacatatgatttttgatagttgcataggatgtcaggaaaagaaccttacctagcaatgcagtatagtatgtgctactggatacttttatatatctttctgctttgacagccaccctatacatggtacatttagatgaaatgggaaccagatcctaaatttttcaaatgtcattgccaatttatgtgtataattccatcacttcctgatgagtaagtctatttttgttctatatacatcataagttagtatatattcttatttacagaaacatgctcaaatcacattcagaaagaacaaaaagtcatgggaaattttttattttacaacaaagccctgctttctttctggacgtattttacatcattagagagactatctgcacatacatctaccataatctttttccttctttgccaactgttcagtgcacatgtgctgcatcagaaatggcacctggatgacagaagctcaaagagtcacatatgtctctaaaatagagttcttttcctcttgggctgtctgaactggtgtaaatagaagctcagttgatcttggttttaattaacttattactctattaatataaccttggaattctattctaattatgttgttctggctgcttgtagtatcagttcgcccctcttgttagggagatatgtaacaatctgtcatttaattgagcagtctttttcacataacagtaatagcaaaaatcctacctactcagaatcatcttcttaggttgtctcctaaatctgaacaatacagttgttttataaaattacattttgtctcttgagatttaatcaattagaactctttagggagaaaataaataatagaagaaaatatatgcctcatatttcatatgtaattatctgttgatataatttttcaatgtattttgtatttgtgggagcataatgacctgtacattcaatatttttactggtaattcaatttttaaatatgtttttacaatgcttgaacacataaaccttagaaaactggaaaatacgtgtccacagaaagagttattagctactaccttatgtaaagatgcatagaaaatgaaattgttggaaacatgtgcacaaagtgttttatattatatacattgtatttatgaagaataaataaaatattaagattgttttcctgctagccaagagaagaaatccttgggaaatatctaaggagtatatggggctttataagcactgtttctaaaagatattctctggtacttttgcaaaaagtcgactgtgactgtgtagcattatgttctgtagaatttttttcaagtagcataatttatttcattggtgtgaaaacagccaaaggttccaatatcctcacaaatcatttatgccaaacatctgagggcaaaatttagccggtgttatttactagattcttccctttgaactcacagactcaagagacagaccaagagttcttatatactcaccacagcggaccaatccaagtggcatttttaggaaaggttgcagcatttaatgccatgtggtatgtctgttcgtcaagtgggtggcaagggaatatccaagctggcattttggatatgatgggccttttactttcctgagtgacatgccacatgtcaagaaatactgctccccacccccccactcccatcacatttacgtgaacaattttcatttagttatttcccgttccatatggtgttaaaacagtcgtattaaataaagattatttctagttttcagtggtaatttaaatgagaggatatgtaataattgcttattagatacttatccaaatgaaatataacagagtttacagtacttaaaatggctggttatggtcttggaaatgtttgaaaattcattatcctgaaaaaaactttaccattctgttttacccttgaggtattttttggggaaaaatgtttttgataactattaatctaaatatagtataattataggcaaatttcactgcctagttttattgatatcctgagtctacagctagtccattcgtatgactgattgatttatgatagctccagagaaccataaatttcaaaggctaaactctctgattttagtaaatagtaggtaaagtgacacaatatatgtttacacaacactgttttcatgaaatgcaaactttgcaaaactcacattaactgggaagcagccaaccctctgtagagaaatcccagattgggagtctggtttgaatctttgaagacagaaaggtgatatccggcctgctgttttaaagggaccacacttttgaatacctactggtgtttggcagaaatctgagactggcaccagacacaaattttagacatgggtatcttccctccagtaattcactgctcagagtaatttagaagacaaaaacagaaaaaattgtaatgattttttaagtgttagaatatgtttgttaacatactctgcaaaataaatttcaactaatgcaatagacttaaaatatagcctatggaatactgtgattgaagtttgaaggcttgctggttcttattttgcatgcaagtttagacagggtaaagaatgtataaatttatttgagatgagatacagtattgtaaaaatataacctcatctagaattgcttttaaaacaagcaaaagcctattttagtacaaatgtagggtgggtagttgttttaaggtagcaaaatacttcaagattttctatctttttaatttttcatgaagacagaagaaatactttcaccccaaccaatgactgtaagatcttgagagtatgttcttactcatttctgtaattgcagtagtgtagtcatctgcatataaatttaataaatgcatgttaaaattta

SEQ ID NO: 377924 - DNA, 3828 bp, Homo sapiens
tatattaactaaacaagtcacagtctttatttttaatttctacagtcacctcgtgagacaggtattagaactccggagtggcatcaaaatgagggaaaggcctcagggccagcgcctttgcgtcctggaccggcgtacagacgggagaaaggccgaccaatccgagagcaggctgaggcctggtcccgcccctgggggcagagcctcgcctcttttccgcctcaccctttgggagtaggggtgtgcggctggcttgtcccgcccctgcccctgagtgacagaaccgtggacagcaacatttcccacaggacacgaagtttgtcggcccttgccttggcagagctgagtaagaaaaatcaccaagaatattatttttggtatttggaattgaatttgccaggaatgcaagcactgctacctaactaaagaccttggctttggaaacatcttaccccttggcagctctccagagtttagacttggcagcatcaaagacacaacgcaagcaggcattttggagatcaaagatgggtagaaaagatgctgctactataaaacttcctgttgatcagtacagaaaacaaattggtaaacaggattataaaaaaactaaacctattttacgagcaaccaaattaaaagcagaagcaaagaaaacagcaataggcataaaggaagttggccttgtacttgcagctatattggcactactactggctttctatgctttcttttatctcagactcaccacggatgttgaccctgatctggaccaagatgaagattagctaagcaacaatcaatgcatgaaagagaaataactttacgaaagcaccttttgggaccaaaactttcaatactgaaactgtaacatctttaattctttctgctaatattttcagtttgcagacatatgatttttgatagttgcataggatgtcaggaaaagaaccttacctagcaatgcagtatagtatgtgctactggatacttttatatatctttctgctttgacagccaccctatacatggtacatttagatgaaatgggaaccagatcctaaatttttcaaatgtcattgccaatttatgtgtataattccatcacttcctgatgagtaagtctatttttgttctatatacatcataagttagtatatattcttatttacagaaacatgctcaaatcacattcagaaagaacaaaaagtcatgggaaattttttattttacaacaaagccctgctttctttctggacgtattttacatcattagagagactatctgcacatacatctaccataatctttttccttctttgccaactgttcagtgcacatgtgctgcatcagaaatggcacctggatgacagaagctcaaagagtcacatatgtctctaaaatagagttcttttcctcttgggctgtctgaactggtgtaaatagaagctcagttgatcttggttttaattaacttattactctattaatataaccttggaattctattctaattatgttgttctggctgcttgtagtatcagttcgcccctcttgttagggagatatgtaacaatctgtcatttaattgagcagtctttttcacataacagtaatagcaaaaatcctacctactcagaatcatcttcttaggttgtctcctaaatctgaacaatacagttgttttataaaattacattttgtctcttgagatttaatcaattagaactctttagggagaaaataaataatagaagaaaatatatgcctcatatttcatatgtaattatctgttgatataatttttcaatgtattttgtatttgtgggagcataatgacctgtacattcaatatttttactggtaattcaatttttaaatatgtttttacaatgcttgaacacataaaccttagaaaactggaaaatacgtgtccacagaaagagttattagctactaccttatgtaaagatgcatagaaaatgaaattgttggaaacatgtgcacaaagtgttttatattatatacattgtatttatgaagaataaataaaatattaagattgttttcctgctagccaagagaagaaatccttgggaaatatctaaggagtatatggggctttataagcactgtttctaaaagatattctctggtacttttgcaaaaagtcgactgtgactgtgtagcattatgttctgtagaatttttttcaagtagcataatttatttcattggtgtgaaaacagccaaaggttccaatatcctcacaaatcatttatgccaaacatctgagggcaaaatttagccggtgttatttactagattcttccctttgaactcacagactcaagagacagaccaagagttcttatatactcaccacagcggaccaatccaagtggcatttttaggaaaggttgcagcatttaatgccatgtggtatgtctgttcgtcaagtgggtggcaagggaatatccaagctggcattttggatatgatgggccttttactttcctgagtgacatgccacatgtcaagaaatactgctccccacccccccactcccatcacatttacgtgaacaattttcatttagttatttcccgttccatatggtgttaaaacagtcgtattaaataaagattatttctagttttcagtggtaatttaaatgagaggatatgtaataattgcttattagatacttatccaaatgaaatataacagagtttacagtacttaaaatggctggttatggtcttggaaatgtttgaaaattcattatcctgaaaaaaactttaccattctgttttacccttgaggtattttttggggaatgcctagttttattgatatcctgagtctacagctagtccattcgtatgactgattgatttatgatagctccagagaaccataaatttcaaaggctaaactctctgattttagtaaatagtaggtaaagtgacacaatatatgtttacacaacactgttttcatgaaatgcaaactttgcaaaactcacattaactgggaagcagccaaccctctgtagagaaatcccagattgggagtctggtttgaatctttgaagacagaaaggtgatatccggcctgctgttttaaagggaccacacttttgaatacctactggtgtttggcagaaatctgagactggcaccagacacaaattttagacatgggtatcttccctccagtaattcactgctcagagtaatttagaagacaaaaacagaaaaaattgtaatgattttttaagtgttagaatatgtttgttaacatactctgcaaaataaatttcaactaatgcaatagacttaaaatatagcctatggaatactgtgattgaagtttgaaggcttgctggttcttattttgcatgcaagtttagacagggtaaagaatgtataaatttatttgagatgagatacagtattgtaaaaatataacctcatctagaattgcttttaaaacaagcaaaagcctattttagtacaaatgtagggtgggtagttgttttaaggtagcaaaatacttcaagattttctatctttttaatttttcatgaagacagaagaaatactttcaccccaaccaatgactgtaagatcttgagagtatgttcttactcatttctgtaattgcagtagtgtagtcatctgcatataaatttaataaatgcatgttaaaatttaagttgatgccttttagtcctctcagagtctgtcacagtttctttgtgtaaatgataaaaaagtttgaatttaatcaataaaacttaaaaatcacaatatcaatcaaaaa

SEQ ID NO: 377925 - DNA, 4301 bp, Homo sapiens
tatattaactaaacaagtcacagtctttatttttaatttctacagtcacctcgtgagacaggtattagaactccggagtggcatcaaaatgagggaaaggcctcagggccagcgcctttgcgtcctggaccggcgtacagacgggagaaaggccgaccaatccgagagcaggctgaggcctggtcccgcccctgggggcagagcctcgcctcttttccgcctcaccctttgggagtaggggtgtgcggctggcttgtcccgcccctgcccctgagtgacagaaccgtggacagcaacatttcccacaggacacgaagtttgtcggcccttgccttggcagagctgaggtgtgtgtccggcgagtgcgaggggattggggagaccctgcccgggaagctcggggtccgggaatgaaagcgggcgcacctctttagcgagccctaaagcgtttgggagacgatcgttccgtccctgggagcggcacttggtggggctgggcggagggaggctctgcaagagaaacccggagtccgggaaacccagtagtttctggaggctgctcacattccttggcttatggcctccttcttccaacgtcaaagccagcaacattgcagcaatctgacttattttgttgtcatgtctcctgaccacatctggaagggttatctacttttgaagacacatccagataattcaggacaatctgtccattttgaggttcttcattgaatcatgtctgcaaagtcccttctgcaatctaagtaagaaaaatcaccaagaatattatttttggtatttggaattgaatttgccaggaatgcaagcactgctacctaactaaagaccttggctttggaaacatcttaccccttggcagctctccagagtttagacttggcagcatcaaagacacaacgcaagcaggcattttggagatcaaagatgggtagaaaagatgctgctactataaaacttcctgttgatcagtacagaaaacaaattggtaaacaggattataaaaaaactaaacctattttacgagcaaccaaattaaaagcagaagcaaagaaaacagcaataggcataaaggaagttggccttgtacttgcagctatattggcactactactggctttctatgctttcttttatctcagactcaccacggatgttgaccctgatctggaccaagatgaagattagctaagcaacaatcaatgcatgaaagagaaataactttacgaaagcaccttttgggaccaaaactttcaatactgaaactgtaacatctttaattctttctgctaatattttcagtttgcagacatatgatttttgatagttgcataggatgtcaggaaaagaaccttacctagcaatgcagtatagtatgtgctactggatacttttatatatctttctgctttgacagccaccctatacatggtacatttagatgaaatgggaaccagatcctaaatttttcaaatgtcattgccaatttatgtgtataattccatcacttcctgatgagtaagtctatttttgttctatatacatcataagttagtatatattcttatttacagaaacatgctcaaatcacattcagaaagaacaaaaagtcatgggaaattttttattttacaacaaagccctgctttctttctggacgtattttacatcattagagagactatctgcacatacatctaccataatctttttccttctttgccaactgttcagtgcacatgtgctgcatcagaaatggcacctggatgacagaagctcaaagagtcacatatgtctctaaaatagagttcttttcctcttgggctgtctgaactggtgtaaatagaagctcagttgatcttggttttaattaacttattactctattaatataaccttggaattctattctaattatgttgttctggctgcttgtagtatcagttcgcccctcttgttagggagatatgtaacaatctgtcatttaattgagcagtctttttcacataacagtaatagcaaaaatcctacctactcagaatcatcttcttaggttgtctcctaaatctgaacaatacagttgttttataaaattacattttgtctcttgagatttaatcaattagaactctttagggagaaaataaataatagaagaaaatatatgcctcatatttcatatgtaattatctgttgatataatttttcaatgtattttgtatttgtgggagcataatgacctgtacattcaatatttttactggtaattcaatttttaaatatgtttttacaatgcttgaacacataaaccttagaaaactggaaaatacgtgtccacagaaagagttattagctactaccttatgtaaagatgcatagaaaatgaaattgttggaaacatgtgcacaaagtgttttatattatatacattgtatttatgaagaataaataaaatattaagattgttttcctgctagccaagagaagaaatccttgggaaatatctaaggagtatatggggctttataagcactgtttctaaaagatattctctggtacttttgcaaaaagtcgactgtgactgtgtagcattatgttctgtagaatttttttcaagtagcataatttatttcattggtgtgaaaacagccaaaggttccaatatcctcacaaatcatttatgccaaacatctgagggcaaaatttagccggtgttatttactagattcttccctttgaactcacagactcaagagacagaccaagagttcttatatactcaccacagcggaccaatccaagtggcatttttaggaaaggttgcagcatttaatgccatgtggtatgtctgttcgtcaagtgggtggcaagggaatatccaagctggcattttggatatgatgggccttttactttcctgagtgacatgccacatgtcaagaaatactgctccccacccccccactcccatcacatttacgtgaacaattttcatttagttatttcccgttccatatggtgttaaaacagtcgtattaaataaagattatttctagttttcagtggtaatttaaatgagaggatatgtaataattgcttattagatacttatccaaatgaaatataacagagtttacagtacttaaaatggctggttatggtcttggaaatgtttgaaaattcattatcctgaaaaaaactttaccattctgttttacccttgaggtattttttggggaaaaatgtttttgataactattaatctaaatatagtataattataggcaaatttcactgcctagttttattgatatcctgagtctacagctagtccattcgtatgactgattgatttatgatagctccagagaaccataaatttcaaaggctaaactctctgattttagtaaatagtaggtaaagtgacacaatatatgtttacacaacactgttttcatgaaatgcaaactttgcaaaactcacattaactgggaagcagccaaccctctgtagagaaatcccagattgggagtctggtttgaatctttgaagacagaaaggtgatatccggcctgctgttttaaagggaccacacttttgaatacctactggtgtttggcagaaatctgagactggcaccagacacaaattttagacatgggtatcttccctccagtaattcactgctcagagtaatttagaagacaaaaacagaaaaaattgtaatgattttttaagtgttagaatatgtttgttaacatactctgcaaaataaatttcaactaatgcaatagacttaaaatatagcctatggaatactgtgattgaagtttgaaggcttgctggttcttattttgcatgcaagtttagacagggtaaagaatgtataaatttatttgagatgagatacagtattgtaaaaatataacctcatctagaattgcttttaaaacaagcaaaagcctattttagtacaaatgtagggtgggtagttgttttaaggtagcaaaatacttcaagattttctatctttttaatttttcatgaagacagaagaaatactttcaccccaaccaatgactgtaagatcttgagagtatgttcttactcatttctgtaattgcagtagtgtagtcatctgcatataaatttaataaatgcatgttaaaatttaagttgatgccttttagtcctctcagagtctgtcacagtttctttgtgtaaatgataaaaaagtttgaatttaatcaataaaacttaaaaatcacaatatcaatcaaaaa

SEQ ID NO: 377926 - DNA, 4102 bp, Homo sapiens
tatattaactaaacaagtcacagtctttatttttaatttctacagtcacctcgtgagacaggtattagaactccggagtggcatcaaaatgagggaaaggcctcagggccagcgcctttgcgtcctggaccggcgtacagacgggagaaaggccgaccaatccgagagcaggctgaggcctggtcccgcccctgggggcagagcctcgcctcttttccgcctcaccctttgggagtaggggtgtgcggctggcttgtcccgcccctgcccctgagtgacagaaccgtggacagcaacatttcccacaggacacgaagtttgtcggcccttgccttggcagagctgagtttctggaggctgctcacattccttggcttatggcctccttcttccaacgtcaaagccagcaacattgcagcaatctgacttattttgttgtcatgtctcctgaccacatctggaagggttatctacttttgaagacacatccagataattcaggacaatctgtccattttgaggttcttcattgaatcatgtctgcaaagtcccttctgcaatctaagtaagaaaaatcaccaagaatattatttttggtatttggaattgaatttgccaggaatgcaagcactgctacctaactaaagaccttggctttggaaacatcttaccccttggcagctctccagagtttagacttggcagcatcaaagacacaacgcaagcaggcattttggagatcaaagatgggtagaaaagatgctgctactataaaacttcctgttgatcagtacagaaaacaaattggtaaacaggattataaaaaaactaaacctattttacgagcaaccaaattaaaagcagaagcaaagaaaacagcaataggcataaaggaagttggccttgtacttgcagctatattggcactactactggctttctatgctttcttttatctcagactcaccacggatgttgaccctgatctggaccaagatgaagattagctaagcaacaatcaatgcatgaaagagaaataactttacgaaagcaccttttgggaccaaaactttcaatactgaaactgtaacatctttaattctttctgctaatattttcagtttgcagacatatgatttttgatagttgcataggatgtcaggaaaagaaccttacctagcaatgcagtatagtatgtgctactggatacttttatatatctttctgctttgacagccaccctatacatggtacatttagatgaaatgggaaccagatcctaaatttttcaaatgtcattgccaatttatgtgtataattccatcacttcctgatgagtaagtctatttttgttctatatacatcataagttagtatatattcttatttacagaaacatgctcaaatcacattcagaaagaacaaaaagtcatgggaaattttttattttacaacaaagccctgctttctttctggacgtattttacatcattagagagactatctgcacatacatctaccataatctttttccttctttgccaactgttcagtgcacatgtgctgcatcagaaatggcacctggatgacagaagctcaaagagtcacatatgtctctaaaatagagttcttttcctcttgggctgtctgaactggtgtaaatagaagctcagttgatcttggttttaattaacttattactctattaatataaccttggaattctattctaattatgttgttctggctgcttgtagtatcagttcgcccctcttgttagggagatatgtaacaatctgtcatttaattgagcagtctttttcacataacagtaatagcaaaaatcctacctactcagaatcatcttcttaggttgtctcctaaatctgaacaatacagttgttttataaaattacattttgtctcttgagatttaatcaattagaactctttagggagaaaataaataatagaagaaaatatatgcctcatatttcatatgtaattatctgttgatataatttttcaatgtattttgtatttgtgggagcataatgacctgtacattcaatatttttactggtaattcaatttttaaatatgtttttacaatgcttgaacacataaaccttagaaaactggaaaatacgtgtccacagaaagagttattagctactaccttatgtaaagatgcatagaaaatgaaattgttggaaacatgtgcacaaagtgttttatattatatacattgtatttatgaagaataaataaaatattaagattgttttcctgctagccaagagaagaaatccttgggaaatatctaaggagtatatggggctttataagcactgtttctaaaagatattctctggtacttttgcaaaaagtcgactgtgactgtgtagcattatgttctgtagaatttttttcaagtagcataatttatttcattggtgtgaaaacagccaaaggttccaatatcctcacaaatcatttatgccaaacatctgagggcaaaatttagccggtgttatttactagattcttccctttgaactcacagactcaagagacagaccaagagttcttatatactcaccacagcggaccaatccaagtggcatttttaggaaaggttgcagcatttaatgccatgtggtatgtctgttcgtcaagtgggtggcaagggaatatccaagctggcattttggatatgatgggccttttactttcctgagtgacatgccacatgtcaagaaatactgctccccacccccccactcccatcacatttacgtgaacaattttcatttagttatttcccgttccatatggtgttaaaacagtcgtattaaataaagattatttctagttttcagtggtaatttaaatgagaggatatgtaataattgcttattagatacttatccaaatgaaatataacagagtttacagtacttaaaatggctggttatggtcttggaaatgtttgaaaattcattatcctgaaaaaaactttaccattctgttttacccttgaggtattttttggggaaaaatgtttttgataactattaatctaaatatagtataattataggcaaatttcactgcctagttttattgatatcctgagtctacagctagtccattcgtatgactgattgatttatgatagctccagagaaccataaatttcaaaggctaaactctctgattttagtaaatagtaggtaaagtgacacaatatatgtttacacaacactgttttcatgaaatgcaaactttgcaaaactcacattaactgggaagcagccaaccctctgtagagaaatcccagattgggagtctggtttgaatctttgaagacagaaaggtgatatccggcctgctgttttaaagggaccacacttttgaatacctactggtgtttggcagaaatctgagactggcaccagacacaaattttagacatgggtatcttccctccagtaattcactgctcagagtaatttagaagacaaaaacagaaaaaattgtaatgattttttaagtgttagaatatgtttgttaacatactctgcaaaataaatttcaactaatgcaatagacttaaaatatagcctatggaatactgtgattgaagtttgaaggcttgctggttcttattttgcatgcaagtttagacagggtaaagaatgtataaatttatttgagatgagatacagtattgtaaaaatataacctcatctagaattgcttttaaaacaagcaaaagcctattttagtacaaatgtagggtgggtagttgttttaaggtagcaaaatacttcaagattttctatctttttaatttttcatgaagacagaagaaatactttcaccccaaccaatgactgtaagatcttgagagtatgttcttactcatttctgtaattgcagtagtgtagtcatctgcatataaatttaataaatgcatgttaaaatttaagttgatgccttttagtcctctcagagtctgtcacagtttctttgtgtaaatgataaaaaagtttgaatttaatcaataaaacttaaaaatcacaatatcaatcaaaaa

SEQ ID NO: 377927 - DNA, 3717 bp, Homo sapiens
gcctttcttctgaggggagccttttatcctgctggtgagtttgggaaaaggaattggatcggggcatgcagcgtctccttatctgcaaacaggcctgccggtgggaatcatggtactgttccccagcaacacaacattaatttcagagggagatgctctgccactacaggagtgggtctgttaagaaaaatcaccaagaatattatttttggtatttggaattgaatttgccaggaatgcaagcactgctacctaactaaagaccttggctttggaaacatcttaccccttggcagctctccagagtttagacttggcagcatcaaagacacaacgcaagcaggcattttggagatcaaagatgggtagaaaagatgctgctactataaaacttcctgttgatcagtacagaaaacaaattggtaaacaggattataaaaaaactaaacctattttacgagcaaccaaattaaaagcagaagcaaagaaaacagcaataggcataaaggaagttggccttgtacttgcagctatattggcactactactggctttctatgctttcttttatctcagactcaccacggatgttgaccctgatctggaccaagatgaagattagctaagcaacaatcaatgcatgaaagagaaataactttacgaaagcaccttttgggaccaaaactttcaatactgaaactgtaacatctttaattctttctgctaatattttcagtttgcagacatatgatttttgatagttgcataggatgtcaggaaaagaaccttacctagcaatgcagtatagtatgtgctactggatacttttatatatctttctgctttgacagccaccctatacatggtacatttagatgaaatgggaaccagatcctaaatttttcaaatgtcattgccaatttatgtgtataattccatcacttcctgatgagtaagtctatttttgttctatatacatcataagttagtatatattcttatttacagaaacatgctcaaatcacattcagaaagaacaaaaagtcatgggaaattttttattttacaacaaagccctgctttctttctggacgtattttacatcattagagagactatctgcacatacatctaccataatctttttccttctttgccaactgttcagtgcacatgtgctgcatcagaaatggcacctggatgacagaagctcaaagagtcacatatgtctctaaaatagagttcttttcctcttgggctgtctgaactggtgtaaatagaagctcagttgatcttggttttaattaacttattactctattaatataaccttggaattctattctaattatgttgttctggctgcttgtagtatcagttcgcccctcttgttagggagatatgtaacaatctgtcatttaattgagcagtctttttcacataacagtaatagcaaaaatcctacctactcagaatcatcttcttaggttgtctcctaaatctgaacaatacagttgttttataaaattacattttgtctcttgagatttaatcaattagaactctttagggagaaaataaataatagaagaaaatatatgcctcatatttcatatgtaattatctgttgatataatttttcaatgtattttgtatttgtgggagcataatgacctgtacattcaatatttttactggtaattcaatttttaaatatgtttttacaatgcttgaacacataaaccttagaaaactggaaaatacgtgtccacagaaagagttattagctactaccttatgtaaagatgcatagaaaatgaaattgttggaaacatgtgcacaaagtgttttatattatatacattgtatttatgaagaataaataaaatattaagattgttttcctgctagccaagagaagaaatccttgggaaatatctaaggagtatatggggctttataagcactgtttctaaaagatattctctggtacttttgcaaaaagtcgactgtgactgtgtagcattatgttctgtagaatttttttcaagtagcataatttatttcattggtgtgaaaacagccaaaggttccaatatcctcacaaatcatttatgccaaacatctgagggcaaaatttagccggtgttatttactagattcttccctttgaactcacagactcaagagacagaccaagagttcttatatactcaccacagcggaccaatccaagtggcatttttaggaaaggttgcagcatttaatgccatgtggtatgtctgttcgtcaagtgggtggcaagggaatatccaagctggcattttggatatgatgggccttttactttcctgagtgacatgccacatgtcaagaaatactgctccccacccccccactcccatcacatttacgtgaacaattttcatttagttatttcccgttccatatggtgttaaaacagtcgtattaaataaagattatttctagttttcagtggtaatttaaatgagaggatatgtaataattgcttattagatacttatccaaatgaaatataacagagtttacagtacttaaaatggctggttatggtcttggaaatgtttgaaaattcattatcctgaaaaaaactttaccattctgttttacccttgaggtattttttggggaaaaatgtttttgataactattaatctaaatatagtataattataggcaaatttcactgcctagttttattgatatcctgagtctacagctagtccattcgtatgactgattgatttatgatagctccagagaaccataaatttcaaaggctaaactctctgattttagtaaatagtaggtaaagtgacacaatatatgtttacacaacactgttttcatgaaatgcaaactttgcaaaactcacattaactgggaagcagccaaccctctgtagagaaatcccagattgggagtctggtttgaatctttgaagacagaaaggtgatatccggcctgctgttttaaagggaccacacttttgaatacctactggtgtttggcagaaatctgagactggcaccagacacaaattttagacatgggtatcttccctccagtaattcactgctcagagtaatttagaagacaaaaacagaaaaaattgtaatgattttttaagtgttagaatatgtttgttaacatactctgcaaaataaatttcaactaatgcaatagacttaaaatatagcctatggaatactgtgattgaagtttgaaggcttgctggttcttattttgcatgcaagtttagacagggtaaagaatgtataaatttatttgagatgagatacagtattgtaaaaatataacctcatctagaattgcttttaaaacaagcaaaagcctattttagtacaaatgtagggtgggtagttgttttaaggtagcaaaatacttcaagattttctatctttttaatttttcatgaagacagaagaaatactttcaccccaaccaatgactgtaagatcttgagagtatgttcttactcatttctgtaattgcagtagtgtagtcatctgcatataaatttaataaatgcatgttaaaatttaagttgatgccttttagtcctctcagagtctgtcacagtttctttgtgtaaatgataaaaaagtttgaatttaatcaataaaacttaaaaatcacaatatcaatcaaaaa

SEQ ID NO: 377928 - DNA, 3829 bp, Homo sapiens
tatattaactaaacaagtcacagtctttatttttaatttctacagtcacctcgtgagacaggtattagaactccggagtggcatcaaaatgagggaaaggcctcagggccagcgcctttgcgtcctggaccggcgtacagacgggagaaaggccgaccaatccgagagcaggctgaggcctggtcccgcccctgggggcagagcctcgcctcttttccgcctcaccctttgggagtaggggtgtgcggctggcttgtcccgcccctgcccctgagtgacagaaccgtggacagcaacatttcccacaggacacgaagtttgtcggcccttgccttggcagagctgagtaagaaaaatcaccaagaatattatttttggtatttggaattgaatttgccaggaatgcaagcactgctacctaactaaagaccttggctttggaaacatcttaccccttggcagctctccagagtttagacttggcagcatcaaagacacaacgcaagcaggcattttggagatcaaagatgggtagaaaagatgctgctactataaaacttcctgttgatcagtacagaaaacaaattggtaaacaggattataaaaaaactaaacctattttacgagcaaccaaattaaaagcagaagcaaagaaaacagcaataggcataaaggaagttggccttgtacttgcagctatattggcactactactggctttctatgctttcttttatctcagactcaccacggatgttgaccctgatctggaccaagatgaagattagctaagcaacaatcaatgcatgaaagagaaataactttacgaaagcaccttttgggaccaatttgcagacatatgatttttgatagttgcataggatgtcaggaaaagaaccttacctagcaatgcagtatagtatgtgctactggatacttttatatatctttctgctttgacagccaccctatacatggtacatttagatgaaatgggaaccagatcctaaatttttcaaatgtcattgccaatttatgtgtataattccatcacttcctgatgagtaagtctatttttgttctatatacatcataagttagtatatattcttatttacagaaacatgctcaaatcacattcagaaagaacaaaaagtcatgggaaattttttattttacaacaaagccctgctttctttctggacgtattttacatcattagagagactatctgcacatacatctaccataatctttttccttctttgccaactgttcagtgcacatgtgctgcatcagaaatggcacctggatgacagaagctcaaagagtcacatatgtctctaaaatagagttcttttcctcttgggctgtctgaactggtgtaaatagaagctcagttgatcttggttttaattaacttattactctattaatataaccttggaattctattctaattatgttgttctggctgcttgtagtatcagttcgcccctcttgttagggagatatgtaacaatctgtcatttaattgagcagtctttttcacataacagtaatagcaaaaatcctacctactcagaatcatcttcttaggttgtctcctaaatctgaacaatacagttgttttataaaattacattttgtctcttgagatttaatcaattagaactctttagggagaaaataaataatagaagaaaatatatgcctcatatttcatatgtaattatctgttgatataatttttcaatgtattttgtatttgtgggagcataatgacctgtacattcaatatttttactggtaattcaatttttaaatatgtttttacaatgcttgaacacataaaccttagaaaactggaaaatacgtgtccacagaaagagttattagctactaccttatgtaaagatgcatagaaaatgaaattgttggaaacatgtgcacaaagtgttttatattatatacattgtatttatgaagaataaataaaatattaagattgttttcctgctagccaagagaagaaatccttgggaaatatctaaggagtatatggggctttataagcactgtttctaaaagatattctctggtacttttgcaaaaagtcgactgtgactgtgtagcattatgttctgtagaatttttttcaagtagcataatttatttcattggtgtgaaaacagccaaaggttccaatatcctcacaaatcatttatgccaaacatctgagggcaaaatttagccggtgttatttactagattcttccctttgaactcacagactcaagagacagaccaagagttcttatatactcaccacagcggaccaatccaagtggcatttttaggaaaggttgcagcatttaatgccatgtggtatgtctgttcgtcaagtgggtggcaagggaatatccaagctggcattttggatatgatgggccttttactttcctgagtgacatgccacatgtcaagaaatactgctccccacccccccactcccatcacatttacgtgaacaattttcatttagttatttcccgttccatatggtgttaaaacagtcgtattaaataaagattatttctagttttcagtggtaatttaaatgagaggatatgtaataattgcttattagatacttatccaaatgaaatataacagagtttacagtacttaaaatggctggttatggtcttggaaatgtttgaaaattcattatcctgaaaaaaactttaccattctgttttacccttgaggtattttttggggaaaaatgtttttgataactattaatctaaatatagtataattataggcaaatttcactgcctagttttattgatatcctgagtctacagctagtccattcgtatgactgattgatttatgatagctccagagaaccataaatttcaaaggctaaactctctgattttagtaaatagtaggtaaagtgacacaatatatgtttacacaacactgttttcatgaaatgcaaactttgcaaaactcacattaactgggaagcagccaaccctctgtagagaaatcccagattgggagtctggtttgaatctttgaagacagaaaggtgatatccggcctgctgttttaaagggaccacacttttgaatacctactggtgtttggcagaaatctgagactggcaccagacacaaattttagacatgggtatcttccctccagtaattcactgctcagagtaatttagaagacaaaaacagaaaaaattgtaatgattttttaagtgttagaatatgtttgttaacatactctgcaaaataaatttcaactaatgcaatagacttaaaatatagcctatggaatactgtgattgaagtttgaaggcttgctggttcttattttgcatgcaagtttagacagggtaaagaatgtataaatttatttgagatgagatacagtattgtaaaaatataacctcatctagaattgcttttaaaacaagcaaaagcctattttagtacaaatgtagggtgggtagttgttttaaggtagcaaaatacttcaagattttctatctttttaatttttcatgaagacagaagaaatactttcaccccaaccaatgactgtaagatcttgagagtatgttcttactcatttctgtaattgcagtagtgtagtcatctgcatataaatttaataaatgcatgttaaaatttaagttgatgccttttagtcctctcagagtctgtcacagtttctttgtgtaaatgataaaaaagtttgaatttaatcaataaaacttaaaaatcacaatatcaatcaaaaa

SEQ ID NO: 377929 - DNA, 4020 bp, Homo sapiens
tatattaactaaacaagtcacagtctttatttttaatttctacagtcacctcgtgagacaggtattagaactccggagtggcatcaaaatgagggaaaggcctcagggccagcgcctttgcgtcctggaccggcgtacagacgggagaaaggccgaccaatccgagagcaggctgaggcctggtcccgcccctgggggcagagcctcgcctcttttccgcctcaccctttgggagtaggggtgtgcggctggcttgtcccgcccctgcccctgagtgacagaaccgtggacagcaacatttcccacaggacacgaagtttgtcggcccttgccttggcagagctgagtttctggaggctgctcacattccttggcttatggcctccttcttccaacgtcaaagccagcaacattgcagcaatctgacttattttgttgtcatgtctcctgaccacatctggaagggttatctacttttgaagacacatccagataattcaggacaatctgtccattttgaggttcttcattgaatcatgtctgcaaagtcccttctgcaatctaagtaagaaaaatcaccaagaatattatttttggtatttggaattgaatttgccaggaatgcaagcactgctacctaactaaagaccttggctttggaaacatcttaccccttggcagctctccagagtttagacttggcagcatcaaagacacaacgcaaggtaaacaggattataaaaaaactaaacctattttacgagcaaccaaattaaaagcagaagcaaagaaaacagcaataggcataaaggaagttggccttgtacttgcagctatattggcactactactggctttctatgctttcttttatctcagactcaccacggatgttgaccctgatctggaccaagatgaagattagctaagcaacaatcaatgcatgaaagagaaataactttacgaaagcaccttttgggaccaaaactttcaatactgaaactgtaacatctttaattctttctgctaatattttcagtttgcagacatatgatttttgatagttgcataggatgtcaggaaaagaaccttacctagcaatgcagtatagtatgtgctactggatacttttatatatctttctgctttgacagccaccctatacatggtacatttagatgaaatgggaaccagatcctaaatttttcaaatgtcattgccaatttatgtgtataattccatcacttcctgatgagtaagtctatttttgttctatatacatcataagttagtatatattcttatttacagaaacatgctcaaatcacattcagaaagaacaaaaagtcatgggaaattttttattttacaacaaagccctgctttctttctggacgtattttacatcattagagagactatctgcacatacatctaccataatctttttccttctttgccaactgttcagtgcacatgtgctgcatcagaaatggcacctggatgacagaagctcaaagagtcacatatgtctctaaaatagagttcttttcctcttgggctgtctgaactggtgtaaatagaagctcagttgatcttggttttaattaacttattactctattaatataaccttggaattctattctaattatgttgttctggctgcttgtagtatcagttcgcccctcttgttagggagatatgtaacaatctgtcatttaattgagcagtctttttcacataacagtaatagcaaaaatcctacctactcagaatcatcttcttaggttgtctcctaaatctgaacaatacagttgttttataaaattacattttgtctcttgagatttaatcaattagaactctttagggagaaaataaataatagaagaaaatatatgcctcatatttcatatgtaattatctgttgatataatttttcaatgtattttgtatttgtgggagcataatgacctgtacattcaatatttttactggtaattcaatttttaaatatgtttttacaatgcttgaacacataaaccttagaaaactggaaaatacgtgtccacagaaagagttattagctactaccttatgtaaagatgcatagaaaatgaaattgttggaaacatgtgcacaaagtgttttatattatatacattgtatttatgaagaataaataaaatattaagattgttttcctgctagccaagagaagaaatccttgggaaatatctaaggagtatatggggctttataagcactgtttctaaaagatattctctggtacttttgcaaaaagtcgactgtgactgtgtagcattatgttctgtagaatttttttcaagtagcataatttatttcattggtgtgaaaacagccaaaggttccaatatcctcacaaatcatttatgccaaacatctgagggcaaaatttagccggtgttatttactagattcttccctttgaactcacagactcaagagacagaccaagagttcttatatactcaccacagcggaccaatccaagtggcatttttaggaaaggttgcagcatttaatgccatgtggtatgtctgttcgtcaagtgggtggcaagggaatatccaagctggcattttggatatgatgggccttttactttcctgagtgacatgccacatgtcaagaaatactgctccccacccccccactcccatcacatttacgtgaacaattttcatttagttatttcccgttccatatggtgttaaaacagtcgtattaaataaagattatttctagttttcagtggtaatttaaatgagaggatatgtaataattgcttattagatacttatccaaatgaaatataacagagtttacagtacttaaaatggctggttatggtcttggaaatgtttgaaaattcattatcctgaaaaaaactttaccattctgttttacccttgaggtattttttggggaaaaatgtttttgataactattaatctaaatatagtataattataggcaaatttcactgcctagttttattgatatcctgagtctacagctagtccattcgtatgactgattgatttatgatagctccagagaaccataaatttcaaaggctaaactctctgattttagtaaatagtaggtaaagtgacacaatatatgtttacacaacactgttttcatgaaatgcaaactttgcaaaactcacattaactgggaagcagccaaccctctgtagagaaatcccagattgggagtctggtttgaatctttgaagacagaaaggtgatatccggcctgctgttttaaagggaccacacttttgaatacctactggtgtttggcagaaatctgagactggcaccagacacaaattttagacatgggtatcttccctccagtaattcactgctcagagtaatttagaagacaaaaacagaaaaaattgtaatgattttttaagtgttagaatatgtttgttaacatactctgcaaaataaatttcaactaatgcaatagacttaaaatatagcctatggaatactgtgattgaagtttgaaggcttgctggttcttattttgcatgcaagtttagacagggtaaagaatgtataaatttatttgagatgagatacagtattgtaaaaatataacctcatctagaattgcttttaaaacaagcaaaagcctattttagtacaaatgtagggtgggtagttgttttaaggtagcaaaatacttcaagattttctatctttttaatttttcatgaagacagaagaaatactttcaccccaaccaatgactgtaagatcttgagagtatgttcttactcatttctgtaattgcagtagtgtagtcatctgcatataaatttaataaatgcatgttaaaatttaagttgatgccttttagtcctctcagagtctgtcacagtttctttgtgtaaatgataaaaaagtttgaatttaatcaataaaacttaaaaatcacaatatcaatcaaaaa

SEQ ID NO: 377930 - DNA, 3724 bp, Homo sapiens
tatattaactaaacaagtcacagtctttatttttaatttctacagtcacctcgtgagacaggtattagaactccggagtggcatcaaaatgagggaaaggcctcagggccagcgcctttgcgtcctggaccggcgtacagacgggagaaaggccgaccaatccgagagcaggctgaggcctggtcccgcccctgggggcagagcctcgcctcttttccgcctcaccctttgggagtaggggtgtgcggctggcttgtcccgcccctgcccctgagtgacagaaccgtggacagcaacatttcccacaggacacgaagtttgtcggcccttgccttggcagagctgagcaggcattttggagatcaaagatgggtagaaaagatgctgctactataaaacttcctgttgatcagtacagaaaacaaattggtaaacaggattataaaaaaactaaacctattttacgagcaaccaaattaaaagcagaagcaaagaaaacagcaataggcataaaggaagttggccttgtacttgcagctatattggcactactactggctttctatgctttcttttatctcagactcaccacggatgttgaccctgatctggaccaagatgaagattagctaagcaacaatcaatgcatgaaagagaaataactttacgaaagcaccttttgggaccaaaactttcaatactgaaactgtaacatctttaattctttctgctaatattttcagtttgcagacatatgatttttgatagttgcataggatgtcaggaaaagaaccttacctagcaatgcagtatagtatgtgctactggatacttttatatatctttctgctttgacagccaccctatacatggtacatttagatgaaatgggaaccagatcctaaatttttcaaatgtcattgccaatttatgtgtataattccatcacttcctgatgagtaagtctatttttgttctatatacatcataagttagtatatattcttatttacagaaacatgctcaaatcacattcagaaagaacaaaaagtcatgggaaattttttattttacaacaaagccctgctttctttctggacgtattttacatcattagagagactatctgcacatacatctaccataatctttttccttctttgccaactgttcagtgcacatgtgctgcatcagaaatggcacctggatgacagaagctcaaagagtcacatatgtctctaaaatagagttcttttcctcttgggctgtctgaactggtgtaaatagaagctcagttgatcttggttttaattaacttattactctattaatataaccttggaattctattctaattatgttgttctggctgcttgtagtatcagttcgcccctcttgttagggagatatgtaacaatctgtcatttaattgagcagtctttttcacataacagtaatagcaaaaatcctacctactcagaatcatcttcttaggttgtctcctaaatctgaacaatacagttgttttataaaattacattttgtctcttgagatttaatcaattagaactctttagggagaaaataaataatagaagaaaatatatgcctcatatttcatatgtaattatctgttgatataatttttcaatgtattttgtatttgtgggagcataatgacctgtacattcaatatttttactggtaattcaatttttaaatatgtttttacaatgcttgaacacataaaccttagaaaactggaaaatacgtgtccacagaaagagttattagctactaccttatgtaaagatgcatagaaaatgaaattgttggaaacatgtgcacaaagtgttttatattatatacattgtatttatgaagaataaataaaatattaagattgttttcctgctagccaagagaagaaatccttgggaaatatctaaggagtatatggggctttataagcactgtttctaaaagatattctctggtacttttgcaaaaagtcgactgtgactgtgtagcattatgttctgtagaatttttttcaagtagcataatttatttcattggtgtgaaaacagccaaaggttccaatatcctcacaaatcatttatgccaaacatctgagggcaaaatttagccggtgttatttactagattcttccctttgaactcacagactcaagagacagaccaagagttcttatatactcaccacagcggaccaatccaagtggcatttttaggaaaggttgcagcatttaatgccatgtggtatgtctgttcgtcaagtgggtggcaagggaatatccaagctggcattttggatatgatgggccttttactttcctgagtgacatgccacatgtcaagaaatactgctccccacccccccactcccatcacatttacgtgaacaattttcatttagttatttcccgttccatatggtgttaaaacagtcgtattaaataaagattatttctagttttcagtggtaatttaaatgagaggatatgtaataattgcttattagatacttatccaaatgaaatataacagagtttacagtacttaaaatggctggttatggtcttggaaatgtttgaaaattcattatcctgaaaaaaactttaccattctgttttacccttgaggtattttttggggaaaaatgtttttgataactattaatctaaatatagtataattataggcaaatttcactgcctagttttattgatatcctgagtctacagctagtccattcgtatgactgattgatttatgatagctccagagaaccataaatttcaaaggctaaactctctgattttagtaaatagtaggtaaagtgacacaatatatgtttacacaacactgttttcatgaaatgcaaactttgcaaaactcacattaactgggaagcagccaaccctctgtagagaaatcccagattgggagtctggtttgaatctttgaagacagaaaggtgatatccggcctgctgttttaaagggaccacacttttgaatacctactggtgtttggcagaaatctgagactggcaccagacacaaattttagacatgggtatcttccctccagtaattcactgctcagagtaatttagaagacaaaaacagaaaaaattgtaatgattttttaagtgttagaatatgtttgttaacatactctgcaaaataaatttcaactaatgcaatagacttaaaatatagcctatggaatactgtgattgaagtttgaaggcttgctggttcttattttgcatgcaagtttagacagggtaaagaatgtataaatttatttgagatgagatacagtattgtaaaaatataacctcatctagaattgcttttaaaacaagcaaaagcctattttagtacaaatgtagggtgggtagttgttttaaggtagcaaaatacttcaagattttctatctttttaatttttcatgaagacagaagaaatactttcaccccaaccaatgactgtaagatcttgagagtatgttcttactcatttctgtaattgcagtagtgtagtcatctgcatataaatttaataaatgcatgttaaaatttaagttgatgccttttagtcctctcagagtctgtcacagtttctttgtgtaaatgataaaaaagtttgaatttaatcaataaaacttaaaaatcacaatatcaatcaaaaa

SEQ ID NO: 377931 - DNA, 4041 bp, Homo sapiens
tatattaactaaacaagtcacagtctttatttttaatttctacagtcacctcgtgagacaggtattagaactccggagtggcatcaaaatgagggaaaggcctcagggccagcgcctttgcgtcctggaccggcgtacagacgggagaaaggccgaccaatccgagagcaggctgaggcctggtcccgcccctgggggcagagcctcgcctcttttccgcctcaccctttgggagtaggggtgtgcggctggcttgtcccgcccctgcccctgagtgacagaaccgtggacagcaacatttcccacaggacacgaagtttgtcggcccttgccttggcagagctgagtaagaaaaatcaccaagaatattatttttggtatttggaattgaatttgccaggaatgcaagcactgctacctaactaaagaccttggctttggaaacatcttaccccttggcagctctccagagtttagacttggcagcatcaaagacacaacgcaagcaatatgaaacagaaaaacaagttggttggatagctgtcctccatgcagtcattcatgatccaggctgtcatcatcttcatcactcatgttcagagttaccctagaggtcatctccatttcatccagataaatgagtatgcaaggaacgtttttatagcaggcattttggagatcaaagatgggtagaaaagatgctgctactataaaacttcctgttgatcagtacagaaaacaaattggtaaacaggattataaaaaaactaaacctattttacgagcaaccaaattaaaagcagaagcaaagaaaacagcaataggcataaaggaagttggccttgtacttgcagctatattggcactactactggctttctatgctttcttttatctcagactcaccacggatgttgaccctgatctggaccaagatgaagattagctaagcaacaatcaatgcatgaaagagaaataactttacgaaagcaccttttgggaccaaaactttcaatactgaaactgtaacatctttaattctttctgctaatattttcagtttgcagacatatgatttttgatagttgcataggatgtcaggaaaagaaccttacctagcaatgcagtatagtatgtgctactggatacttttatatatctttctgctttgacagccaccctatacatggtacatttagatgaaatgggaaccagatcctaaatttttcaaatgtcattgccaatttatgtgtataattccatcacttcctgatgagtaagtctatttttgttctatatacatcataagttagtatatattcttatttacagaaacatgctcaaatcacattcagaaagaacaaaaagtcatgggaaattttttattttacaacaaagccctgctttctttctggacgtattttacatcattagagagactatctgcacatacatctaccataatctttttccttctttgccaactgttcagtgcacatgtgctgcatcagaaatggcacctggatgacagaagctcaaagagtcacatatgtctctaaaatagagttcttttcctcttgggctgtctgaactggtgtaaatagaagctcagttgatcttggttttaattaacttattactctattaatataaccttggaattctattctaattatgttgttctggctgcttgtagtatcagttcgcccctcttgttagggagatatgtaacaatctgtcatttaattgagcagtctttttcacataacagtaatagcaaaaatcctacctactcagaatcatcttcttaggttgtctcctaaatctgaacaatacagttgttttataaaattacattttgtctcttgagatttaatcaattagaactctttagggagaaaataaataatagaagaaaatatatgcctcatatttcatatgtaattatctgttgatataatttttcaatgtattttgtatttgtgggagcataatgacctgtacattcaatatttttactggtaattcaatttttaaatatgtttttacaatgcttgaacacataaaccttagaaaactggaaaatacgtgtccacagaaagagttattagctactaccttatgtaaagatgcatagaaaatgaaattgttggaaacatgtgcacaaagtgttttatattatatacattgtatttatgaagaataaataaaatattaagattgttttcctgctagccaagagaagaaatccttgggaaatatctaaggagtatatggggctttataagcactgtttctaaaagatattctctggtacttttgcaaaaagtcgactgtgactgtgtagcattatgttctgtagaatttttttcaagtagcataatttatttcattggtgtgaaaacagccaaaggttccaatatcctcacaaatcatttatgccaaacatctgagggcaaaatttagccggtgttatttactagattcttccctttgaactcacagactcaagagacagaccaagagttcttatatactcaccacagcggaccaatccaagtggcatttttaggaaaggttgcagcatttaatgccatgtggtatgtctgttcgtcaagtgggtggcaagggaatatccaagctggcattttggatatgatgggccttttactttcctgagtgacatgccacatgtcaagaaatactgctccccacccccccactcccatcacatttacgtgaacaattttcatttagttatttcccgttccatatggtgttaaaacagtcgtattaaataaagattatttctagttttcagtggtaatttaaatgagaggatatgtaataattgcttattagatacttatccaaatgaaatataacagagtttacagtacttaaaatggctggttatggtcttggaaatgtttgaaaattcattatcctgaaaaaaactttaccattctgttttacccttgaggtattttttggggaaaaatgtttttgataactattaatctaaatatagtataattataggcaaatttcactgcctagttttattgatatcctgagtctacagctagtccattcgtatgactgattgatttatgatagctccagagaaccataaatttcaaaggctaaactctctgattttagtaaatagtaggtaaagtgacacaatatatgtttacacaacactgttttcatgaaatgcaaactttgcaaaactcacattaactgggaagcagccaaccctctgtagagaaatcccagattgggagtctggtttgaatctttgaagacagaaaggtgatatccggcctgctgttttaaagggaccacacttttgaatacctactggtgtttggcagaaatctgagactggcaccagacacaaattttagacatgggtatcttccctccagtaattcactgctcagagtaatttagaagacaaaaacagaaaaaattgtaatgattttttaagtgttagaatatgtttgttaacatactctgcaaaataaatttcaactaatgcaatagacttaaaatatagcctatggaatactgtgattgaagtttgaaggcttgctggttcttattttgcatgcaagtttagacagggtaaagaatgtataaatttatttgagatgagatacagtattgtaaaaatataacctcatctagaattgcttttaaaacaagcaaaagcctattttagtacaaatgtagggtgggtagttgttttaaggtagcaaaatacttcaagattttctatctttttaatttttcatgaagacagaagaaatactttcaccccaaccaatgactgtaagatcttgagagtatgttcttactcatttctgtaattgcagtagtgtagtcatctgcatataaatttaataaatgcatgttaaaatttaagttgatgccttttagtcctctcagagtctgtcacagtttctttgtgtaaatgataaaaaagtttgaatttaatcaataaaacttaaaaatcacaatatcaatcaaaaa

SEQ ID NO: 377932 - DNA, 3829 bp, Homo sapiens
tatattaactaaacaagtcacagtctttatttttaatttctacagtcacctcgtgagacaggtattagaactccggagtggcatcaaaatgagggaaaggcctcagggccagcgcctttgcgtcctggaccggcgtacagacgggagaaaggccgaccaatccgagagcaggctgaggcctggtcccgcccctgggggcagagcctcgcctcttttccgcctcaccctttgggagtaggggtgtgcggctggcttgtcccgcccctgcccctgagtgacagaaccgtggacagcaacatttcccacaggacacgaagtttgtcggcccttgccttggcagagctgagtaagaaaaatcaccaagaatattatttttggtatttggaattgaatttgccaggaatgcaagcactgctacctaactaaagaccttggctttggaaacatcttaccccttggcagctctccagagtttagacttggcagcatcaaagacacaacgcaagcaggcattttggagatcaaagatgggtagaaaagatgctgctactataaaacttcctgttgatcagtacagaaaacaaattggtaaacaggattataaaaaaactaaacctattttacgagcaaccaaattaaaagcagaagcaaagatactactggctttctatgctttcttttatctcagactcaccacggatgttgaccctgatctggaccaagatgaagattagctaagcaacaatcaatgcatgaaagagaaataactttacgaaagcaccttttgggaccaaaactttcaatactgaaactgtaacatctttaattctttctgctaatattttcagtttgcagacatatgatttttgatagttgcataggatgtcaggaaaagaaccttacctagcaatgcagtatagtatgtgctactggatacttttatatatctttctgctttgacagccaccctatacatggtacatttagatgaaatgggaaccagatcctaaatttttcaaatgtcattgccaatttatgtgtataattccatcacttcctgatgagtaagtctatttttgttctatatacatcataagttagtatatattcttatttacagaaacatgctcaaatcacattcagaaagaacaaaaagtcatgggaaattttttattttacaacaaagccctgctttctttctggacgtattttacatcattagagagactatctgcacatacatctaccataatctttttccttctttgccaactgttcagtgcacatgtgctgcatcagaaatggcacctggatgacagaagctcaaagagtcacatatgtctctaaaatagagttcttttcctcttgggctgtctgaactggtgtaaatagaagctcagttgatcttggttttaattaacttattactctattaatataaccttggaattctattctaattatgttgttctggctgcttgtagtatcagttcgcccctcttgttagggagatatgtaacaatctgtcatttaattgagcagtctttttcacataacagtaatagcaaaaatcctacctactcagaatcatcttcttaggttgtctcctaaatctgaacaatacagttgttttataaaattacattttgtctcttgagatttaatcaattagaactctttagggagaaaataaataatagaagaaaatatatgcctcatatttcatatgtaattatctgttgatataatttttcaatgtattttgtatttgtgggagcataatgacctgtacattcaatatttttactggtaattcaatttttaaatatgtttttacaatgcttgaacacataaaccttagaaaactggaaaatacgtgtccacagaaagagttattagctactaccttatgtaaagatgcatagaaaatgaaattgttggaaacatgtgcacaaagtgttttatattatatacattgtatttatgaagaataaataaaatattaagattgttttcctgctagccaagagaagaaatccttgggaaatatctaaggagtatatggggctttataagcactgtttctaaaagatattctctggtacttttgcaaaaagtcgactgtgactgtgtagcattatgttctgtagaatttttttcaagtagcataatttatttcattggtgtgaaaacagccaaaggttccaatatcctcacaaatcatttatgccaaacatctgagggcaaaatttagccggtgttatttactagattcttccctttgaactcacagactcaagagacagaccaagagttcttatatactcaccacagcggaccaatccaagtggcatttttaggaaaggttgcagcatttaatgccatgtggtatgtctgttcgtcaagtgggtggcaagggaatatccaagctggcattttggatatgatgggccttttactttcctgagtgacatgccacatgtcaagaaatactgctccccacccccccactcccatcacatttacgtgaacaattttcatttagttatttcccgttccatatggtgttaaaacagtcgtattaaataaagattatttctagttttcagtggtaatttaaatgagaggatatgtaataattgcttattagatacttatccaaatgaaatataacagagtttacagtacttaaaatggctggttatggtcttggaaatgtttgaaaattcattatcctgaaaaaaactttaccattctgttttacccttgaggtattttttggggaaaaatgtttttgataactattaatctaaatatagtataattataggcaaatttcactgcctagttttattgatatcctgagtctacagctagtccattcgtatgactgattgatttatgatagctccagagaaccataaatttcaaaggctaaactctctgattttagtaaatagtaggtaaagtgacacaatatatgtttacacaacactgttttcatgaaatgcaaactttgcaaaactcacattaactgggaagcagccaaccctctgtagagaaatcccagattgggagtctggtttgaatctttgaagacagaaaggtgatatccggcctgctgttttaaagggaccacacttttgaatacctactggtgtttggcagaaatctgagactggcaccagacacaaattttagacatgggtatcttccctccagtaattcactgctcagagtaatttagaagacaaaaacagaaaaaattgtaatgattttttaagtgttagaatatgtttgttaacatactctgcaaaataaatttcaactaatgcaatagacttaaaatatagcctatggaatactgtgattgaagtttgaaggcttgctggttcttattttgcatgcaagtttagacagggtaaagaatgtataaatttatttgagatgagatacagtattgtaaaaatataacctcatctagaattgcttttaaaacaagcaaaagcctattttagtacaaatgtagggtgggtagttgttttaaggtagcaaaatacttcaagattttctatctttttaatttttcatgaagacagaagaaatactttcaccccaaccaatgactgtaagatcttgagagtatgttcttactcatttctgtaattgcagtagtgtagtcatctgcatataaatttaataaatgcatgttaaaatttaagttgatgccttttagtcctctcagagtctgtcacagtttctttgtgtaaatgataaaaaagtttgaatttaatcaataaaacttaaaaatcacaatatcaatcaaaaa

SEQ ID NO: 377933 - DNA, 3656 bp, Homo sapiens
tatattaactaaacaagtcacagtctttatttttaatttctacagtcacctcgtgagacaggtattagaactccggagtggcatcaaaatgagggaaaggcctcagggccagcgcctttgcgtcctggaccggcgtacagacgggagaaaggccgaccaatccgagagcaggctgaggcctggtcccgcccctgggggcagagcctcgcctcttttccgcctcaccctttgggagtaggggtgtgcggctggcttgtcccgcccctgcccctgagtgacagaaccgtggacagcaacatttcccacaggacacgaagtttgtcggcccttgccttggcagagctgagcaggcattttggagatcaaagatgggtagaaaagatgctgctactataaaacttcctgttgatcagtacagaaaacaaattggtaaacaggattataaaaaaactaaacctattttacgagcaaccaaattaaaagcagaagcaaagaaaacagcaataggcataaagactcaccacggatgttgaccctgatctggaccaagatgaagattagctaagcaacaatcaatgcatgaaagagaaataactttacgaaagcaccttttgggaccaaaactttcaatactgaaactgtaacatctttaattctttctgctaatattttcagtttgcagacatatgatttttgatagttgcataggatgtcaggaaaagaaccttacctagcaatgcagtatagtatgtgctactggatacttttatatatctttctgctttgacagccaccctatacatggtacatttagatgaaatgggaaccagatcctaaatttttcaaatgtcattgccaatttatgtgtataattccatcacttcctgatgagtaagtctatttttgttctatatacatcataagttagtatatattcttatttacagaaacatgctcaaatcacattcagaaagaacaaaaagtcatgggaaattttttattttacaacaaagccctgctttctttctggacgtattttacatcattagagagactatctgcacatacatctaccataatctttttccttctttgccaactgttcagtgcacatgtgctgcatcagaaatggcacctggatgacagaagctcaaagagtcacatatgtctctaaaatagagttcttttcctcttgggctgtctgaactggtgtaaatagaagctcagttgatcttggttttaattaacttattactctattaatataaccttggaattctattctaattatgttgttctggctgcttgtagtatcagttcgcccctcttgttagggagatatgtaacaatctgtcatttaattgagcagtctttttcacataacagtaatagcaaaaatcctacctactcagaatcatcttcttaggttgtctcctaaatctgaacaatacagttgttttataaaattacattttgtctcttgagatttaatcaattagaactctttagggagaaaataaataatagaagaaaatatatgcctcatatttcatatgtaattatctgttgatataatttttcaatgtattttgtatttgtgggagcataatgacctgtacattcaatatttttactggtaattcaatttttaaatatgtttttacaatgcttgaacacataaaccttagaaaactggaaaatacgtgtccacagaaagagttattagctactaccttatgtaaagatgcatagaaaatgaaattgttggaaacatgtgcacaaagtgttttatattatatacattgtatttatgaagaataaataaaatattaagattgttttcctgctagccaagagaagaaatccttgggaaatatctaaggagtatatggggctttataagcactgtttctaaaagatattctctggtacttttgcaaaaagtcgactgtgactgtgtagcattatgttctgtagaatttttttcaagtagcataatttatttcattggtgtgaaaacagccaaaggttccaatatcctcacaaatcatttatgccaaacatctgagggcaaaatttagccggtgttatttactagattcttccctttgaactcacagactcaagagacagaccaagagttcttatatactcaccacagcggaccaatccaagtggcatttttaggaaaggttgcagcatttaatgccatgtggtatgtctgttcgtcaagtgggtggcaagggaatatccaagctggcattttggatatgatgggccttttactttcctgagtgacatgccacatgtcaagaaatactgctccccacccccccactcccatcacatttacgtgaacaattttcatttagttatttcccgttccatatggtgttaaaacagtcgtattaaataaagattatttctagttttcagtggtaatttaaatgagaggatatgtaataattgcttattagatacttatccaaatgaaatataacagagtttacagtacttaaaatggctggttatggtcttggaaatgtttgaaaattcattatcctgaaaaaaactttaccattctgttttacccttgaggtattttttggggaaaaatgtttttgataactattaatctaaatatagtataattataggcaaatttcactgcctagttttattgatatcctgagtctacagctagtccattcgtatgactgattgatttatgatagctccagagaaccataaatttcaaaggctaaactctctgattttagtaaatagtaggtaaagtgacacaatatatgtttacacaacactgttttcatgaaatgcaaactttgcaaaactcacattaactgggaagcagccaaccctctgtagagaaatcccagattgggagtctggtttgaatctttgaagacagaaaggtgatatccggcctgctgttttaaagggaccacacttttgaatacctactggtgtttggcagaaatctgagactggcaccagacacaaattttagacatgggtatcttccctccagtaattcactgctcagagtaatttagaagacaaaaacagaaaaaattgtaatgattttttaagtgttagaatatgtttgttaacatactctgcaaaataaatttcaactaatgcaatagacttaaaatatagcctatggaatactgtgattgaagtttgaaggcttgctggttcttattttgcatgcaagtttagacagggtaaagaatgtataaatttatttgagatgagatacagtattgtaaaaatataacctcatctagaattgcttttaaaacaagcaaaagcctattttagtacaaatgtagggtgggtagttgttttaaggtagcaaaatacttcaagattttctatctttttaatttttcatgaagacagaagaaatactttcaccccaaccaatgactgtaagatcttgagagtatgttcttactcatttctgtaattgcagtagtgtagtcatctgcatataaatttaataaatgcatgttaaaatttaagttgatgccttttagtcctctcagagtctgtcacagtttctttgtgtaaatgataaaaaagtttgaatttaatcaataaaacttaaaaatcacaatatcaatcaaaaa

SEQ ID NO: 377934 - DNA, 3973 bp, Homo sapiens
tatattaactaaacaagtcacagtctttatttttaatttctacagtcacctcgtgagacaggtattagaactccggagtggcatcaaaatgagggaaaggcctcagggccagcgcctttgcgtcctggaccggcgtacagacgggagaaaggccgaccaatccgagagcaggctgaggcctggtcccgcccctgggggcagagcctcgcctcttttccgcctcaccctttgggagtaggggtgtgcggctggcttgtcccgcccctgcccctgagtgacagaaccgtggacagcaacatttcccacaggacacgaagtttgtcggcccttgccttggcagagctgagtaagaaaaatcaccaagaatattatttttggtatttggaattgaatttgccaggaatgcaagcactgctacctaactaaagaccttggctttggaaacatcttaccccttggcagctctccagagtttagacttggcagcatcaaagacacaacgcaagcaatatgaaacagaaaaacaagttggttggatagctgtcctccatgcagtcattcatgatccaggctgtcatcatcttcatcactcatgttcagagttaccctagaggtcatctccatttcatccagataaatgagtatgcaaggaacgtttttatagcaggcattttggagatcaaagatgggtagaaaagatgctgctactataaaacttcctgttgatcagtacagaaaacaaattggtaaacaggattataaaaaaactaaacctattttacgagcaaccaaattaaaagcagaagcaaagaaaacagcaataggcataaagactcaccacggatgttgaccctgatctggaccaagatgaagattagctaagcaacaatcaatgcatgaaagagaaataactttacgaaagcaccttttgggaccaaaactttcaatactgaaactgtaacatctttaattctttctgctaatattttcagtttgcagacatatgatttttgatagttgcataggatgtcaggaaaagaaccttacctagcaatgcagtatagtatgtgctactggatacttttatatatctttctgctttgacagccaccctatacatggtacatttagatgaaatgggaaccagatcctaaatttttcaaatgtcattgccaatttatgtgtataattccatcacttcctgatgagtaagtctatttttgttctatatacatcataagttagtatatattcttatttacagaaacatgctcaaatcacattcagaaagaacaaaaagtcatgggaaattttttattttacaacaaagccctgctttctttctggacgtattttacatcattagagagactatctgcacatacatctaccataatctttttccttctttgccaactgttcagtgcacatgtgctgcatcagaaatggcacctggatgacagaagctcaaagagtcacatatgtctctaaaatagagttcttttcctcttgggctgtctgaactggtgtaaatagaagctcagttgatcttggttttaattaacttattactctattaatataaccttggaattctattctaattatgttgttctggctgcttgtagtatcagttcgcccctcttgttagggagatatgtaacaatctgtcatttaattgagcagtctttttcacataacagtaatagcaaaaatcctacctactcagaatcatcttcttaggttgtctcctaaatctgaacaatacagttgttttataaaattacattttgtctcttgagatttaatcaattagaactctttagggagaaaataaataatagaagaaaatatatgcctcatatttcatatgtaattatctgttgatataatttttcaatgtattttgtatttgtgggagcataatgacctgtacattcaatatttttactggtaattcaatttttaaatatgtttttacaatgcttgaacacataaaccttagaaaactggaaaatacgtgtccacagaaagagttattagctactaccttatgtaaagatgcatagaaaatgaaattgttggaaacatgtgcacaaagtgttttatattatatacattgtatttatgaagaataaataaaatattaagattgttttcctgctagccaagagaagaaatccttgggaaatatctaaggagtatatggggctttataagcactgtttctaaaagatattctctggtacttttgcaaaaagtcgactgtgactgtgtagcattatgttctgtagaatttttttcaagtagcataatttatttcattggtgtgaaaacagccaaaggttccaatatcctcacaaatcatttatgccaaacatctgagggcaaaatttagccggtgttatttactagattcttccctttgaactcacagactcaagagacagaccaagagttcttatatactcaccacagcggaccaatccaagtggcatttttaggaaaggttgcagcatttaatgccatgtggtatgtctgttcgtcaagtgggtggcaagggaatatccaagctggcattttggatatgatgggccttttactttcctgagtgacatgccacatgtcaagaaatactgctccccacccccccactcccatcacatttacgtgaacaattttcatttagttatttcccgttccatatggtgttaaaacagtcgtattaaataaagattatttctagttttcagtggtaatttaaatgagaggatatgtaataattgcttattagatacttatccaaatgaaatataacagagtttacagtacttaaaatggctggttatggtcttggaaatgtttgaaaattcattatcctgaaaaaaactttaccattctgttttacccttgaggtattttttggggaaaaatgtttttgataactattaatctaaatatagtataattataggcaaatttcactgcctagttttattgatatcctgagtctacagctagtccattcgtatgactgattgatttatgatagctccagagaaccataaatttcaaaggctaaactctctgattttagtaaatagtaggtaaagtgacacaatatatgtttacacaacactgttttcatgaaatgcaaactttgcaaaactcacattaactgggaagcagccaaccctctgtagagaaatcccagattgggagtctggtttgaatctttgaagacagaaaggtgatatccggcctgctgttttaaagggaccacacttttgaatacctactggtgtttggcagaaatctgagactggcaccagacacaaattttagacatgggtatcttccctccagtaattcactgctcagagtaatttagaagacaaaaacagaaaaaattgtaatgattttttaagtgttagaatatgtttgttaacatactctgcaaaataaatttcaactaatgcaatagacttaaaatatagcctatggaatactgtgattgaagtttgaaggcttgctggttcttattttgcatgcaagtttagacagggtaaagaatgtataaatttatttgagatgagatacagtattgtaaaaatataacctcatctagaattgcttttaaaacaagcaaaagcctattttagtacaaatgtagggtgggtagttgttttaaggtagcaaaatacttcaagattttctatctttttaatttttcatgaagacagaagaaatactttcaccccaaccaatgactgtaagatcttgagagtatgttcttactcatttctgtaattgcagtagtgtagtcatctgcatataaatttaataaatgcatgttaaaatttaagttgatgccttttagtcctctcagagtctgtcacagtttctttgtgtaaatgataaaaaagtttgaatttaatcaataaaacttaaaaatcacaatatcaatcaaaaa

SEQ ID NO: 377935 - DNA, 2517 bp, Homo sapiens
atttgggatagatttctcaatctatatgtctctaaaatagagttcttttcctcttgggctgtctgaactggtgtaaatagaagctcagttgatcttggttttaattaacttattactctattaatataaccttggaattctattctaattatgttgttctggctgcttgtagtatcagttcgcccctcttgttagggagatatgtaacaatctgtcatttaattgagcagtctttttcacataacagtaatagcaaaaatcctacctactcagaatcatcttcttaggttgtctcctaaatctgaacaatacagttgttttataaaattacattttgtctcttgagatttaatcaattagaactctttagggagaaaataaataatagaagaaaatatatgcctcatatttcatatgtaattatctgttgatataatttttcaatgtattttgtatttgtgggagcataatgacctgtacattcaatatttttactggtaattcaatttttaaatatgtttttacaatgcttgaacacataaaccttagaaaactggaaaatacgtgtccacagaaagagttattagctactaccttatgtaaagatgcatagaaaatgaaattgttggaaacatgtgcacaaagtgttttatattatatacattgtatttatgaagaataaataaaatattaagattgttttcctgctagccaagagaagaaatccttgggaaatatctaaggagtatatggggctttataagcactgtttctaaaagatattctctggtacttttgcaaaaagtcgactgtgactgtgtagcattatgttctgtagaatttttttcaagtagcataatttatttcattggtgtgaaaacagccaaaggttccaatatcctcacaaatcatttatgccaaacatctgagggcaaaatttagccggtgttatttactagattcttccctttgaactcacagactcaagagacagaccaagagttcttatatactcaccacagcggaccaatccaagtggcatttttaggaaaggttgcagcatttaatgccatgtggtatgtctgttcgtcaagtgggtggcaagggaatatccaagctggcattttggatatgatgggccttttactttcctgagtgacatgccacatgtcaagaaatactgctccccacccccccactcccatcacatttacgtgaacaattttcatttagttatttcccgttccatatggtgttaaaacagtcgtattaaataaagattatttctagttttcagtggtaatttaaatgagaggatatgtaataattgcttattagatacttatccaaatgaaatataacagagtttacagtacttaaaatggctggttatggtcttggaaatgtttgaaaattcattatcctgaaaaaaactttaccattctgttttacccttgaggtattttttggggaaaaatgtttttgataactattaatctaaatatagtataattataggcaaatttcactgcctagttttattgatatcctgagtctacagctagtccattcgtatgactgattgatttatgatagctccagagaaccataaatttcaaaggctaaactctctgattttagtaaatagtaggtaaagtgacacaatatatgtttacacaacactgttttcatgaaatgcaaactttgcaaaactcacattaactgggaagcagccaaccctctgtagagaaatcccagattgggagtctggtttgaatctttgaagacagaaaggtgatatccggcctgctgttttaaagggaccacacttttgaatacctactggtgtttggcagaaatctgagactggcaccagacacaaattttagacatgggtatcttccctccagtaattcactgctcagagtaatttagaagacaaaaacagaaaaaattgtaatgattttttaagtgttagaatatgtttgttaacatactctgcaaaataaatttcaactaatgcaatagacttaaaatatagcctatggaatactgtgattgaagtttgaaggcttgctggttcttattttgcatgcaagtttagacagggtaaagaatgtataaatttatttgagatgagatacagtattgtaaaaatataacctcatctagaattgcttttaaaacaagcaaaagcctattttagtacaaatgtagggtgggtagttgttttaaggtagcaaaatacttcaagattttctatctttttaatttttcatgaagacagaagaaatactttcaccccaaccaatgactgtaagatcttgagagtatgttcttactcatttctgtaattgcagtagtgtagtcatctgcatataaatttaataaatgcatgttaaaatttaagttgatgccttttagtcctctcagagtctgtcacagtttctttgtgtaaatgataaaaaagtttgaatttaatcaataaaacttaaaaatcacaatatcaatcaaaaa

SEQ ID NO: 377936 - DNA, 873 bp, Homo sapiens
aaagaggcagggacaccaggctatgtgacacacaccagcggtcccatgacaggcaagacacagaaaacctcacattaactgggaagcagccaaccctctgtagagaaatcccagattgggagtctggtttgaatctttgaagacagaaaggtgatatccggcctgctgttttaaagggaccacacttttgaatacctactggtgtttggcagaaatctgagactggcaccagacacaaattttagacatgggtatcttccctccagtaattcactgctcagagtaatttagaagacaaaaacagaaaaaattgtaatgattttttaagtgttagaatatgtttgttaacatactctgcaaaataaatttcaactaatgcaatagacttaaaatatagcctatggaatactgtgattgaagtttgaaggcttgctggttcttattttgcatgcaagtttagacagggtaaagaatgtataaatttatttgagatgagatacagtattgtaaaaatataacctcatctagaattgcttttaaaacaagcaaaagcctattttagtacaaatgtagggtgggtagttgttttaaggtagcaaaatacttcaagattttctatctttttaatttttcatgaagacagaagaaatactttcaccccaaccaatgactgtaagatcttgagagtatgttcttactcatttctgtaattgcagtagtgtagtcatctgcatataaatttaataaatgcatgttaaaatttaagttgatgccttttagtcctctcagagtctgtcacagtttctttgtgtaaatgataaaaaagtttgaatttaatcaataaaacttaaaaatcacaatatcaatcaaaaa

SEQ ID NO: 377937 - DNA, 415 bp, Homo sapiens
agcccctcaggctaggtgttttacaagcacgtgtttaagcactggccttagtcgccctgaagggtggagtgaaaagatggtttgactatggaaataaaagccaccttgttctcaggtttttatagcctgctgaccttgtcctcaggatcttagagtctgtattagagtctgtagaccttatagttaactaatttaggaagctaagcaaacaccaagcaatataccttatcaagaaggcagactcataggcatgtagttccatacagaactagaagtagaggatgaaggggcaaaggtggaggtaagtcagggataatgttgcctttatctgcctatctatatgattcttcctaatttttaaaaagttgacttatttaaaataaactgtggatcttgctttcttgctttgactgga

SEQ ID NO: 377938 - DNA, 315 bp, Homo sapiens
attatacctttaaattctagggtacacatgtatacatatgtaactaacctgcacaatgtgcacatgtaccctaaaacttaaagtataataataataaaaataataatcatagaaaaataaaataaaattacaaaaaaaataaaaaatatagtaaatttaaaagagaaaaagatgaggtaaaggtaaatgtacagaatttaattactttttcttctataaaacccgagtcagtaccaagaagagtcaatttattagttttctaaaataaaaaaaaatcaaaatcaccaaaaaagagcaatatccaagaaaacattg

SEQ ID NO: 377939 - DNA, 463 bp, Homo sapiens
ttcttagtttattagcctataaatggccaagaaaacttaaggttcaataattagttataaatatgaaatatccccaatttttaagataaaaacaacttataaatgtatttgtctgtaaaaattgtgtatatttttacagaacatctatttatttttttatttttttattttttttatgtatacatatgtaactaacctgcacaatgtgcacatgtaccctaaaacttaaagtataataataataaaaataataatcatagaaaaataaaataaaattacaaaaaaaataaaaaatatagtaaatttaaaagagaaaaagatgaggtaaaggtaaatgtacagaatttaattactttttcttctataaaacccgagtcagtaccaagaagagtcaatttattagttttctaaaataaaaaaaaatcaaaatcaccaaaaaagagcaatatccaagaaaacattg

SEQ ID NO: 377940 - DNA, 283 bp, Homo sapiens
tgaatggaaagtgcaggtatgagcaaagacaccatggtggaggagggggtgaagcctgaaagtcctggttgttctctcagtgaggagacttgtagcctggggcaagttctcagccctgctcactggttgcctggatataaactcgatgctgttgggggagcatggtgggcatgagattggtctgtttagctgcatgggagaggggtgaggcctgtcactgctggctttcccccacttccctggtgacctaatatccggaatctacaagaaactcaaattagca

SEQ ID NO: 377941 - DNA, 1115 bp, Homo sapiens
tttttttttgctgtgatagactatccagcaccaagcagtacatggtagaaatctctatcaaacacatgcaggcaaatcactgttagtatagtacagccagatacagtatctattttaggggtggccttaattacatttttcccaaaaaatattttccaagatctaccctggggcactagctgcccttttctatcctagccacagcagtgaactctcctggctcctaagagctgatccagtagtgagactgggaagtgagaaactggtaggggggcccctttggtgtcacttgcagcaattcagaagatgacaactcatcatgggagacctcccgattcctaaactgctggactccacttggtgaataaccatggcagaggacaaacacacactgtgtcctggagaccacagtcttttgtttcttactcagtgttcacgtgggccacagaaagccggtctcctcatgagaaacagatacacaggacaaactacacaagttttccagaagaaaaagaacagagcttgttttaagaaatttgtacttttcatttcattacttaggaattacaagagactttgcagaagggtaaaaatggggagcgacatccctctgatagaaatgagatgcaaagaccacgtgagttacctgcccggtcccagtaaggagaaatcaacatctcatggaagaagtttcagtgtacactcctgcctttagtccaacatacaaaccattacaagaggatgcaatttatccctgttttcttttttaaagtatgaaagagagaattcacaaacactaaatctttctaaaggtataacatggtaaaggaatgaaagggtctgcataaaataatctagaaaaaacaagaggggaaggtgtggacatctatacccgggtattgtgggcacatttgagtggccccattgcattggccctggtagtggtatgggcgccgagagttaacagaataaccggacgctataacgttaaaccacaaacacgagaatacacgcctgaggcgacattttgtggcgcctgtaaagacctaaaatatatttactcacgctggaatctttacaagaacaaatttgggtagaacccctggtggtataca

SEQ ID NO: 377942 - DNA, 276 bp, Homo sapiens
aaaaaaaaaaaaaaaaagaagggaaggtagttgaatctataccagggatgggcaaatgactgcccatgcatggcctgttttgtatgggccgtgagttaagaataaagagctataaataaaacaaaaaaagaataagctgcagcgacatgtggcctgtaaagcctaaaatatttattagctggatctttacagaacaaatctgctgaatcctgttgtataccaatctggatatggatgatgcttgtgtcttctgaatgaaaattggcctaggacctc

SEQ ID NO: 377943 - DNA, 476 bp, Homo sapiens
cctcctccccttaggttcttaaccctcggaagaaatgtaagaagaagaaatatgtcaactcaggaactgtgacgctgctctccttctctgtggactctgaattcacttttgttgattacatcaagggagggacacagctgaacttcacagtagccattgacttcacggcttccaatgggaatcctctgcagcctacctccctgcactacatgagtccctaccagctcagcgcctatgccatggccctcaaggcagtgggagagatcatccaggactatgacagtgataagctcttcccagcttatggctttggggccaagctgcccccagagggacggatctcccaccagttccccctgaacaacaatgatgaggaccccaactgtgcgggcatcgagggtgtgctggagagctatttccagagcctgcgcacagtgcagctctatgggcccacctactttgctcctgtcatcaac

SEQ ID NO: 377944 - DNA, 395 bp, Homo sapiens
tatagtagctgcactacgataatatttcggaccacccggatggtgattttcctgttctttaactggctctgggaccttggtcaagttctttaacgttggagactctggtttcgcgtgtgtaaaatggtcacaggaatggtatttatctcccttgagattgttgaggggattgcatggaagacttgtaaaaatatgcatgctaaaaacatgttgttcagtaaatacctgctactgttattgttactttattattaagttattcggttgactctaccaatgacttatacttcctgtcaacttttattatagcagtaatgaagcattgcactgattcagattttgtgaaacctcacatttaggctgcactccaccagcccaagaaaggggcttactga

SEQ ID NO: 377945 - DNA, 719 bp, Homo sapiens
agcaagactccatctcaaaaaaaaaaaaaaaaaaaaaagagtaatgaactcagccagcatggtggcacctgtctgtagtcccagctactcaggaggctgaggcaggaggattgcttgagcccagcagttcgaggttacagtgagcattgatcacaccactgcactccagcctggacaacagagtgagaccccatctctttgggaaaataaagagaaagagggtagtaaactcaacatttgacttagcttttgctgttaggtatttttcaaattcagaaggagaaattcagtagagagctattaccaaagacttaaaaacttaagcacagtttttgttcttacaggagtaggtagacaaaaaaattagatttcaaggccagccaaatgggaatgacaaagggaaatattcgaggccttcggttgagacctcaaaagaattatgtcctacaaataaaggttgaccagaagttatcagctttaaatctaacttcaaaactttgattgaatgaggtgatcagcccttattctagttacctgccagaagaaacttagcctctatactatttgaaacatagtatcctgcattccatcaaaataccaggcatgaccaggcacagtggctcatacctgtaatcctagcactttgggaaaccaaggtgggaggattactggaggccaagagttcaagaccaacctggccaacatagtgagaccctgtc

SEQ ID NO: 377946 - DNA, 416 bp, Homo sapiens
  misc_feature (302)..(302): n is a, c, g, or t
  misc_feature (371)..(371): n is a, c, g, or t
  misc_feature (395)..(395): n is a, c, g, or t
ctgaaatgcccttagctcgggtagcctcagggttcacttcctcacccctttctggtgtttctatgtccccttctcagtgaggctgtccctaatcacactctatgaagtttgtacccttccccttcagtattatctacctcttccttgctttattttcaatggcatttaccatcatctgccatactatagatatcactggttgcttggtttctgtctcccatacactagaaggtcagttccacagggtaggaggttttgctcttattcacttgctggcataaccccagggcttagccagggtnctcttacaagagggggtagccgaaggttttatgggttgggataaaagggaagggggatggagggagggnttctttttgcaggggacgtgaggntttttgaatgggcagaaacct

SEQ ID NO: 377947 - DNA, 922 bp, Homo sapiens
ctgaaatgcccttagctcgggtagcctcagggttcacttcctcacccctttctggtgtttctatgtccccttctcagtgaggctgtccctaatcacactctatgaagtttgtacccttccccttcagtattatctacctcttccttgctttattttcaatggcatttaccatcatctgccatactatagatatcactggttgcttggtttctgtctcccatacactagaaggtcagttccatgaggtcagggatttttgcctgccttgtttactgctatatcccagccgctagaacaatccctagtacacagtagacactcaataagtacttactgagtgaatgaaggtccactcctctgtttggaccaagacctgctcagctatttagtcagctgctttgaccagaaaaaaacagtggatccagagacagagttggtcatgtcaaaggcacagctgccctgactgccaagaacttgtggttgtcttgaatccacaatcttttctctggcattgggttccccaacctgatcaattgagttgggagcaatggattcaagtcaacagtcattcttacactggacagaactcgagctgagccgggcactgtaatggggctggttagaaagataagtttggtgactgggcacggtggcgcactcctgtaatcacagcactttgagaggctgaggcaggtagatcccttgaggccaggagtctgagaccagcctggccaacatggcgaaaccctgtctctaccaaaaatacaaaaagttagccagttgtggtggcacacacttataatcccagctacttggaagtctgaggcaggagaatcgcttgaacctgggaggcggaggttgcagtgagccaagatcacgtcattgtcctccagcctgggtgacagagcgagactccatctca

SEQ ID NO: 377948 - DNA, 138 bp, Homo sapiens
acaacctggcctggcctctcccatccctgttccaggcatgctttcttgtgtggatcactcactcccaccctcagaggggccaggcatttccacacctctccacttttgtctcaaataaaaatattctggaattagata

SEQ ID NO: 377949 - DNA, 685 bp, Homo sapiens
acaatttgaaaaaacacaaactgcgttgcctagaaatatttttaaacattttaaaaggtatgaatgcataaaatatatgtatatactagtctattttatcatttgctactacaaaatatgcacaaatctattataaaaagctaaattttctcaaaatttacacacatatacagtacatggtgccattcacagtccagagaaatgtaaacaaatgtaaagatgcaaggttaaatcatagccacataaaaccaactggagtacgtactgtactgcaatcattttgtagctgcctcctactgctgcggcagtgcgcgcagatgttgtgaatatccactcaaaacgctatgtgatgctaatcatctctgcatgagcagttcaactctccagtaaatttcatgtggcagaaaaaagtactctctcgagattcttaagtatttttcatcatgtttagtgcaccataaacctcatataataccatgggacccatatgaagtgccactagtgatgctggaagtgttctcaagaagtagaagtcatgacattacaagaaaaagctgaattgcttgatatgtatcaaagattgaggtctgtggctgtggatgcccctcatttcagtcccaggattctttctgtaaacagacaatgtaaacttaacggaatcaataaatacagtaatgtaaatgta

SEQ ID NO: 377950 - DNA, 4047 bp, Homo sapiens
ggactctatggttcggcggctctaagcgctcagctccgcggtcgtcctccaggtctgtgccgcctccttccggtctcggtggcgcggcacgcgcggctctctaggcctccttcagctctgtggtgacggtggccgaggtggagggccggtctgaagagtggcgggactggcttcacttcctccgcggttcctcggagccgcctcgctcctcttcagggactttgctgagaagggctctcgggcgtccagaccccaccgcaaaggtgtttggcgatccgccgagaagttgttggccccaggagcatccctcggggccgaatgcgcagtggacgatgccccttctgacccaacagatccaagacgaggatgatcagtacagccttgtggccagccttgacaacgttaggaatctctccactatcttgaaagctattcatttccgagaacatgccacgtgtttcgcaactaaaaatggtatcaaagtaacagtggaaaatgcaaagtgtgtgcaagcaaatgcttttattcaggctggaatatttcaggagtttaaagttcaggaagagtctgttacttttcgaattaatttaactgtccttttagactgtttatctatttttggatcaagtcctatgccagggactttaactgcacttcgaatgtgttaccaaggttatggttaccctttgatgctgttcctggaagaaggaggagtggtgacagtctgcaaaatcaatacacaggaacctgaggagaccctggactttgatttctgcagcaccaatgttattaataaaattattctgcagtcagaggggctccgtgaagcattttctgaattggatatgacgagtgaagtcctacaaattaccatgtctcctgacaagccttatttcaggttatctacttttggaaatgcaggaagttcccaccttgactatcccaaagattctgatttgatggaagcatttcattgtaatcagacccaagtcaacagatacaagatttccttactgaaaccctctacaaaggcattagtcctatcttgtaaggtatctattcggacagataacagaggcttcctttcattacagtatatgattagaaatgaagatggacaaatatgttttgtggaatattactgctgccctgatgaagaagttcctgaatctgagtcttgagtatgacaattcactgatatttatgtgtacatttatgatagatgaagttcttattctgagtacagtactctttgtcatttcatattggattttctatagagaagaagcacaatggggaagataggagcaaggtcatgtaccctaatagttactatgttttgtaaatccattttgtagagggcatgtaaataaatgttttcctgtagtcatagattattcaggactgtcctttagttctgtcttttgaactcatgggaataattgtgagtcagcgtaacatttcaagagtctaaaggtggccgggtgtggtggctttaatcccagcactttgggaagccgaggtgggcggatcacctgaggtcaggagttcgagaccagcctgaccaacgtggagaaaccccatctctactaaaaatacaaaaaattagccggacgtggtggcacatgcctgtaatgccagctactcgggaggctgaggcaggagaattgcttgaacccgggaggcggaggttgtggtgagctgagatgacgccattgcactccagcctaggcaataagagcaaaactctgcctcaaaaaaaaaaaaaaaaaaaaagtctaaaggcttaaagtttgatgcagctacctgaaatgatcttttatttatttattattagaaaaagcaaaggcatatgggcattgcttattagtttgaattctagagactagatcttaaagtagtggttctcaaagtgttgtgcccgcaccaacatcagaatggcctgcaaacttgtagcaaactctggggaggaggccagcattctgtattttaacaagcttccctcaggagattctgatgcctgctaaattttgggaaccactgttttaaaggaaactttttttttctttaatagcatttaattgtatgagatgattgcttttacatgtgatttccttgcaaatgttctgaagttgaggcatcaccaaacaagtctgaacaattctttatgtgatttatttttaaagtagaccttttgaagagatctatgaatgggatataaagcaattttcagtgttacaggttttcttcttcttctcaaaactgtttgctgtaagtaactgcaatcagtacttactactttccatttgcttatgagtttcttgacaaatcaaggtgtagaaaaccagttattaagtgattttgtactttcctggtagttgtcactaaaataatttttgtggcatataaatatatttaataaaatgcaaaaattatcttcctgtctagtagaaaaaattacatgagtaaagtgaagcttctgtctttgttactgtaccaggtgacaacagctgagtgtccctccatggacagtcactattggccttttgagtgagacagttctttaggataaaaacctgtcatcccattgcaggattcatttagcctttctggcccttacccactgatgctagtcattgtgaccaccccacctcccccaaataaaagtgtgccaaactattcattgttgagaaccattcaattgtattcaccaaaattggaggatatattggaatgccctaccttaatataggtcacatagcattagagaaaattggtttggagagtattacagcaaagtgtgctgcaaggaggctactccagcacaatggcaggcactgcttcccaggcatatggacaattctgggaggtggccagggtcagcacctgataactagtaagtgtctcaatctcagcatacaaaatttagcagtgactacaaaagaagttggaattttctaaaatgtttgtattcaagaaggaaacaaatgaatttactaaatgttgtcagagtattttttgtttagataaccaccaagaacagaacaaacctaaaagatacttgggaaaatatctaatcagtcaacattctaaggactgttaaatgtgaaatagcatagttattttttgtcttttgttactagtgtgaacaaagaacggcgcctaacatataatgggcatttagtaactctgttagatgaaagactctccaatttcagattttcttttagcatcttattagtcactacttaattctgatgatttagctctaaatttattttgatctcagtttttttatttttatttttgggtgacagagcaagactccgtctcaaaaacaaaaaaaattaaaataaaaattattgttttagctgcatgtcttcagctatttagaattcaaagactaatgaattgtttctaagtcaccctaacatcaaggtacttattttataaagaatttcctccttatttgtgttctaattgacccaggaatttttactttaataaaagtttaactttatttcctatggaaaatcactagggggagtgctccctcaggcagagcaggcgacactttggtgccactacaaattgatgtgtagtatatagaagaatacagtcttatatttaaagacttttagttctgtctttttgaagtttatctctctttctagtaaaatggtgcttactgtgaatggataatcttttttttcatttttcatttgttgatttcccattcgatgatgtagtgcttccaccgagaattgatgaaatgcttcaaaataataaaagtatttgttaaattccactttaataaaaataaggcatgtaacacagtcattttaacaggaagccacagggtttctgtggtgttaccaaagtcctagtaaaaattaattaaaattgctaaaagggcagaatgtggcactctcaacagtggggtaggcagtccttcagaacatagagacttccttctttccttccctgtcttcacattgcttgtcccttatccccacctgaaataaaatctattgggtcctgaaaaat

SEQ ID NO: 377951 - DNA, 4043 bp, Homo sapiens
aggaaccgcggaggaagtgaaggccggctgaagtgctcacggctcactgcagtttcaagttcctgggctcaaagatgggagtctccctatgttgcccaggctggtctccaacacctgggctcaagtggcttggcctcccaaagcgctgggattataggtctgtgccgcctccttccggtctcggtggcgcggcacgcgcggctctctaggcctccttcagctctgtggtgacggtggccgaggtggagggccggtctgaagagtggcgggactggcttcacttcctccgcggttcctcggagccgcctcgctcctcttcagggactttgctgagaagggctctcgggcgtccagaccccaccgcaaaggtgtttggcgatccgccgagaagttgttggccccaggagcatccctcggggccgaatgcgcagtggacgatgccccttctgacccaacagatccaagacgaggatgatcagtacagccttgtggccagccttgacaacgttaggaatctctccactatcttgaaagctattcatttccgagaacatgccacgtgtttcgcaactaaaaatggtatcaaagtaacagtggaaaatgcaaagtgtgtgcaagcaaatgcttttattcagggactttaactgcacttcgaatgtgttaccaaggttatggttaccctttgatgctgttcctggaagaaggaggagtggtgacagtctgcaaaatcaatacacaggaacctgaggagaccctggactttgatttctgcagcaccaatgttattaataaaattattctgcagtcagaggggctccgtgaagcattttctgaattggatatgacgagtgaagtcctacaaattaccatgtctcctgacaagccttatttcaggttatctacttttggaaatgcaggaagttcccaccttgactatcccaaagattctgatttgatggaagcatttcattgtaatcagacccaagtcaacagatacaagatttccttactgaaaccctctacaaaggcattagtcctatcttgtaaggtatctattcggacagataacagaggcttcctttcattacagtatatgattagaaatgaagatggacaaatatgttttgtggaatattactgctgccctgatgaagaagttcctgaatctgagtcttgagtatgacaattcactgatatttatgtgtacatttatgatagatgaagttcttattctgagtacagtactctttgtcatttcatattggattttctatagagaagaagcacaatggggaagataggagcaaggtcatgtaccctaatagttactatgttttgtaaatccattttgtagagggcatgtaaataaatgttttcctgtagtcatagattattcaggactgtcctttagttctgtcttttgaactcatgggaataattgtgagtcagcgtaacatttcaagagtctaaaggtggccgggtgtggtggctttaatcccagcactttgggaagccgaggtgggcggatcacctgaggtcaggagttcgagaccagcctgaccaacgtggagaaaccccatctctactaaaaatacaaaaaattagccggacgtggtggcacatgcctgtaatgccagctactcgggaggctgaggcaggagaattgcttgaacccgggaggcggaggttgtggtgagctgagatgacgccattgcactccagcctaggcaataagagcaaaactctgcctcaaaaaaaaaaaaaaaaaaaaagtctaaaggcttaaagtttgatgcagctacctgaaatgatcttttatttatttattattagaaaaagcaaaggcatatgggcattgcttattagtttgaattctagagactagatcttaaagtagtggttctcaaagtgttgtgcccgcaccaacatcagaatggcctgcaaacttgtagcaaactctggggaggaggccagcattctgtattttaacaagcttccctcaggagattctgatgcctgctaaattttgggaaccactgttttaaaggaaactttttttttctttaatagcatttaattgtatgagatgattgcttttacatgtgatttccttgcaaatgttctgaagttgaggcatcaccaaacaagtctgaacaattctttatgtgatttatttttaaagtagaccttttgaagagatctatgaatgggatataaagcaattttcagtgttacaggttttcttcttcttctcaaaactgtttgctgtaagtaactgcaatcagtacttactactttccatttgcttatgagtttcttgacaaatcaaggtgtagaaaaccagttattaagtgattttgtactttcctggtagttgtcactaaaataatttttgtggcatataaatatatttaataaaatgcaaaaattatcttcctgtctagtagaaaaaattacatgagtaaagtgaagcttctgtctttgttactgtaccaggtgacaacagctgagtgtccctccatggacagtcactattggccttttgagtgagacagttctttaggataaaaacctgtcatcccattgcaggattcatttagcctttctggcccttacccactgatgctagtcattgtgaccaccccacctcccccaaataaaagtgtgccaaactattcattgttgagaaccattcaattgtattcaccaaaattggaggatatattggaatgccctaccttaatataggtcacatagcattagagaaaattggtttggagagtattacagcaaagtgtgctgcaaggaggctactccagcacaatggcaggcactgcttcccaggcatatggacaattctgggaggtggccagggtcagcacctgataactagtaagtgtctcaatctcagcatacaaaatttagcagtgactacaaaagaagttggaattttctaaaatgtttgtattcaagaaggaaacaaatgaatttactaaatgttgtcagagtattttttgtttagataaccaccaagaacagaacaaacctaaaagatacttgggaaaatatctaatcagtcaacattctaaggactgttaaatgtgaaatagcatagttattttttgtcttttgttactagtgtgaacaaagaacggcgcctaacatataatgggcatttagtaactctgttagatgaaagactctccaatttcagattttcttttagcatcttattagtcactacttaattctgatgatttagctctaaatttattttgatctcagtttttttatttttatttttgggtgacagagcaagactccgtctcaaaaacaaaaaaaattaaaataaaaattattgttttagctgcatgtcttcagctatttagaattcaaagactaatgaattgtttctaagtcaccctaacatcaaggtacttattttataaagaatttcctccttatttgtgttctaattgacccaggaatttttactttaataaaagtttaactttatttcctatggaaaatcactagggggagtgctccctcaggcagagcaggcgacactttggtgccactacaaattgatgtgtagtatatagaagaatacagtcttatatttaaagacttttagttctgtctttttgaagtttatctctctttctagtaaaatggtgcttactgtgaatggataatcttttttttcatttttcatttgttgatttcccattcgatgatgtagtgcttccaccgagaattgatgaaatgcttcaaaataataaaagtatttgttaaattccactttaataaaaataaggcatgtaacacagtcattttaacaggaagccacagggtttctgtggtgttaccaaagtcctagtaaaaattaattaaaattgctaaaagggcagaatgtggcactctcaacagtggggtaggcagtccttcagaacatagagacttccttctttccttccctgtcttcacattgcttgtcccttatccccacctgaaataaaatctattgggtcctgaaaaat

SEQ ID NO: 377952 - DNA, 1392 bp, Homo sapiens
aggaaccgcggaggaagtgaaggccggctgaagtgctcacggctcactgcagtttcaagttcctgggctcaaagatgggagtctccctatgttgcccaggctggtctccaacacctgggctcaagtggcttggcctcccaaagcgctgggattataggtctgtgccgcctccttccggtctcggtggcgcggcacgcgcggctctctaggcctccttcagctctgtggtgacggtggccgaggtggagggccggtctgaagagtggcgggactggcttcacttcctccgcggttcctcggagccgcctcgctcctcttcagggactttgctgagaagggctctcgggcgtccagaccccaccgcaaaggtgtttggcgatccgccgagaagttgttggccccaggagcatccctcggggccgaatgcgcagtggacgatgccccttctgacccaacagatccaagacgaggatgatcagtacagccttgtggccagccttgacaacgttaggaatctctccactatcttgaaagctattcatttccgagaacatgccacgtgtttcgcaactaaaaatggtatcaaagtaacagtggaaaatgcaaagtgtgtgcaagcaaatgcttttattcagggactttaactgcacttcgaatgtgttaccaaggttatggttaccctttgatgctgttcctggaagaaggaggagtggtgacagtctgcaaaatcaatacacaggaacctgaggagaccctggactttgatttctgcagcaccaatgttattaataaaattattctgcagtcagaggggctccgtgaagcattttctgaattggatatgacgagtgaagtcctacaaattaccatgtctcctgacaagccttatttcaggttatctacttttggaaatgcaggaagttcccaccttgactatcccaaagattctgatttgatggaagcatttcattgtaatcagacccaagtcaacagatacaagatttccttactgaaaccctctacaaaggcattagtcctatcttgtaaggtatctattcggacagataacagaggcttcctttcattacagtatatgattagaaatgaagatggacaaatatgttttgtggaatattactgctgccctgatgaagaagttcctgaatctgagtcttgagtatgacaattcactgatatttatgtgtacatttatgatagatgaagttcttattctgagtacagtactctttgtcatttcatattggattttctatagagaagaagcacaatggggaagataggagcaaggtcatgtaccctaatagttactatgttttgtaaatccattttgtagagggcatgtaaataaatgttttcctgtagtcatagatt

SEQ ID NO: 377953 - DNA, 4252 bp, Homo sapiens
aggaaccgcggaggaagtgaaggccggctgaagtgctcacggctcactgcagtttcaagttcctgggctcaaagatgggagtctccctatgttgcccaggctggtctccaacacctgggctcaagtggcttggcctcccaaagcgctgggattataggtctgtgccgcctccttccggtctcggtggcgcggcacgcgcggctctctaggcctccttcagctctgtggtgacggtggccgaggtggagggccggtctgaagagtggcgggactggcttcacttcctccgcggttcctcggagccgcctcgctcctcttcagggactttgctgagaagggctctcgggcgtccagaccccaccgcaaaggtgtttggcgatccgccgagaagttgttggccccaggagcatccctcggggccgaatgcgcagtggacgatgccccttctgacccaacagatccaagacgaggatgatcagtacagccttgtggccagccttgacaacgttaggaatctctccactatcttgaaagctattcatttccgagaacatgccacgtgtttcgcaactaaaaatggtatcaaagtaacagtggaaaatgcaaagtgtgtgcaagcaaatgcttttattcaggggcatggtatggtggctcacacctgtatttccagctgctcaggagaccgaggctgaagcacgaagatcgcttgagctcaggcattaaagaccagcctgggctggaatatttcaggagtttaaagttcaggaagagtctgttacttttcgaattaatttaactgtccttttagactgtttatctatttttggatcaagtcctatgccagggactttaactgcacttcgaatgtgttaccaaggttatggttaccctttgatgctgttcctggaagaaggaggagtggtgacagtctgcaaaatcaatacacaggaacctgaggagaccctggactttgatttctgcagcaccaatgttattaataaaattattctgcagtcagaggggctccgtgaagcattttctgaattggatatgacgagtgaagtcctacaaattaccatgtctcctgacaagccttatttcaggttatctacttttggaaatgcaggaagttcccaccttgactatcccaaagattctgatttgatggaagcatttcattgtaatcagacccaagtcaacagatacaagatttccttactgaaaccctctacaaaggcattagtcctatcttgtaaggtatctattcggacagataacagaggcttcctttcattacagtatatgattagaaatgaagatggacaaatatgttttgtggaatattactgctgccctgatgaagaagttcctgaatctgagtcttgagtatgacaattcactgatatttatgtgtacatttatgatagatgaagttcttattctgagtacagtactctttgtcatttcatattggattttctatagagaagaagcacaatggggaagataggagcaaggtcatgtaccctaatagttactatgttttgtaaatccattttgtagagggcatgtaaataaatgttttcctgtagtcatagattattcaggactgtcctttagttctgtcttttgaactcatgggaataattgtgagtcagcgtaacatttcaagagtctaaaggtggccgggtgtggtggctttaatcccagcactttgggaagccgaggtgggcggatcacctgaggtcaggagttcgagaccagcctgaccaacgtggagaaaccccatctctactaaaaatacaaaaaattagccggacgtggtggcacatgcctgtaatgccagctactcgggaggctgaggcaggagaattgcttgaacccgggaggcggaggttgtggtgagctgagatgacgccattgcactccagcctaggcaataagagcaaaactctgcctcaaaaaaaaaaaaaaaaaaaaagtctaaaggcttaaagtttgatgcagctacctgaaatgatcttttatttatttattattagaaaaagcaaaggcatatgggcattgcttattagtttgaattctagagactagatcttaaagtagtggttctcaaagtgttgtgcccgcaccaacatcagaatggcctgcaaacttgtagcaaactctggggaggaggccagcattctgtattttaacaagcttccctcaggagattctgatgcctgctaaattttgggaaccactgttttaaaggaaactttttttttctttaatagcatttaattgtatgagatgattgcttttacatgtgatttccttgcaaatgttctgaagttgaggcatcaccaaacaagtctgaacaattctttatgtgatttatttttaaagtagaccttttgaagagatctatgaatgggatataaagcaattttcagtgttacaggttttcttcttcttctcaaaactgtttgctgtaagtaactgcaatcagtacttactactttccatttgcttatgagtttcttgacaaatcaaggtgtagaaaaccagttattaagtgattttgtactttcctggtagttgtcactaaaataatttttgtggcatataaatatatttaataaaatgcaaaaattatcttcctgtctagtagaaaaaattacatgagtaaagtgaagcttctgtctttgttactgtaccaggtgacaacagctgagtgtccctccatggacagtcactattggccttttgagtgagacagttctttaggataaaaacctgtcatcccattgcaggattcatttagcctttctggcccttacccactgatgctagtcattgtgaccaccccacctcccccaaataaaagtgtgccaaactattcattgttgagaaccattcaattgtattcaccaaaattggaggatatattggaatgccctaccttaatataggtcacatagcattagagaaaattggtttggagagtattacagcaaagtgtgctgcaaggaggctactccagcacaatggcaggcactgcttcccaggcatatggacaattctgggaggtggccagggtcagcacctgataactagtaagtgtctcaatctcagcatacaaaatttagcagtgactacaaaagaagttggaattttctaaaatgtttgtattcaagaaggaaacaaatgaatttactaaatgttgtcagagtattttttgtttagataaccaccaagaacagaacaaacctaaaagatacttgggaaaatatctaatcagtcaacattctaaggactgttaaatgtgaaatagcatagttattttttgtcttttgttactagtgtgaacaaagaacggcgcctaacatataatgggcatttagtaactctgttagatgaaagactctccaatttcagattttcttttagcatcttattagtcactacttaattctgatgatttagctctaaatttattttgatctcagtttttttatttttatttttgggtgacagagcaagactccgtctcaaaaacaaaaaaaattaaaataaaaattattgttttagctgcatgtcttcagctatttagaattcaaagactaatgaattgtttctaagtcaccctaacatcaaggtacttattttataaagaatttcctccttatttgtgttctaattgacccaggaatttttactttaataaaagtttaactttatttcctatggaaaatcactagggggagtgctccctcaggcagagcaggcgacactttggtgccactacaaattgatgtgtagtatatagaagaatacagtcttatatttaaagacttttagttctgtctttttgaagtttatctctctttctagtaaaatggtgcttactgtgaatggataatcttttttttcatttttcatttgttgatttcccattcgatgatgtagtgcttccaccgagaattgatgaaatgcttcaaaataataaaagtatttgttaaattccactttaataaaaataaggcatgtaacacagtcattttaacaggaagccacagggtttctgtggtgttaccaaagtcctagtaaaaattaattaaaattgctaaaagggcagaatgtggcactctcaacagtggggtaggcagtccttcagaacatagagacttccttctttccttccctgtcttcacattgcttgtcccttatccccacctgaaataaaatctattgggtcctgaaaaat

SEQ ID NO: 377954 - DNA, 3763 bp, Homo sapiens
aggaaccgcggaggaagtgaaggccggctgaagtgctcacggctcactgcagtttcaagttcctgggctcaaagatgggagtctccctatgttgcccaggctggtctccaacacctgggctcaagtggcttggcctcccaaagcgctgggattataggtctgtgccgcctccttccggtctcggtggcgcggcacgcgcggctctctaggcctccttcagctctgtggtgacggtggccgaggtggagggccggtctgaagagtggcgggactggcttcacttcctccgcggttcctcggagccgcctcgctcctcttcagggactttgctgagaagggctctcgggcgtccagaccccaccgcaaaggtgtttggcgatccgccgagaagttgttggccccaggagcatccctcggggccgaatgcgcatggtgacagtctgcaaaatcaatacacaggaacctgaggagaccctggactttgatttctgcagcaccaatgttattaataaaattattctgcagtcagaggggctccgtgaagcattttctgaattggatatgacgagtgaagtcctacaaattaccatgtctcctgacaagccttatttcaggttatctacttttggaaatgcaggaagttcccaccttgactatcccaaagattctgatttgatggaagcatttcattgtaatcagacccaagtcaacagatacaagatttccttactgaaaccctctacaaaggcattagtcctatcttgtaaggtatctattcggacagataacagaggcttcctttcattacagtatatgattagaaatgaagatggacaaatatgttttgtggaatattactgctgccctgatgaagaagttcctgaatctgagtcttgagtatgacaattcactgatatttatgtgtacatttatgatagatgaagttcttattctgagtacagtactctttgtcatttcatattggattttctatagagaagaagcacaatggggaagataggagcaaggtcatgtaccctaatagttactatgttttgtaaatccattttgtagagggcatgtaaataaatgttttcctgtagtcatagattattcaggactgtcctttagttctgtcttttgaactcatgggaataattgtgagtcagcgtaacatttcaagagtctaaaggtggccgggtgtggtggctttaatcccagcactttgggaagccgaggtgggcggatcacctgaggtcaggagttcgagaccagcctgaccaacgtggagaaaccccatctctactaaaaatacaaaaaattagccggacgtggtggcacatgcctgtaatgccagctactcgggaggctgaggcaggagaattgcttgaacccgggaggcggaggttgtggtgagctgagatgacgccattgcactccagcctaggcaataagagcaaaactctgcctcaaaaaaaaaaaaaaaaaaaaagtctaaaggcttaaagtttgatgcagctacctgaaatgatcttttatttatttattattagaaaaagcaaaggcatatgggcattgcttattagtttgaattctagagactagatcttaaagtagtggttctcaaagtgttgtgcccgcaccaacatcagaatggcctgcaaacttgtagcaaactctggggaggaggccagcattctgtattttaacaagcttccctcaggagattctgatgcctgctaaattttgggaaccactgttttaaaggaaactttttttttctttaatagcatttaattgtatgagatgattgcttttacatgtgatttccttgcaaatgttctgaagttgaggcatcaccaaacaagtctgaacaattctttatgtgatttatttttaaagtagaccttttgaagagatctatgaatgggatataaagcaattttcagtgttacaggttttcttcttcttctcaaaactgtttgctgtaagtaactgcaatcagtacttactactttccatttgcttatgagtttcttgacaaatcaaggtgtagaaaaccagttattaagtgattttgtactttcctggtagttgtcactaaaataatttttgtggcatataaatatatttaataaaatgcaaaaattatcttcctgtctagtagaaaaaattacatgagtaaagtgaagcttctgtctttgttactgtaccaggtgacaacagctgagtgtccctccatggacagtcactattggccttttgagtgagacagttctttaggataaaaacctgtcatcccattgcaggattcatttagcctttctggcccttacccactgatgctagtcattgtgaccaccccacctcccccaaataaaagtgtgccaaactattcattgttgagaaccattcaattgtattcaccaaaattggaggatatattggaatgccctaccttaatataggtcacatagcattagagaaaattggtttggagagtattacagcaaagtgtgctgcaaggaggctactccagcacaatggcaggcactgcttcccaggcatatggacaattctgggaggtggccagggtcagcacctgataactagtaagtgtctcaatctcagcatacaaaatttagcagtgactacaaaagaagttggaattttctaaaatgtttgtattcaagaaggaaacaaatgaatttactaaatgttgtcagagtattttttgtttagataaccaccaagaacagaacaaacctaaaagatacttgggaaaatatctaatcagtcaacattctaaggactgttaaatgtgaaatagcatagttattttttgtcttttgttactagtgtgaacaaagaacggcgcctaacatataatgggcatttagtaactctgttagatgaaagactctccaatttcagattttcttttagcatcttattagtcactacttaattctgatgatttagctctaaatttattttgatctcagtttttttatttttatttttgggtgacagagcaagactccgtctcaaaaacaaaaaaaattaaaataaaaattattgttttagctgcatgtcttcagctatttagaattcaaagactaatgaattgtttctaagtcaccctaacatcaaggtacttattttataaagaatttcctccttatttgtgttctaattgacccaggaatttttactttaataaaagtttaactttatttcctatggaaaatcactagggggagtgctccctcaggcagagcaggcgacactttggtgccactacaaattgatgtgtagtatatagaagaatacagtcttatatttaaagacttttagttctgtctttttgaagtttatctctctttctagtaaaatggtgcttactgtgaatggataatcttttttttcatttttcatttgttgatttcccattcgatgatgtagtgcttccaccgagaattgatgaaatgcttcaaaataataaaagtatttgttaaattccactttaataaaaataaggcatgtaacacagtcattttaacaggaagccacagggtttctgtggtgttaccaaagtcctagtaaaaattaattaaaattgctaaaagggcagaatgtggcactctcaacagtggggtaggcagtccttcagaacatagagacttccttctttccttccctgtcttcacattgcttgtcccttatccccacctgaaataaaatctattgggtcctgaaaaat

SEQ ID NO: 377955 - DNA, 3989 bp, Homo sapiens
aggaaccgcggaggaagtgaaggccggctgaagtgctcacggctcactgcagtttcaagttcctgggctcaaagatgggagtctccctatgttgcccaggctggtctccaacacctgggctcaagtggcttggcctcccaaagcgctgggattataggtctgtgccgcctccttccggtctcggtggcgcggcacgcgcggctctctaggcctccttcagctctgtggtgacggtggccgaggtggagggccggtctgaagagtggcgggactggcttcacttcctccgcggttcctcggagccgcctcgctcctcttcagggactttgctgagaagggctctcgggcgtccagaccccaccgcaaaggtgtttggcgatccgccgagaagttgttggccccaggagcatccctcggggccgaatgcgcagtggacgatgccccttctgacccaacagatccaagacgaggatgatcagtacagccttgtggccagccttgacaacgttaggaatctctccactatcttgaaagctattcatttccgagaacatgccacgtgtttcgcaactaaaaatggtatcaaagtaacagtggaaaatgcaaagtgtgtgcaagcaaatgcttttattcagggactttaactgcacttcgaatgtgttaccaaggttatggttaccctttgatgctgttcctggaagaaggaggagtggtgacagtctgcaaaatcaatacacaggaacctgaggagaccctggactttgatttctgcagcaccaatgttattaataagagtgaagtcctacaaattaccatgtctcctgacaagccttatttcaggttatctacttttggaaatgcaggaagttcccaccttgactatcccaaagattctgatttgatggaagcatttcattgtaatcagacccaagtcaacagatacaagatttccttactgaaaccctctacaaaggcattagtcctatcttgtaaggtatctattcggacagataacagaggcttcctttcattacagtatatgattagaaatgaagatggacaaatatgttttgtggaatattactgctgccctgatgaagaagttcctgaatctgagtcttgagtatgacaattcactgatatttatgtgtacatttatgatagatgaagttcttattctgagtacagtactctttgtcatttcatattggattttctatagagaagaagcacaatggggaagataggagcaaggtcatgtaccctaatagttactatgttttgtaaatccattttgtagagggcatgtaaataaatgttttcctgtagtcatagattattcaggactgtcctttagttctgtcttttgaactcatgggaataattgtgagtcagcgtaacatttcaagagtctaaaggtggccgggtgtggtggctttaatcccagcactttgggaagccgaggtgggcggatcacctgaggtcaggagttcgagaccagcctgaccaacgtggagaaaccccatctctactaaaaatacaaaaaattagccggacgtggtggcacatgcctgtaatgccagctactcgggaggctgaggcaggagaattgcttgaacccgggaggcggaggttgtggtgagctgagatgacgccattgcactccagcctaggcaataagagcaaaactctgcctcaaaaaaaaaaaaaaaaaaaaagtctaaaggcttaaagtttgatgcagctacctgaaatgatcttttatttatttattattagaaaaagcaaaggcatatgggcattgcttattagtttgaattctagagactagatcttaaagtagtggttctcaaagtgttgtgcccgcaccaacatcagaatggcctgcaaacttgtagcaaactctggggaggaggccagcattctgtattttaacaagcttccctcaggagattctgatgcctgctaaattttgggaaccactgttttaaaggaaactttttttttctttaatagcatttaattgtatgagatgattgcttttacatgtgatttccttgcaaatgttctgaagttgaggcatcaccaaacaagtctgaacaattctttatgtgatttatttttaaagtagaccttttgaagagatctatgaatgggatataaagcaattttcagtgttacaggttttcttcttcttctcaaaactgtttgctgtaagtaactgcaatcagtacttactactttccatttgcttatgagtttcttgacaaatcaaggtgtagaaaaccagttattaagtgattttgtactttcctggtagttgtcactaaaataatttttgtggcatataaatatatttaataaaatgcaaaaattatcttcctgtctagtagaaaaaattacatgagtaaagtgaagcttctgtctttgttactgtaccaggtgacaacagctgagtgtccctccatggacagtcactattggccttttgagtgagacagttctttaggataaaaacctgtcatcccattgcaggattcatttagcctttctggcccttacccactgatgctagtcattgtgaccaccccacctcccccaaataaaagtgtgccaaactattcattgttgagaaccattcaattgtattcaccaaaattggaggatatattggaatgccctaccttaatataggtcacatagcattagagaaaattggtttggagagtattacagcaaagtgtgctgcaaggaggctactccagcacaatggcaggcactgcttcccaggcatatggacaattctgggaggtggccagggtcagcacctgataactagtaagtgtctcaatctcagcatacaaaatttagcagtgactacaaaagaagttggaattttctaaaatgtttgtattcaagaaggaaacaaatgaatttactaaatgttgtcagagtattttttgtttagataaccaccaagaacagaacaaacctaaaagatacttgggaaaatatctaatcagtcaacattctaaggactgttaaatgtgaaatagcatagttattttttgtcttttgttactagtgtgaacaaagaacggcgcctaacatataatgggcatttagtaactctgttagatgaaagactctccaatttcagattttcttttagcatcttattagtcactacttaattctgatgatttagctctaaatttattttgatctcagtttttttatttttatttttgggtgacagagcaagactccgtctcaaaaacaaaaaaaattaaaataaaaattattgttttagctgcatgtcttcagctatttagaattcaaagactaatgaattgtttctaagtcaccctaacatcaaggtacttattttataaagaatttcctccttatttgtgttctaattgacccaggaatttttactttaataaaagtttaactttatttcctatggaaaatcactagggggagtgctccctcaggcagagcaggcgacactttggtgccactacaaattgatgtgtagtatatagaagaatacagtcttatatttaaagacttttagttctgtctttttgaagtttatctctctttctagtaaaatggtgcttactgtgaatggataatcttttttttcatttttcatttgttgatttcccattcgatgatgtagtgcttccaccgagaattgatgaaatgcttcaaaataataaaagtatttgttaaattccactttaataaaaataaggcatgtaacacagtcattttaacaggaagccacagggtttctgtggtgttaccaaagtcctagtaaaaattaattaaaattgctaaaagggcagaatgtggcactctcaacagtggggtaggcagtccttcagaacatagagacttccttctttccttccctgtcttcacattgcttgtcccttatccccacctgaaataaaatctattgggtcctgaaaaat

SEQ ID NO: 377956 - DNA, 3205 bp, Homo sapiens
ctgcgttcagaggtcccactcgaccgagtccatgtctcctgacagccttattgcaggttatctacttttggaaatgcaggaagttcccaccttgactatcccaaagattctgatttgatggaagcatttcattgtaatcagacccaagtcaacagatacaagatttccttactgaaaccctctacaaaggcattagtcctatcttgtaaggtatctattcggacagataacagaggcttcctttcattacagtatatgattagaaatgaagatggacaaatatgttttgtggaatattactgctgccctgatgaagaagttcctgaatctgagtcttgagtatgacaattcactgatatttatgtgtacatttatgatagatgaagttcttattctgagtacagtactctttgtcatttcatattggattttctatagagaagaagcacaatggggaagataggagcaaggtcatgtaccctaatagttactatgttttgtaaatccattttgtagagggcatgtaaataaatgttttcctgtagtcatagattattcaggactgtcctttagttctgtcttttgaactcatgggaataattgtgagtcagcgtaacatttcaagagtctaaaggtggccgggtgtggtggctttaatcccagcactttgggaagccgaggtgggcggatcacctgaggtcaggagttcgagaccagcctgaccaacgtggagaaaccccatctctactaaaaatacaaaaaattagccggacgtggtggcacatgcctgtaatgccagctactcgggaggctgaggcaggagaattgcttgaacccgggaggcggaggttgtggtgagctgagatgacgccattgcactccagcctaggcaataagagcaaaactctgcctcaaaaaaaaaaaaaaaaaaaaagtctaaaggcttaaagtttgatgcagctacctgaaatgatcttttatttatttattattagaaaaagcaaaggcatatgggcattgcttattagtttgaattctagagactagatcttaaagtagtggttctcaaagtgttgtgcccgcaccaacatcagaatggcctgcaaacttgtagcaaactctggggaggaggccagcattctgtattttaacaagcttccctcaggagattctgatgcctgctaaattttgggaaccactgttttaaaggaaactttttttttctttaatagcatttaattgtatgagatgattgcttttacatgtgatttccttgcaaatgttctgaagttgaggcatcaccaaacaagtctgaacaattctttatgtgatttatttttaaagtagaccttttgaagagatctatgaatgggatataaagcaattttcagtgttacaggttttcttcttcttctcaaaactgtttgctgtaagtaactgcaatcagtacttactactttccatttgcttatgagtttcttgacaaatcaaggtgtagaaaaccagttattaagtgattttgtactttcctggtagttgtcactaaaataatttttgtggcatataaatatatttaataaaatgcaaaaattatcttcctgtctagtagaaaaaattacatgagtaaagtgaagcttctgtctttgttactgtaccaggtgacaacagctgagtgtccctccatggacagtcactattggccttttgagtgagacagttctttaggataaaaacctgtcatcccattgcaggattcatttagcctttctggcccttacccactgatgctagtcattgtgaccaccccacctcccccaaataaaagtgtgccaaactattcattgttgagaaccattcaattgtattcaccaaaattggaggatatattggaatgccctaccttaatataggtcacatagcattagagaaaattggtttggagagtattacagcaaagtgtgctgcaaggaggctactccagcacaatggcaggcactgcttcccaggcatatggacaattctgggaggtggccagggtcagcacctgataactagtaagtgtctcaatctcagcatacaaaatttagcagtgactacaaaagaagttggaattttctaaaatgtttgtattcaagaaggaaacaaatgaatttactaaatgttgtcagagtattttttgtttagataaccaccaagaacagaacaaacctaaaagatacttgggaaaatatctaatcagtcaacattctaaggactgttaaatgtgaaatagcatagttattttttgtcttttgttactagtgtgaacaaagaacggcgcctaacatataatgggcatttagtaactctgttagatgaaagactctccaatttcagattttcttttagcatcttattagtcactacttaattctgatgatttagctctaaatttattttgatctcagtttttttatttttatttttgggtgacagagcaagactccgtctcaaaaacaaaaaaaattaaaataaaaattattgttttagctgcatgtcttcagctatttagaattcaaagactaatgaattgtttctaagtcaccctaacatcaaggtacttattttataaagaatttcctccttatttgtgttctaattgacccaggaatttttactttaataaaagtttaactttatttcctatggaaaatcactagggggagtgctccctcaggcagagcaggcgacactttggtgccactacaaattgatgtgtagtatatagaagaatacagtcttatatttaaagacttttagttctgtctttttgaagtttatctctctttctagtaaaatggtgcttactgtgaatggataatcttttttttcatttttcatttgttgatttcccattcgatgatgtagtgcttccaccgagaattgatgaaatgcttcaaaataataaaagtatttgttaaattccactttaataaaaataaggcatgtaacacagtcattttaacaggaagccacagggtttctgtggtgttaccaaagtcctagtaaaaattaattaaaattgctaaaagggcagaatgtggcactctcaacagtggggtaggcagtccttcagaacatagagacttccttctttccttccctgtcttcacattgcttgtcccttatccccacctgaaataaaatctattgggtcctgaaaaat

SEQ ID NO: 377957 - DNA, 3551 bp, Homo sapiens
aggaaccgcggaggaagtgaaggccggctgaagtgctcacggctcactgcagtttcaagttcctgggctcaaagatgggagtctccctatgttgcccaggctggtctccaacacctgggctcaagtggcttggcctcccaaagcgctgggattataggtctgtgccgcctccttccggtctcggtggcgcggcacgcgcggctctctaggcctccttcagctctgtggtgacggtggccgaggtggagggccggtctgaagagtggcgggactggcttcacttcctccgcggttcctcggagccgcctcgctcctcttcagggactttgctgagaagggctctcgggcgtccagaccccaccgcaaaggtgtttggcgatccgccgagaagttgttggccccaggagcatccctcggggccgaatgcgcagtggacgatgccccttctgacccaacagatccaagacgaggatgatcagtacagccttgtggccagccttgacaacgttaggaatctctccactatcttgaaagctattcatttccgagaacatgccacgtgtttcgcaactaaaaatggtatcaaagtaacagtggaaaatgcaaagtgtgtgcaagcaaatgcttttattcaggctggaatatttcaggagtttaaagttcaggaagagtctgttacttttcgaattaatttaactgtccttttagactgtttatctatttttggatcaagtcctatgccaggtaaactatgatcagtataaagacataaaagtgttatacatagtggtcagaaaaatacaggaagttatttggaacataaacattggttcagaaagctaatgccaattcatttttcagtggccacagtcatgggttctaacatttcacaatgttaattgcaagtgtgtttataattcttttcatatttgtaaaagtatttgcattttttttttaatttacaaggctttgagggattgtaaattcgaactggccaaaagaatactttggacatgtcttaaatatttttagcattgtgaaatgttttaattgcttctttttcctaacttgtccagaattactccgctagttagtggcagagaaaaacaaaagccagttctgactcctagtttactatgttcaaaatttgtttcttttaagccatattttataagttatgtctattttgccaaatgatttttgagctgagatgacgccattgcactccagcctaggcaataagagcaaaactctgcctcaaaaaaaaaaaaaaaaaaaaagtctaaaggcttaaagtttgatgcagctacctgaaatgatcttttatttatttattattagaaaaagcaaaggcatatgggcattgcttattagtttgaattctagagactagatcttaaagtagtggttctcaaagtgttgtgcccgcaccaacatcagaatggcctgcaaacttgtagcaaactctggggaggaggccagcattctgtattttaacaagcttccctcaggagattctgatgcctgctaaattttgggaaccactgttttaaaggaaactttttttttctttaatagcatttaattgtatgagatgattgcttttacatgtgatttccttgcaaatgttctgaagttgaggcatcaccaaacaagtctgaacaattctttatgtgatttatttttaaagtagaccttttgaagagatctatgaatgggatataaagcaattttcagtgttacaggttttcttcttcttctcaaaactgtttgctgtaagtaactgcaatcagtacttactactttccatttgcttatgagtttcttgacaaatcaaggtgtagaaaaccagttattaagtgattttgtactttcctggtagttgtcactaaaataatttttgtggcatataaatatatttaataaaatgcaaaaattatcttcctgtctagtagaaaaaattacatgagtaaagtgaagcttctgtctttgttactgtaccaggtgacaacagctgagtgtccctccatggacagtcactattggccttttgagtgagacagttctttaggataaaaacctgtcatcccattgcaggattcatttagcctttctggcccttacccactgatgctagtcattgtgaccaccccacctcccccaaataaaagtgtgccaaactattcattgttgagaaccattcaattgtattcaccaaaattggaggatatattggaatgccctaccttaatataggtcacatagcattagagaaaattggtttggagagtattacagcaaagtgtgctgcaaggaggctactccagcacaatggcaggcactgcttcccaggcatatggacaattctgggaggtggccagggtcagcacctgataactagtaagtgtctcaatctcagcatacaaaatttagcagtgactacaaaagaagttggaattttctaaaatgtttgtattcaagaaggaaacaaatgaatttactaaatgttgtcagagtattttttgtttagataaccaccaagaacagaacaaacctaaaagatacttgggaaaatatctaatcagtcaacattctaaggactgttaaatgtgaaatagcatagttattttttgtcttttgttactagtgtgaacaaagaacggcgcctaacatataatgggcatttagtaactctgttagatgaaagactctccaatttcagattttcttttagcatcttattagtcactacttaattctgatgatttagctctaaatttattttgatctcagtttttttatttttatttttgggtgacagagcaagactccgtctcaaaaacaaaaaaaattaaaataaaaattattgttttagctgcatgtcttcagctatttagaattcaaagactaatgaattgtttctaagtcaccctaacatcaaggtacttattttataaagaatttcctccttatttgtgttctaattgacccaggaatttttactttaataaaagtttaactttatttcctatggaaaatcactagggggagtgctccctcaggcagagcaggcgacactttggtgccactacaaattgatgtgtagtatatagaagaatacagtcttatatttaaagacttttagttctgtctttttgaagtttatctctctttctagtaaaatggtgcttactgtgaatggataatcttttttttcatttttcatttgttgatttcccattcgatgatgtagtgcttccaccgagaattgatgaaatgcttcaaaataataaaagtatttgttaaattccactttaataaaaataaggcatgtaacacagtcattttaacaggaagccacagggtttctgtggtgttaccaaagtcctagtaaaaattaattaaaattgctaaaagggcagaatgtggcactctcaacagtggggtaggcagtccttcagaacatagagacttccttctttccttccctgtcttcacattgcttgtcccttatccccacctgaaataaaatctattgggtcctgaaaaat

SEQ ID NO: 377958 - DNA, 1184 bp, Homo sapiens
ggactctatggttcggcggctctaagcgctcagctccgcggtcgtcctccaggtctgtgccgcctccttccggtctcggtggcgcggcacgcgcggctctctaggcctccttcagctctgtggtgacggtggccgaggtggagggccggtctgaagagtggcgggactggcttcacttcctccgcggttcctcggagccgcctcgctcctcttcagggactttgctgagaagggctctcgggcgtccagaccccaccgcaaaggtgtttggcgatccgccgagaagttgttggccccaggagcatccctcggggccgaatgcgcagtggacgatgccccttctgacccaacagatccaagacgaggatgatcagtacagccttgtggccagccttgacaacgttaggaatctctccactatcttgaaagctattcatttccgagaacatgccacgtgtttcgcaactaaaaatggtatcaaagtaacagtggaaaatgcaaagtgtgtgcaagcaaatgcttttattcaggctggaatatttcaggagtttaaagttcaggaagagtctgttacttttcgaattaatttaactgtccttttagactgtttatctatttttggatcaagtcctatgccagggactttaactgcacttcgaatgtgttaccaaggttatggttaccctttgatgctgttcctggaagaaggaggagtggtgacagtctgcaaaatcaatacacaggaacctgaggagaccctggactttgatttctgcagcaccaatgttattaataaaattattctgcagtcagaggggctccgtgaagcattttctgaattggatatgacgagtgaagtcctacaaattaccatgtctcctgacaagccttatttcaggttatctacttttggaaatgcaggaagttcccaccttgactatcccaaagattctgatttgatggaagcatttcattgtaatcagacccaagtcaacagatacaagatttccttactgaaaccctctacaaaggcattagtcctatcttgtaagggtctcactttctcatccaggctggagtgcagtggcacaatctcagctcactgcagcctcgacctcctgggctcaagcagtctgccttcctctgcctcccagagtgctaggattacaggcaatgagccacca

SEQ ID NO: 377959 - DNA, 679 bp, Homo sapiens
ggagacaagatcttgctctgttgcccaggctggagtacagttgtaggattacagttcactccagcctcaatctcctaggctcaagcaatcctcccatctcagcttcccaaatagctacgactacaggtgcatgcctccatgccctgctaatttttgtattttttgtagagatggggttttactatgttccctaggctaatcttgaactcctgagctcaagcaatccacccgcctcggcctcccaaagggctgggattacaggcgtgagctatcatgcctggcctaatgtattttttaaaagttgaatctaaaaagaatttaaaacaaatataaatcagctcagtaaggatggatatttttgtacatttaaaactattattttaggccgggagtggtggctcacacctgtaatcccagcattttgggaagccgaggcagggggatcatctgaggtcaggaagttcgagatcagcctggccaacatggtgaaacccctacctctactaaaaatacaaaaattagctgggtgtggtggtgggtgtctgtaatcccagctacttgagaggctgaggcaagagaatcacttgaaactggaaggcgggggttgcagtgagccgagattgcaccattgcactccagcctgggtgacagagcaagactccgtctcaaaaacaaaaaa

SEQ ID NO: 377960 - DNA, 1396 bp, Homo sapiens
ggactctatggttcggcggctctaagcgctcagctccgcggtcgtcctccaggtctgtgccgcctccttccggtctcggtggcgcggcacgcgcggctctctaggcctccttcagctctgtggtgacggtggccgaggtggagggccggtctgaagagtggcgggactggcttcacttcctccgcggttcctcggagccgcctcgctcctcttcagggactttgctgagaagggctctcgggcgtccagaccccaccgcaaaggtgtttggcgatccgccgagaagttgttggccccaggagcatccctcggggccgaatgcgcagtggacgatgccccttctgacccaacagatccaagacgaggatgatcagtacagccttgtggccagccttgacaacgttaggaatctctccactatcttgaaagctattcatttccgagaacatgccacgtgtttcgcaactaaaaatggtatcaaagtaacagtggaaaatgcaaagtgtgtgcaagcaaatgcttttattcaggctggaatatttcaggagtttaaagttcaggaagagtctgttacttttcgaattaatttaactgtccttttagactgtttatctatttttggatcaagtcctatgccagggactttaactgcacttcgaatgtgttaccaaggttatggttaccctttgatgctgttcctggaagaaggaggagtggtgacagtctgcaaaatcaatacacaggaacctgaggagaccctggactttgatttctgcagcaccaatgttattaataaaattattctgcagtcagaggggctccgtgaagcattttctgaattggatatgacgagtgaagtcctacaaattaccatgtctcctgacaagccttatttcaggttatctacttttggaaatgcaggaagttcccaccttgactatcccaaagattctgatttgatggaagcatttcattgtaatcagacccaagtcaacagatacaagatttccttactgaaaccctctacaaaggcattagtcctatcttgtaaggtatctattcggacagataacagaggcttcctttcattacagtatatgattagaaatgaagatggacaaatatgttttgtggaatattactgctgccctgatgaagaagttcctgaatctgagtcttgagtatgacaattcactgatatttatgtgtacatttatgatagatgaagttcttattctgagtacagtactctttgtcatttcatattggattttctatagagaagaagcacaatggggaagataggagcaaggtcatgtaccctaatagttactatgttttgtaaatccattttgtagagggcatgtaaataaatgttttcctgtagtcatagatt

SEQ ID NO: 377961 - DNA, 2569 bp, Homo sapiens
aggaaccgcggaggaagtgaaggccggctgaagtgctcacggctcactgcagtttcaagttcctgggctcaaagatgggagtctccctatgttgcccaggctggtctccaacacctgggctcaagtggcttggcctcccaaagcgctgggattataggtctgtgccgcctccttccggtctcggtggcgcggcacgcgcggctctctaggcctccttcagctctgtggtgacggtggccgaggtggagggccggtctgaagagtggcgggactggcttcacttcctccgcggttcctcggagccgcctcgctcctcttcagggactttgctgagaagggctctcgggcgtccagaccccaccgcaaaggtgtttggcgatccgccgagaagttgttggccccaggagcatccctcggggccgaatgcgcagtggacgatgccccttctgacccaacagatccaagacgaggatgatcagtacagccttgtggccagccttgacaacgttaggaatctctccactatcttgaaagctattcatttccgagaacatgccacgtgtttcgcaactaaaaatggtatcaaagtaacagtggaaaatgcaaagtgtgtgcaagcaaatgcttttattcaggctggaatatttcaggagtttaaagttcaggaagagtctgttacttttcgaattaatttaactgtccttttagactgtttatctatttttggatcaagtcctatgccagggactttaactgcacttcgaatgtgttaccaaggttatggttaccctttgatgctgttcctggaagaaggaggagtggtgacagtctgcaaaatcaatacacaggaacctgaggagaccctggactttgatttctgcagcaccaatgttattaataaaattattctgcagtcagaggggctccgtgaagcattttctgaattggatatgacgagtgaagtcctacaaattaccatgtctcctgacaagccttatttcaggttatctacttttggaaatgcaggaagttcccaccttgactatcccaaagattctgatttgatggaagcatttcattgtaatcagacccaagtcaacagatacaagatttccttactgaaaccctctacaaaggcattagtcctatcttgtaaggtatctattcggacagataacagaggcttcctttcattacagtatatgattagaaatgaagatggacaaatatgttttgtggaatattactgctgccctgatgaagaagttcctgaatctgagtcttgagtatgacaattcactgatatttatgtgtacatttatgatagatgaagttcttattctgagtacagtactctttgtcatttcatattggattttctatagagaagaagcacaatggggaagataggagcaaggtcatgtaccctaatagttactatgttttgtaaatccattttgtagagggcatgtaaataaatgttttcctgtagtcatagattattcaggactgtcctttagttctgtcttttgaactcatgggaataattgtgagtcagcgtaacatttcaagagtctaaaggtggccgggtgtggtggctttaatcccagcactttgggaagccgaggtgggcggatcacctgaggtcaggagttcgagaccagcctgaccaacgtggagaaaccccatctctactaaaaatacaaaaaattagccggacgtggtggcacatgcctgtaatgccagctactcgggaggctgaggcaggagaattgcttgaacccgggaggcggaggttgtggccgagattgcaccattgcactccagcctgggtgacagagcaagactccgtctcaaaaacaaaaaaaattaaaataaaaattattgttttagctgcatgtcttcagctatttagaattcaaagactaatgaattgtttctaagtcaccctaacatcaaggtacttattttataaagaatttcctccttatttgtgttctaattgacccaggaatttttactttaataaaagtttaactttatttcctatggaaaatcactagggggagtgctccctcaggcagagcaggcgacactttggtgccactacaaattgatgtgtagtatatagaagaatacagtcttatatttaaagacttttagttctgtctttttgaagtttatctctctttctagtaaaatggtgcttactgtgaatggataatcttttttttcatttttcatttgttgatttcccattcgatgatgtagtgcttccaccgagaattgatgaaatgcttcaaaataataaaagtatttgttaaattccactttaataaaaataaggcatgtaacacagtcattttaacaggaagccacagggtttctgtggtgttaccaaagtcctagtaaaaattaattaaaattgctaaaagggcagaatgtggcactctcaacagtggggtaggcagtccttcagaacatagagacttccttctttccttccctgtcttcacattgcttgtcccttatccccacctgaaataaaatctattgggtcctgaaaaat

SEQ ID NO: 377962 - DNA, 3921 bp, Homo sapiens
agataccgtgtcagttgcgtgtcttcattcttcacaacttttcacgttattgtcctcttacggagacgaggaaaccgtagcttagataattttcctccagaattacaaagatagttaagtgacataggtggggttcggcctggtcagccgtgttcagcctcccagcccctttccacctctcagcgcaggtggagctcgccggacctcgccagcactgatgggagttttactgtctaatcccttcaggtgtttggcgatccgccgagaagttgttggccccaggagcatccctcggggccgaatgcgcagtggacgatgccccttctgacccaacagatccaagacgaggatgatcagtacagccttgtggccagccttgacaacgttaggaatctctccactatcttgaaagctattcatttccgagaacatgccacgtgtttcgcaactaaaaatggtatcaaagtaacagtggaaaatgcaaagtgtgtgcaagcaaatgcttttattcagggactttaactgcacttcgaatgtgttaccaaggttatggttaccctttgatgctgttcctggaagaaggaggagtggtgacagtctgcaaaatcaatacacaggaacctgaggagaccctggactttgatttctgcagcaccaatgttattaataaaattattctgcagtcagaggggctccgtgaagcattttctgaattggatatgacgagtgaagtcctacaaattaccatgtctcctgacaagccttatttcaggttatctacttttggaaatgcaggaagttcccaccttgactatcccaaagattctgatttgatggaagcatttcattgtaatcagacccaagtcaacagatacaagatttccttactgaaaccctctacaaaggcattagtcctatcttgtaaggtatctattcggacagataacagaggcttcctttcattacagtatatgattagaaatgaagatggacaaatatgttttgtggaatattactgctgccctgatgaagaagttcctgaatctgagtcttgagtatgacaattcactgatatttatgtgtacatttatgatagatgaagttcttattctgagtacagtactctttgtcatttcatattggattttctatagagaagaagcacaatggggaagataggagcaaggtcatgtaccctaatagttactatgttttgtaaatccattttgtagagggcatgtaaataaatgttttcctgtagtcatagattattcaggactgtcctttagttctgtcttttgaactcatgggaataattgtgagtcagcgtaacatttcaagagtctaaaggtggccgggtgtggtggctttaatcccagcactttgggaagccgaggtgggcggatcacctgaggtcaggagttcgagaccagcctgaccaacgtggagaaaccccatctctactaaaaatacaaaaaattagccggacgtggtggcacatgcctgtaatgccagctactcgggaggctgaggcaggagaattgcttgaacccgggaggcggaggttgtggtgagctgagatgacgccattgcactccagcctaggcaataagagcaaaactctgcctcaaaaaaaaaaaaaaaaaaaaagtctaaaggcttaaagtttgatgcagctacctgaaatgatcttttatttatttattattagaaaaagcaaaggcatatgggcattgcttattagtttgaattctagagactagatcttaaagtagtggttctcaaagtgttgtgcccgcaccaacatcagaatggcctgcaaacttgtagcaaactctggggaggaggccagcattctgtattttaacaagcttccctcaggagattctgatgcctgctaaattttgggaaccactgttttaaaggaaactttttttttctttaatagcatttaattgtatgagatgattgcttttacatgtgatttccttgcaaatgttctgaagttgaggcatcaccaaacaagtctgaacaattctttatgtgatttatttttaaagtagaccttttgaagagatctatgaatgggatataaagcaattttcagtgttacaggttttcttcttcttctcaaaactgtttgctgtaagtaactgcaatcagtacttactactttccatttgcttatgagtttcttgacaaatcaaggtgtagaaaaccagttattaagtgattttgtactttcctggtagttgtcactaaaataatttttgtggcatataaatatatttaataaaatgcaaaaattatcttcctgtctagtagaaaaaattacatgagtaaagtgaagcttctgtctttgttactgtaccaggtgacaacagctgagtgtccctccatggacagtcactattggccttttgagtgagacagttctttaggataaaaacctgtcatcccattgcaggattcatttagcctttctggcccttacccactgatgctagtcattgtgaccaccccacctcccccaaataaaagtgtgccaaactattcattgttgagaaccattcaattgtattcaccaaaattggaggatatattggaatgccctaccttaatataggtcacatagcattagagaaaattggtttggagagtattacagcaaagtgtgctgcaaggaggctactccagcacaatggcaggcactgcttcccaggcatatggacaattctgggaggtggccagggtcagcacctgataactagtaagtgtctcaatctcagcatacaaaatttagcagtgactacaaaagaagttggaattttctaaaatgtttgtattcaagaaggaaacaaatgaatttactaaatgttgtcagagtattttttgtttagataaccaccaagaacagaacaaacctaaaagatacttgggaaaatatctaatcagtcaacattctaaggactgttaaatgtgaaatagcatagttattttttgtcttttgttactagtgtgaacaaagaacggcgcctaacatataatgggcatttagtaactctgttagatgaaagactctccaatttcagattttcttttagcatcttattagtcactacttaattctgatgatttagctctaaatttattttgatctcagtttttttatttttatttttgggtgacagagcaagactccgtctcaaaaacaaaaaaaattaaaataaaaattattgttttagctgcatgtcttcagctatttagaattcaaagactaatgaattgtttctaagtcaccctaacatcaaggtacttattttataaagaatttcctccttatttgtgttctaattgacccaggaatttttactttaataaaagtttaactttatttcctatggaaaatcactagggggagtgctccctcaggcagagcaggcgacactttggtgccactacaaattgatgtgtagtatatagaagaatacagtcttatatttaaagacttttagttctgtctttttgaagtttatctctctttctagtaaaatggtgcttactgtgaatggataatcttttttttcatttttcatttgttgatttcccattcgatgatgtagtgcttccaccgagaattgatgaaatgcttcaaaataataaaagtatttgttaaattccactttaataaaaataaggcatgtaacacagtcattttaacaggaagccacagggtttctgtggtgttaccaaagtcctagtaaaaattaattaaaattgctaaaagggcagaatgtggcactctcaacagtggggtaggcagtccttcagaacatagagacttccttctttccttccctgtcttcacattgcttgtcccttatccccacctgaaataaaatctattgggtcctgaaaaat

SEQ ID NO: 377963 - DNA, 3783 bp, Homo sapiens
tgaaccttcaaggaatagcatacccttttctgcagcaatttagttacttgctgtgttgatccatatagattctctaccctgaaattgtacatatataaaatcaacaagctatttctgaggtgtgtatgacaacctgaaaatgattccaaagaattatgttacattttgttctggttcccaattttcttgtagttttggaattctctacacacaactgtcatcagggaagatgtcatccctttttatgaggagatacatatatgtgagaaattgggcggaataaattattcttgagaaattttatgtatcatttcgaggagaagctgaacccagaactataaagctaaggccaagtatgacttctttccattgcagggactttaactgcacttcgaatgtgttaccaaggttatggttaccctttgatgctgttcctggaagaaggaggagtggtgacagtctgcaaaatcaatacacaggaacctgaggagaccctggactttgatttctgcagcaccaatgttattaataaaattattctgcagtcagaggggctccgtgaagcattttctgaattggatatgacgagtgaagtcctacaaattaccatgtctcctgacaagccttatttcaggttatctacttttggaaatgcaggaagttcccaccttgactatcccaaagattctgatttgatggaagcatttcattgtaatcagacccaagtcaacagatacaagatttccttactgaaaccctctacaaaggcattagtcctatcttgtaaggtatctattcggacagataacagaggcttcctttcattacagtatatgattagaaatgaagatggacaaatatgttttgtggaatattactgctgccctgatgaagaagttcctgaatctgagtcttgagtatgacaattcactgatatttatgtgtacatttatgatagatgaagttcttattctgagtacagtactctttgtcatttcatattggattttctatagagaagaagcacaatggggaagataggagcaaggtcatgtaccctaatagttactatgttttgtaaatccattttgtagagggcatgtaaataaatgttttcctgtagtcatagattattcaggactgtcctttagttctgtcttttgaactcatgggaataattgtgagtcagcgtaacatttcaagagtctaaaggtggccgggtgtggtggctttaatcccagcactttgggaagccgaggtgggcggatcacctgaggtcaggagttcgagaccagcctgaccaacgtggagaaaccccatctctactaaaaatacaaaaaattagccggacgtggtggcacatgcctgtaatgccagctactcgggaggctgaggcaggagaattgcttgaacccgggaggcggaggttgtggtgagctgagatgacgccattgcactccagcctaggcaataagagcaaaactctgcctcaaaaaaaaaaaaaaaaaaaaagtctaaaggcttaaagtttgatgcagctacctgaaatgatcttttatttatttattattagaaaaagcaaaggcatatgggcattgcttattagtttgaattctagagactagatcttaaagtagtggttctcaaagtgttgtgcccgcaccaacatcagaatggcctgcaaacttgtagcaaactctggggaggaggccagcattctgtattttaacaagcttccctcaggagattctgatgcctgctaaattttgggaaccactgttttaaaggaaactttttttttctttaatagcatttaattgtatgagatgattgcttttacatgtgatttccttgcaaatgttctgaagttgaggcatcaccaaacaagtctgaacaattctttatgtgatttatttttaaagtagaccttttgaagagatctatgaatgggatataaagcaattttcagtgttacaggttttcttcttcttctcaaaactgtttgctgtaagtaactgcaatcagtacttactactttccatttgcttatgagtttcttgacaaatcaaggtgtagaaaaccagttattaagtgattttgtactttcctggtagttgtcactaaaataatttttgtggcatataaatatatttaataaaatgcaaaaattatcttcctgtctagtagaaaaaattacatgagtaaagtgaagcttctgtctttgttactgtaccaggtgacaacagctgagtgtccctccatggacagtcactattggccttttgagtgagacagttctttaggataaaaacctgtcatcccattgcaggattcatttagcctttctggcccttacccactgatgctagtcattgtgaccaccccacctcccccaaataaaagtgtgccaaactattcattgttgagaaccattcaattgtattcaccaaaattggaggatatattggaatgccctaccttaatataggtcacatagcattagagaaaattggtttggagagtattacagcaaagtgtgctgcaaggaggctactccagcacaatggcaggcactgcttcccaggcatatggacaattctgggaggtggccagggtcagcacctgataactagtaagtgtctcaatctcagcatacaaaatttagcagtgactacaaaagaagttggaattttctaaaatgtttgtattcaagaaggaaacaaatgaatttactaaatgttgtcagagtattttttgtttagataaccaccaagaacagaacaaacctaaaagatacttgggaaaatatctaatcagtcaacattctaaggactgttaaatgtgaaatagcatagttattttttgtcttttgttactagtgtgaacaaagaacggcgcctaacatataatgggcatttagtaactctgttagatgaaagactctccaatttcagattttcttttagcatcttattagtcactacttaattctgatgatttagctctaaatttattttgatctcagtttttttatttttatttttgggtgacagagcaagactccgtctcaaaaacaaaaaaaattaaaataaaaattattgttttagctgcatgtcttcagctatttagaattcaaagactaatgaattgtttctaagtcaccctaacatcaaggtacttattttataaagaatttcctccttatttgtgttctaattgacccaggaatttttactttaataaaagtttaactttatttcctatggaaaatcactagggggagtgctccctcaggcagagcaggcgacactttggtgccactacaaattgatgtgtagtatatagaagaatacagtcttatatttaaagacttttagttctgtctttttgaagtttatctctctttctagtaaaatggtgcttactgtgaatggataatcttttttttcatttttcatttgttgatttcccattcgatgatgtagtgcttccaccgagaattgatgaaatgcttcaaaataataaaagtatttgttaaattccactttaataaaaataaggcatgtaacacagtcattttaacaggaagccacagggtttctgtggtgttaccaaagtcctagtaaaaattaattaaaattgctaaaagggcagaatgtggcactctcaacagtggggtaggcagtccttcagaacatagagacttccttctttccttccctgtcttcacattgcttgtcccttatccccacctgaaataaaatctattgggtcctgaaaaat

SEQ ID NO: 377964 - DNA, 1415 bp, Homo sapiens
ggactctatggttcggcggctctaagcgctcagctccgcggtcgtcctccaggtctgtgccgcctccttccggtctcggtggcgcggcacgcgcggctctctaggcctccttcagctctgtggtgacggtggccgaggtggagggccggtctgaagagtggcgggactggcttcacttcctccgcggttcctcggagccgcctcgctcctcttcagggactttgctgagaagggctctcgggcgtccagaccccaccgcaaaggtgtttggcgatccgccgagaagttgttggccccaggagcatccctcggggccgaatgcgcagtggacgatgccccttctgacccaacagatccaagacgaggatgatcagtacagccttgtggccagccttgacaacgttaggaatctctccactatcttgaaagctattcatttccgagaacatgccacgtgtttcgcaactaaaaatggtatcaaagtaacagtggaaaatgcaaagtgtgtgcaagcaaatgcttttattcaggctggaatatttcaggagtttaaagttcaggaagagtctgttacttttcgaattaatttaactgtccttttagactgtttatctatttttggatcaagtcctatgccagggactttaactgcacttcgaatgtgttaccaaggttatggttaccctttgatgctgttcctggaagaaggaggagtggtgacagtctgcaaaatcaatacacaggaacctgaggagaccctggactttgatttctgcagcaccaatgttattaataaaattattctgcagtcagaggggctccgtgaagcattttctgaattggatatgacgagtgaagtcctacaaattaccatgtctcctgacaagccttatttcaggttatctacttttggaaatgcaggaagttcccaccttgactatcccaaagattctgatttgatggaagcatttcattgtaatcagacccaagtcaacagatacaagatttccttactgaaaccctctacaaaggcattagtcctatcttgtaaggtatctattcggacagataacagaggcttcctttcattacagtatatgattagaaatgaagatggacaaatatgttttgtggaatattactgctgccctgatgaagaagttcctgaatctgagtcttgatgcaccataaacctcatataataccatgggacccatatgaagtgccactagtgatgctggaagtgttctcaagaagtagaagtcatgacattacaagaaaaagctgaattgcttgatatgtatcaaagattgaggtctgtggctgtggatgcccctcatttcagtcccaggattctttctgtaaacagacaatgtaaacttaacggaatcaataaatacagtaatgtaaatgta

SEQ ID NO: 377965 - DNA, 797 bp, Homo sapiens
aggaaccgcggaggaagtgaaggccggctgaagtgctcacggctcactgcagtttcaagttcctgggctcaaagatgggagtctccctatgttgcccaggctggtctccaacacctgggctcaagtggcttggcctcccaaagcgctgggattataggtctgtgccgcctccttccggtctcggtggcgcggcacgcgcggctctctaggcctccttcagctctgtggtgacggtggccgaggtggagggccggtctgaagagtggcgggactggcttcacttcctccgcggttcctcggagccgcctcgctcctcttcagggactttgctgagaagggctctcgggcgtccagaccccaccgcaaaggtgtttggcgatccgccgagaagttgttggccccaggagcatccctcggggccgaatgcgcagtggacgatgccccttctgacccaacagatccaagacgaggatgatcagtacagccttgtggccagccttgacaacgttaggaatctctccactatcttgaaagctattcatttccgagaacatgccacgtgtttcgcaactaaaaatggtatcaaagtaacagtggaaaatgcaaagtgtgtgcaagcaaatgcttttattcaggggcatggtatggtggctcacacctgtatttccagctgctcaggagaccgaggctgaagcacgaagatcgcttgagctcaggcattaaagaccagcctgggtaatcatagtgagacccccgtatcaataaaaaatcataataaaagttgaaactaatgttgc

SEQ ID NO: 377966 - DNA, 288 bp, Homo sapiens
gcttgaacataattggaaacaaagcagacatcaaaatgttatgttgattccagcagcaaattaagtattatctattcttaaaaataatttcaagactaaaagtaaaaatgtcaaaaattcatttgcggcgggcggatcatgaggtcaggagatcgagatcatcctggctcacacagtgaaaccccatctctactaaaaatacaaaaaattagccgggcgtggagcttgcagtgagccaagatcgtgccactgcactccagcctgggcaacagagcaagactccgtctc

SEQ ID NO: 377967 - DNA, 457 bp, Homo sapiens
agaaagagcgtgggccctggacaaggacatgagccccaggaagggagagccagcctgggccactggacatcctgcagaggatggcctgcaggggcaaggtgacttcacagggcttaacctccagctgagcagggctgaagcagcaaacttaagtgactagtggagtgcagagaatgcacacactccaccatggcaagttcagtcacctgttccccacagtgcctctcaagagccccacaacagccctcattatagaaagtcagctttggatatctgcccggctagaggcaatcacacccgactgtacctcttctccctccaccgcaagtctcagccagcaagaggaaggaaaagctggccaagtagacaaagaaagtggaccacattcccatccctgggtgcagataatcagcctcaagcccaggatggacagggagcaagaagttttacttaaaat

SEQ ID NO: 377968 - DNA, 423 bp, Homo sapiens
accacgtgaggatcttgacttgtggagaatggggagctgtgggcctctcagtaaaaaccagtttgctgataagcatttattcgggagtaatggagaaggaagtaagagagagaagttgagaggcgctgagtcacctggaaatccactaattccaccgaattccactcgcccaccctgctggtcatagctgggactgcactcagagggttaagaactggagcctagggagcttcagagctgtggctctgaaaaatctcttcccagctctcagctttgctgtccccctcagcaaagggaagggctggccaggcacggtggatcatgcctataatcccagcactttgggagccaaggcgggaggatggcttgaggccaggagtttgagactagcctgggcaacgtagcaagaccccatctctacaa

SEQ ID NO: 377969 - DNA, 849 bp, Homo sapiens
  misc_feature (22)..(22): n is a, c, g, or t
tcggctaggtacgaggctgggntggtgctcacaccaagaactggcggccgcagctgctggtgctgctgaagctggacgaggacctccacgtgaagtacccgcggctcctcaccttcgcctcccagctcaaggctggcaagggcctgaccattgttggttctgtcatccaggggagcttcttggagagctatggcgaggctcaggccgccgagcagaccatcaagaacatgatggaaattgagaaggtgaagggcttctgccaggtggtggtggccagcaaggtgcgggaggggctggcccacctcatccagtcctgtggcctgggaggcatgcggcataactccgtggtgctgggctggccctacggctggcgacagagcgaggacccccgtgcctggaagaccttcattgacaccgtgcgctgcactacggctgcccacctggccctgctcgtgcccaagaacatcgccttctaccccagcaaccacgagcgctacctggagggccacatagacgtgtggtggatcgtgcacgatggtggcatgctcatgcttctgcccttcctgctgcgccagcataaggtctggaggaagtgccggatgcgcatcttcacagtggcccagatggatgacaacagcatccagatgaagaaggacctggctgtctttctgtaccatctgcgccttgaggccgaggtggaggtggtggagatgcgtaacccgggactttcgggtttacccttcaaacgggacgtgataatggccgggtccaatgtgcgggatgaactggccaatggggggggaaagccctgtgaggttcggcacgcaccggggaaacgctccggaaaag

SEQ ID NO: 377970 - DNA, 422 bp, Homo sapiens
gcgaacttaccccttggggagccacagggatgcatgcctcactggccaccaccccgctgaggggttccagggctgctctgtggcctcacttgcttttcttcatccccaccaggtaatatgtctcatcctcggccttggctagggctcgaccacttcaacaaagccccaaagaggagtcgctacacttaccttgaaaaggccattaaaatccataactgatttccaagctggtgtgttcaaggcgaggacggtgtgtgggtggccccttaacagcctagaactttggtgcacgtgccctctagccgaagtcttcagcaagaggattcgctgctggtgttaattttattttattgaggctgttcagtttggcttctctgtatctattgactgccctttttgagcaaaatgaagatgtttttata

SEQ ID NO: 377971 - DNA, 732 bp, Homo sapiens
atgcgagcgggcggggcgtgtcggcccggggcggcggggacagcggcggggacagcggcgggcggctgggacggcgggtgcggcggggccgagcccgcacgatgcctcacttcaccgtggtgccagtggacgggccgaggcgcggcgactatgacaacctcgaggggctcagttgggtggactacggggagcgcgccgagctggatgactcggacggacatggcaaccacagagagagcagcccttttctttcccccttggaggcttccagaggaattgactactatgacaggaacctggcactgtttgagtagctgaggagccattttgggccacaggtttggcacacagaggctttagctaagcaggcaggctggacacgtgggcctcctctgtcttgctcttcctctcatctcctcttgtgttcctggttctcatggcagccgggctgcagttcccttggccctttcaactgaaactgcctttccagaggccactcacaatcccacccccattgctacctccagggtggttcacctctgacttccttacaacccctcagcaaggaaacgcccgcttaggatttcccaactcaggatttctcctcttccttccactcctggttcttctccaagtccatggttcttcgctctcccatggattcttccttgtctttcttggttgacccttccagctctgtccctctctagttccctgagtcctggtccattt

SEQ ID NO: 377972 - DNA, 631 bp, Homo sapiens
ttgcaatctatgaggaaaggttattggaattctgttcggtgtttaagccagcaatgccaagatctgttgtgggtacggcttgtatctattgactgccctttttgagcaaaatgaagatgtttttataaagcttggatgccaatgagagttattttatggtaaccacagtgcaaggcaactgtcagcgcaatgggggagaagaggttagtgtagctgaggagccattttgggccacaggtttggcacacagaggctttagctaagcaggcaggctggacacgtgggcctcctctgtcttgctcttcctctcatctcctcttgtgttcctggttctcatggcagccgggctgcagttcccttggccctttcaactgaaactgcctttccagaggccactcacaatcccacccccattgctacctccagggtggttcacctctgacttccttacaacccctcagcaaggaaacgcccgcttaggatttcccaactcaggatttctcctcttccttccactcctggttcttctccaagtccatggttcttcgctctcccatggattcttccttgtctttcttggttgacccttccagctctgtccctctctagttccctgagtcctggtccattt

SEQ ID NO: 377973 - DNA, 3871 bp, Homo sapiens
atgcgagcgggcggggcgtgtcggcccggggcggcggggacagcggcggggacagcggcgggcggctgggacggcgggtgcggcggggccgagcccgcacgatgcctcacttcaccgtggtgccagtggacgggccgaggcgcggcgactatgacaacctcgaggggctcagttgggtggactacggggagcgcgccgagctggatgactcggacggacatggcaaccacagagagagcagcccttttctttcccccttggaggcttccagaggaattgactactatgacaggaacctggcactgtttgaggaagagctggacatccgcccaaaggtatcgtctcttctgggaaagctcgtcagctacaccaacctcacccagggcgccaaagagcatgaggaggccgagagtggggagggcacccgccggagggcagccgaggcacccagcatgggcaccctcatgggggtgtacctgccctgcctgcagaatatctttggggttatcctcttcctgcggctgacctggatggtgggcacagcaggtgtgctacaggccctcctcatcgtgcttatctgctgctgttgtaccctgctgacggccatctccatgagtgccatcgccaccaacggtgtggttccagctgggggctcctatttcatgatctctcgttcactggggccagaatttggaggtgctgtgggcctgtgcttctacctgggaacaacattcgcagcagccatgtacatcctgggggccatcgagatcttgctgacctacattgccccaccagctgccattttttacccatcgggtgctcatgacacgtcgaatgccactttgaacaatatgcgtgtgtatgggaccattttcctgaccttcatgaccctggtggtgtttgtgggggtcaagtatgtgaacaaatttgcctcgctcttcctggcctgtgtgatcatctccatcctctccatctatgctgggggcataaagtctatatttgaccctcccgtgtttccggtatgcatgctgggcaacaggaccctgtcccgggaccagtttgacatctgtgccaagacagctgtagtggacaatgagacagtggccacccagctatggagtttcttctgccacagccccaaccttacgaccgactcctgtgacccctacttcatgctcaacaatgtgaccgagatccctggcatccccggggcagctgctggtgtgctccaggaaaacctgtggagcgcctacctggagaagggtgacatcgtggagaagcatgggctgccctccgcagatgccccgagcctgaaggagagcctgcctctgtacgtggtcgctgacatcgccacatccttcaccgtgctggtcggcatcttcttcccttctgtaacaggcatcatggctggctcaaaccgctctggggaccttcgtgacgcccagaagtctatccctgtggggaccattctggccatcattacaacttccctcgtgtacttcagcagtgtggttctctttggtgcctgcattgagggtgtggttctccgggacaagtatggcgatggtgtcagcaggaacttggtggtgggcacactggcctggccttcaccctgggtcatcgtcatcggctccttcttttcaacgtgtggcgctggcctccagagcctcacaggggcaccacgcctattgcaggccattgccaaggacaacatcatccccttcctccgggtgtttggccacgggaaggtgaatggtgaacccacatgggcactcctcctgacggcactcatcgccgagctgggcatcctcatcgcctccctcgacatggtggcccccatcttatccatgttctttctgatgtgctacctgttcgtgaacctcgcctgtgcggtgcagacactcctgaggacccccaactggcggccccggttcaagtactatcactgggcgctgtccttcctgggcatgagtctctgcctggcccttatgtttgtctcctcctggtactatgccctggtggccatgctcatcgccggcatgatctacaaatacatcgagtaccaaggggctgagaaggagtggggtgacgggatccgaggcctgtccctgagcgctgcccgctacgcgctgttgcggctggaggaggggcctcctcacaccaagaactggcggccgcagctgctggtgctgctgaagctggacgaggacctccacgtgaagtacccgcggctcctcaccttcgcctcccagctcaaggctggcaagggcctgaccattgttggttctgtcatccaggggagcttcttggagagctatggcgaggctcaggccgccgagcagaccatcaagaacatgatggaaattgagaaggtgaagggcttctgccaggtggtggtggccagcaaggtgcgggaggggctggcccacctcatccagtcctgtggcctgggaggcatgcggcataactccgtggtgctgggctggccctacggctggcgacagagcgaggacccccgtgcctggaagaccttcattgacaccgtgcgctgcactacggctgcccacctggccctgctcgtgcccaagaacatcgccttctaccccagcaaccacgagcgctacctggagggccacatagacgtgtggtggatcgtgcacgatggtggcatgctcatgcttctgcccttcctgctgcgccagcataaggtctggaggaagtgccggatgcgcatcttcacagtggcccagatggatgacaacagcatccagatgaagaaggacctggctgtctttctgtaccatctgcgccttgaggccgaggtggaggtggtggagatgcataacagtgacatctctgcatacacctacgagcggacgctgatgatggagcagcggtcgcagatgctgcggcagatgagactgaccaagactgagcgggagcgagaagcccagctggtcaaggatcggcactcggccctgcggctggagagcctgtactcggacgaggaagatgagtctgcagtgggggctgacaagatccagatgacgtggaccagggacaagtacatgactgagacctgggaccccagccatgcccctgacaatttccgggagctggtgcacattaagccggaccaatccaatgtgcggcgcatgcacactgctgtgaagctcaatgaagtcattgtcacgcgctcccacgacgcccgcctggttctcctaaacatgcctggcccacccaggaacagtgagggcgacgagaactacatggagttcctcgaggtgctgaccgagggccttgagcgggtgctgttggtgcgcggtggtggccgtgaagtcatcaccatctactcctgagcccagtgtcatcttgtggcctggagtcgaggtcttggccaggacataacaagctgtggtctggggtaacagcctcttcccagcacccacctgccagccctgcttgcctggccctgtcctggacccagctttgctaggtctccttggaaaccaggcctgggcctcaaaatggagatggatcccaggtcttgtgggaccctgggatgtttggggactttactatctagcaccccagtaggcctgtcctggccagagaagactggtaggggccgagtggggtttgaaggcagccggcccggcccagcccaggagcgctatttattgcatatttattgtttggatgtcaccatcagagacgaagggaagggtagccagggagggagtccagcccagctgcctgcaggaagatctggctcagtctactatgggcagggccccccaccaagctgagccgaatggagacagctgagctgaggcctgactttttcaataaaacattgtgtagttctggg

SEQ ID NO: 377974 - DNA, 5416 bp, Homo sapiens
gtacgtgcgcgtctccctgccgccgccgccgcccgccgcgggccgccccggggccgccgtcgccgacgacgcgcgggaggaggaggaggaggccgccccgccgccgccgccgccgccgccgccccggctcgccgccgcccgcccgccgggctcgcagccccggcccccggccgcaggcgaggcccaggccgcggccgacatgaaccaccagcagcagcagcagcagcagaaagcgggcgagcagcagttgagcgagcccgaggacatggagatggaagcgggagatacagatgacccaccaagaattactcagaaccctgtgatcaatgggaatgtggccctgagtgatggacacaacaccgcggaggaggacatggaggatgacaccagttggcgctccgaggcaacctttcagttcactgtggagcgcttcagcagactgagtgagtcggtccttagccctccgtgttttgtgcgaaatctgccatggaagattatggtgatgccacgcttttatccagacagaccacaccaaaaaagcgtaggattctttctccagtgcaatgctgaatctgattccacgtcatggtcttgccatgcacaagcagtgctgaagataataaattacagagatgatgaaaagtcgttcagtcgtcgtattagtcatttgttcttccataaagaaaatgattggggattttccaattttatggcctggagtgaagtgaccgatcctgagaaaggatttatagatgatgacaaagttacctttgaagtctttgtacaggcggatgctccccatggagttgcgtgggattcaaagaagcacacaggctacgtcggcttaaagaatcagggagcgacttgttacatgaacagcctgctacagacgttatttttcacgaatcagctacgaaaggctgtgtacatgatgccaaccgagggggatgattcgtctaaaagcgtccctttagcattacaaagagtgttctatgaattacagcatagtgataaacctgtaggaacaaaaaagttaacaaagtcatttgggtgggaaactttagatagcttcatgcaacatgatgttcaggagctttgtcgagtgttgctcgataatgtggaaaataagatgaaaggcacctgtgtagagggcaccatacccaaattattccgcggcaaaatggtgtcctatatccagtgtaaagaagtagactatcggtctgatagaagagaagattattatgatatccagctaagtatcaaaggaaagaaaaatatatttgaatcatttgtggattatgtggcagtagaacagctcgatggggacaataaatacgacgctggggaacatggcttacaggaagcagagaaaggtgtgaaattcctaacattgccaccagtgttacatctacaactgatgagatttatgtatgaccctcagacggaccaaaatatcaagatcaatgataggtttgaattcccagagcagttaccacttgatgaatttttgcaaaaaacagatcctaaggaccctgcaaattatattcttcatgcagtcctggttcatagtggagataatcatggtggacattatgtggtttatctaaaccccaaaggggatggcaaatggtgtaaatttgatgacgacgtggtgtcaaggtgtactaaagaggaagcaattgagcacaattatgggggtcacgatgacgacctgtctgttcgacactgcactaatgcttacatgttagtctacatcagggaatcaaaactgagtgaagttttacaggcggtcaccgaccatgatattcctcagcagttggtggagcgattacaagaagagaaaaggatcgaggctcagaagcggaaggagcggcaggaagcccatctctatatgcaagtgcagatagtcgcagaggaccagttttgtggccaccaagggaatgacatgtacgatgaagaaaaagtgaaatacactgtgttcaaagtattgaagaactcctcgcttgctgagtttgttcagagcctctctcagaccatgggatttccacaagatcaaattcgattgtggcccatgcaagcaaggagtaatggaacaaaacgaccagcaatgttagataatgaagccgacggcaataaaacaatgattgagctcagtgataatgaaaacccttggacaatattcctggaaacagttgatcccgagctggctgctagtggagcgaccttacccaagtttgataaagatcatgatgtaatgttatttttgaagatgtatgatcccaaaacgcggagcttgaattactgtgggcatatctacacaccaatatcctgtaaaatacgtgacttgctcccagttatgtgtgacagagcaggatttattcaagatactagccttatcctctatgaggaagttaaaccgaatttaacagagagaattcaggactatgacgtgtctcttgataaagcccttgatgaactaatggatggtgacatcatagtatttcagaaggatgaccctgaaaatgataacagtgaattacccaccgcaaaggagtatttccgagatctctaccaccgcgttgatgtcattttctgtgataaaacaatccctaatgatcctggatttgtggttacgttatcaaatagaatgaattattttcaggttgcaaagacagttgcacagaggctcaacacagatccaatgttgctgcagtttttcaagtctcaaggttatagggatggcccaggtaatcctcttagacataattatgaaggtactttaagagatcttctacagttcttcaagcctagacaacctaagaaactttactatcagcagcttaagatgaaaatcacagactttgagaacaggcgaagttttaaatgtatatggttaaacagccaatttagggaagaggaaataacactatatccagacaagcatgggtgtgtccgggacctgttagaagaatgtaaaaaggccgtggagcttggggagaaagcatcagggaaacttaggctgctagaaattgtaagctacaaaatcattggtgttcatcaagaagatgaactattagaatgtttatctcctgcaacgagccggacgtttcgaatagaggaaatccctttggaccaggtggacatagacaaagagaatgagatgcttgtcacagtggcgcatttccacaaagaggtcttcggaacgttcggaatcccgtttttgctgaggatacaccagggcgagcattttcgagaagtgatgaagcgaatccagagcctgctggacatccaggagaaggagtttgagaagtttaaatttgcaattgtaatgatgggccgacaccagtacataaatgaagacgagtatgaagtaaatttgaaagactttgagccacagcccggtaatatgtctcatcctcggccttggctagggctcgaccacttcaacaaagccccaaagaggagtcgctacacttaccttgaaaaggccattaaaatccataactgatttccaagctggtgtgttcaaggcgaggacggtgtgtgggtggccccttaacagcctagaactttggtgcacgtgccctctagccgaagtcttcagcaagaggattcgctgctggtgttaattttattttattgaggctgttcagtttggcttctctgtatctattgactgccctttttgagcaaaatgaagatgtttttataaagcttggatgccaatgagagttattttatggtaaccacagtgcaaggcaactgtcagcgcaatgggggagaagaggttagtggatcgggggtccctggctcaaggtctctgggctgtccctagtgggcacgagtggctcggctgccttcctggggtcccgtgcaccagccctgcagctagcaagtcttgtgtttaggctcgtctgacctatttccttcagttatactttcaatgaccttttgtgcatctgttaaggcaaaacagagaaactcacaacctaataaatagcgctcttcccttcattgtgtgcattgtcggcccttcctcgggttctcctcctccagctgcctgggggctttttaataaacttgtctcacctcgtcagccactactgtctgcagcccctttgcaaagtggatgcactgaatacagtccggacagacattgtgggggtctttttattaaatcaagaacattgttaaattcaattaaggtttactctgctgccttggcagacttacgatctcaacagttcatacgagcaggtgaaaggattataaatagaatttcgttaaagtggaacagacgacaagaaagccttttagcaagagggcatgctcactagtggttagtaagctgtcgactttgtaaaaaagttaaaaatgaaaaaaaaaggaaaaatgaattgtatatttaatgaatgaacatgtacaatttgccactgggaggaggttcctttttgttgggtgagtctgcaagtgaatttcactgatgttgatattcattgtgtgtagttttatttcggtcccagccccgtttccttttattttggagctaatgccagctgcgtgtctagttttgagtgcagtaaaatagaatcagcaaatcactcttatttttcatccttttccggtattttttgggttgtttctgtgggagcagtgtacaccaactcttcctgtatattgcctttttgctggaaaatgttgtatgttgaataaaattttctataaaaattataattcagtgagttacgtggaagtggaggaagatttctactctccctggaaacaggcctgggaaaccttggcatttgtaacaaggtttcactgagatgtacttttccttctaattccgttttgcgggggcagggtctcttgtttctttttttttttttttttttttttagcctctaactagtcacatttactcttaagaaatgaaaggttttccaggagagaactgtgtacaaataaggtgactggagatgtgacctgatgtgtcacgaggcccttcggggcggcaggcgctatcgtgggcgtggtccttgcaccgtcccatcggccttgccttccagctccgtggcacggtttcctggtctttgggccagtgtgtaccttggagtgacttcctttctcaacttccactgcagtgtgtgtgccttctgctctgagagctgccttgtgacccgtgtgatagaaagcagggagtgagggtccccgcggacctggcccttccctccttcctcccccagaaagaggagttagagcaggggtgcgagagccgttcgctgtgggtttgtctttgaacaaacattaaggtgtcttgtttttgttctgggctgggggttggctgtagtcttaggtaactgaaagttcctactctcccttaaggtattaaatgactctttttccaaaaaaaacg

SEQ ID NO: 377975 - DNA, 4731 bp, Homo sapiens
gtacgtgcgcgtctccctgccgccgccgccgcccgccgcgggccgccccggggccgccgtcgccgacgacgcgcgggaggaggaggaggaggccgccccgccgccgccgccgccgccgccgccccggctcgccgccgcccgcccgccgggctcgcagccccggcccccggccgcaggcgaggcccaggccgcggccgacatgaaccaccagcagcagcagcagcagcagaaagcgggcgagcagcagttgagcgagcccgaggacatggagatggaagcgggagatacagatgacccaccaagaattactcagaaccctgtgatcaatgggaatgtggccctgagtgatggacacaacaccgcggaggaggacatggaggatgacaccagttggcgctccgaggcaacctttcagttcactgtggagcgcttcagcagactgagtgagtcggtccttagccctccgtgttttgtgcgaaatctgccatggaagattatggtgatgccacgcttttatccagacagaccacaccaaaaaagcgtaggattctttctccagtgcaatgctgaatctgattccacgtcatggtcttgccatgcacaagcagtgctgaagataataaattacagagatgatgaaaagtcgttcagtcgtcgtattagtcatttgttcttccataaagaaaatgattggggattttccaattttatggcctggagtgaagtgaccgatcctgagaaaggatttatagatgatgacaaagttacctttgaagtctttgtacaggcggatgctccccatggagttgcgtgggattcaaagaagcacacaggctacgtcggcttaaagaatcagggagcgacttgttacatgaacagcctgctacagacgttatttttcacgaatcagctacgaaaggctgtgtacatgatgccaaccgagggggatgattcgtctaaaagcgtccctttagcattacaaagagtgttctatgaattacagcatagtgataaacctgtaggaacaaaaaagttaacaaagtcatttgggtgggaaactttagatagcttcatgcaacatgatgttcaggagctttgtcgagtgttgctcgataatgtggaaaataagatgaaaggcacctgtgtagagggcaccatacccaaattattccgcggcaaaatggtgtcctatatccagtgtaaagaagtagactatcggtctgatagaagagaagattattatgatatccagctaagtatcaaaggaaagaaaaatatatttgaatcatttgtggattatgtggcagtagaacagctcgatggggacaataaatacgacgctggggaacatggcttacaggaagcagagaaaggtgtgaaattcctaacattgccaccagtgttacatctacaactgatgagatttatgtatgaccctcagacggaccaaaatatcaagatcaatgataggtttgaattcccagagcagttaccacttgatgaatttttgcaaaaaacagatcctaaggaccctgcaaattatattcttcatgcagtcctggttcatagtggagataatcatggtggacattatgtggtttatctaaaccccaaaggggatggcaaatggtgtaaatttgatgacgacgtggtgtcaaggtgtactaaagaggaagcaattgagcacaattatgggggtcacgatgacgacctgtctgttcgacactgcactaatgcttacatgttagtctacatcagggaatcaaaactgagtgaagttttacaggcggtcaccgaccatgatattcctcagcagttggtggagcgattacaagaagagaaaaggatcgaggctcagaagcggaaggagcggcaggaagcccatctctatatgcaagtgcagatagtcgcagaggaccagttttgtggccaccaagggaatgacatgtacgatgaagaaaaagtgaaatacactgtgttcaaagtattgaagaactcctcgcttgctgagtttgttcagagcctctctcagaccatgggatttccacaagatcaaattcgattgtggcccatgcaagcaaggagtaatggaacaaaacgaccagcaatgttagataatgaagccgacggcaataaaacaatgattgagctcagtgataatgaaaacccttggacaatattcctggaaacagttgatcccgagctggctgctagtggagcgaccttacccaagtttgataaagatcatgatgtaatgttatttttgaagatgtatgatcccaaaacgcggagcttgaattactgtgggcatatctacacaccaatatcctgtaaaatacgtgacttgctcccagttatgtgtgacagagcaggatttattcaagatactagccttatcctctatgaggaagttaaaccgaatttaacagagagaattcaggactatgacgtgtctcttgataaagcccttgatgaactaatggatggtgacatcatagtatttcagaaggatgaccctgaaaatgataacagtgaattacccaccgcaaaggagtatttccgagatctctaccaccgcgttgatgtcattttctgtgataaaacaatccctaatgatcctggatttgtggttacgttatcaaatagaatgaattattttcaggttgcaaagacagttgcacagaggctcaacacagatccaatgttgctgcagtttttcaagtctcaaggttatagggatggcccaggtaatcctcttagacataattatgaaggtactttaagagatcttctacagttcttcaagcctagacaacctaagaaactttactatcagcagcttaagatgaaaatcacagactttgagaacaggcgaagttttaaatgtatatggttaaacagccaatttagggaagaggaaataacactatatccagacaagcatgggtgtgtccgggacctgttagaagaatgtaaaaaggccgtggagcttggggagaaagcatcagggaaacttaggctgctagaaattgtaagctacaaaatcattggtgttcatcaagaagatgaactattagaatgtttatctcctgcaacgagccggacgtttcgaatagaggaaatccctttggaccaggtggacatagacaaagagaatgagatgcttgtcacagtggcgcatttccacaaagaggtcttcggaacgttcggaatcccgtttttgctgaggatacaccagggcgagcattttcgagaagtgatgaagcgaatccagagcctgctggacatccaggagaaggagtttgagaagtttaaatttgcaattgtaatgatgggccgacaccagtacataaatgaagacgagtatgaagtaaatttgaaagactttgagccacagcccggtaatatgtctcatcctcggccttggctagggctcgaccacttcaacaaagccccaaagaggagtcgctacacttaccttgaaaaggccattaaaatccataactgatttccaagctggtgtgttcaaggcgaggacggtgtgtgggtggccccttaacagcctagaactttggtgcacgtgccctctagccgaagtcttcagcaagaggattcgctgctggtgttaattttattttattgaggctgttcagtttggcttctctgtatctattgactgccctttttgagcaaaatgaagatgtttttataaagcttggatgccaatgagagttattttatggtaaccacagtgcaaggcaactgtcagcgcaatgggggagaagaggttagtggatcgggggtccctggctcaaggtctctgggctgtccctagtgggcacgagtggctcggctgccttcctggggtcccgtgcaccagccctgcagctagcaagtcttgtgtttaggctcgtctgacctatttccttcagttatactttcaatgaccttttgtgcatctgttaaggcaaaacagagaaactcacaacctaataaatagcgctcttcccttcattgtgtgcattgtcggcccttcctcgggttctcctcctccagctgcctgggggctttttaataaacttgtctcacctcgtcagccactactgtctgcagcccctttgcaaagtggatgcactgaatacagtccggacagacattgtgggggtctttttattaaatcaagaacattgttaaattcaattaaggtttactctgctgccttggcagacttacgatctcaacagttcatacgagcaggtgaaaggattataaatagaatttcgttaaagtggaacagacgacaagaaagccttttagcaagagggcatgctcactagtggttagtaagctgtcgactttgtaaaaaagttaaaaatgaaaaaaaaaggaaaaatgaattgtatatttaatgaatgaacatgtacaatttgccactgggaggaggttcctttttgttgggtgagtctgcaagtgaatttcactgatgttgatattcattgtgtgtagttttatttcggtcccagccccgtttccttttattttggagctaatgccagctgcgtgtctagttttgagtgcagtaaaatagaatcagcaaatcactcttatttttcatccttttccggtattttttgggttgtttctgtgggagcagtgtacaccaactcttcctgtatattgcctttttgctggaaaatgttgtatgttgaataaaattttctataaaaatta

SEQ ID NO: 377976 - DNA, 5609 bp, Homo sapiens
gtacgtgcgcgtctccctgccgccgccgccgcccgccgcgggccgccccggggccgccgtcgccgacgacgcgcgggaggaggaggaggaggccgccccgccgccgccgccgccgccgccgccccggctcgccgccgcccgcccgccgggctcgcagccccggcccccggccgcaggcgaggcccaggccgcggccgacatgaaccaccagcagcagcagcagcagcagaaagcgggcgagcagcagttgagcgagcccgaggacatggagatggaagcgggagatacagatgacccaccaagaattactcagaaccctgtgatcaatgggaatgtggccctgagtgatggacacaacaccgcggaggaggacatggaggatgacaccagttggcgctccgaggcaacctttcagttcactgtggagcgcttcagcagactgagtgagtcggtccttagccctccgtgttttgtgcgaaatctgccatggaagattatggtgatgccacgcttttatccagacagaccacaccaaaaaagcgtaggattctttctccagtgcaatgctgaatctgattccacgtcatggtcttgccatgcacaagcagtgctgaagataataaattacagagatgatgaaaagtcgttcagtcgtcgtattagtcatttgttcttccataaagaaaatgattggggattttccaattttatggcctggagtgaagtgaccgatcctgagaaaggatttatagatgatgacaaagttacctttgaagtctttgtacaggcggatgctccccatggagttgcgtgggattcaaagaagcacacaggctacgtcggcttaaagaatcagggagcgacttgttacatgaacagcctgctacagacgttatttttcacgaatcagctacgaaaggctgtgtacatgatgccaaccgagggggatgattcgtctaaaagcgtccctttagcattacaaagagtgttctatgaattacagcatagtgataaacctgtaggaacaaaaaagttaacaaagtcatttgggtgggaaactttagatagcttcatgcaacatgatgttcaggagctttgtcgagtgttgctcgataatgtggaaaataagatgaaaggcacctgtgtagagggcaccatacccaaattattccgcggcaaaatggtgtcctatatccagtgtaaagaagtagactatcggtctgatagaagagaagattattatgatatccagctaagtatcaaaggaaagaaaaatatatttgaatcatttgtggattatgtggcagtagaacagctcgatggggacaataaatacgacgctggggaacatggcttacaggaagcagagaaaggtgtgaaattcctaacattgccaccagtgttacatctacaactgatgagatttatgtatgaccctcagacggaccaaaatatcaagatcaatgataggtttgaattcccagagcagttaccacttgatgaatttttgcaaaaaacagatcctaaggaccctgcaaattatattcttcatgcagtcctggttcatagtggagataatcatggtggacattatgtggtttatctaaaccccaaaggggatggcaaatggtgtaaatttgatgacgacgtggtgtcaaggtgtactaaagaggaagcaattgagcacaattatgggggtcacgatgacgacctgtctgttcgacactgcactaatgcttacatgttagtctacatcagggaatcaaaactgagtgaagttttacaggcggtcaccgaccatgatattcctcagcagttggtggagcgattacaagaagagaaaaggatcgaggctcagaagcggaaggagcggcaggaagcccatctctatatgcaagtgcagatagtcgcagaggaccagttttgtggccaccaagggaatgacatgtacgatgaagaaaaagtgaaatacactgtgttcaaagtattgaagaactcctcgcttgctgagtttgttcagagcctctctcagaccatgggatttccacaagatcaaattcgattgtggcccatgcaagcaaggagtaatggaacaaaacgaccagcaatgttagataatgaagccgacggcaataaaacagtaaatattgttaatagcgtatctggtttggaaccgtgcagaaggcgttagtcctctgcacttagtgcagcttgtttcccttttggtccacttaactagaattggacgttttcttcaatacttgactgtagtttttcgctctgtcacctaagccattagactcttctaaaatcagcgtctcttttggaaatagatgattgagctcagtgataatgaaaacccttggacaatattcctggaaacagttgatcccgagctggctgctagtggagcgaccttacccaagtttgataaagatcatgatgtaatgttatttttgaagatgtatgatcccaaaacgcggagcttgaattactgtgggcatatctacacaccaatatcctgtaaaatacgtgacttgctcccagttatgtgtgacagagcaggatttattcaagatactagccttatcctctatgaggaagttaaaccgaatttaacagagagaattcaggactatgacgtgtctcttgataaagcccttgatgaactaatggatggtgacatcatagtatttcagaaggatgaccctgaaaatgataacagtgaattacccaccgcaaaggagtatttccgagatctctaccaccgcgttgatgtcattttctgtgataaaacaatccctaatgatcctggatttgtggttacgttatcaaatagaatgaattattttcaggttgcaaagacagttgcacagaggctcaacacagatccaatgttgctgcagtttttcaagtctcaaggttatagggatggcccaggtaatcctcttagacataattatgaaggtactttaagagatcttctacagttcttcaagcctagacaacctaagaaactttactatcagcagcttaagatgaaaatcacagactttgagaacaggcgaagttttaaatgtatatggttaaacagccaatttagggaagaggaaataacactatatccagacaagcatgggtgtgtccgggacctgttagaagaatgtaaaaaggccgtggagcttggggagaaagcatcagggaaacttaggctgctagaaattgtaagctacaaaatcattggtgttcatcaagaagatgaactattagaatgtttatctcctgcaacgagccggacgtttcgaatagaggaaatccctttggaccaggtggacatagacaaagagaatgagatgcttgtcacagtggcgcatttccacaaagaggtcttcggaacgttcggaatcccgtttttgctgaggatacaccagggcgagcattttcgagaagtgatgaagcgaatccagagcctgctggacatccaggagaaggagtttgagaagtttaaatttgcaattgtaatgatgggccgacaccagtacataaatgaagacgagtatgaagtaaatttgaaagactttgagccacagcccggtaatatgtctcatcctcggccttggctagggctcgaccacttcaacaaagccccaaagaggagtcgctacacttaccttgaaaaggccattaaaatccataactgatttccaagctggtgtgttcaaggcgaggacggtgtgtgggtggccccttaacagcctagaactttggtgcacgtgccctctagccgaagtcttcagcaagaggattcgctgctggtgttaattttattttattgaggctgttcagtttggcttctctgtatctattgactgccctttttgagcaaaatgaagatgtttttataaagcttggatgccaatgagagttattttatggtaaccacagtgcaaggcaactgtcagcgcaatgggggagaagaggttagtggatcgggggtccctggctcaaggtctctgggctgtccctagtgggcacgagtggctcggctgccttcctggggtcccgtgcaccagccctgcagctagcaagtcttgtgtttaggctcgtctgacctatttccttcagttatactttcaatgaccttttgtgcatctgttaaggcaaaacagagaaactcacaacctaataaatagcgctcttcccttcattgtgtgcattgtcggcccttcctcgggttctcctcctccagctgcctgggggctttttaataaacttgtctcacctcgtcagccactactgtctgcagcccctttgcaaagtggatgcactgaatacagtccggacagacattgtgggggtctttttattaaatcaagaacattgttaaattcaattaaggtttactctgctgccttggcagacttacgatctcaacagttcatacgagcaggtgaaaggattataaatagaatttcgttaaagtggaacagacgacaagaaagccttttagcaagagggcatgctcactagtggttagtaagctgtcgactttgtaaaaaagttaaaaatgaaaaaaaaaggaaaaatgaattgtatatttaatgaatgaacatgtacaatttgccactgggaggaggttcctttttgttgggtgagtctgcaagtgaatttcactgatgttgatattcattgtgtgtagttttatttcggtcccagccccgtttccttttattttggagctaatgccagctgcgtgtctagttttgagtgcagtaaaatagaatcagcaaatcactcttatttttcatccttttccggtattttttgggttgtttctgtgggagcagtgtacaccaactcttcctgtatattgcctttttgctggaaaatgttgtatgttgaataaaattttctataaaaattataattcagtgagttacgtggaagtggaggaagatttctactctccctggaaacaggcctgggaaaccttggcatttgtaacaaggtttcactgagatgtacttttccttctaattccgttttgcgggggcagggtctcttgtttctttttttttttttttttttttttagcctctaactagtcacatttactcttaagaaatgaaaggttttccaggagagaactgtgtacaaataaggtgactggagatgtgacctgatgtgtcacgaggcccttcggggcggcaggcgctatcgtgggcgtggtccttgcaccgtcccatcggccttgccttccagctccgtggcacggtttcctggtctttgggccagtgtgtaccttggagtgacttcctttctcaacttccactgcagtgtgtgtgccttctgctctgagagctgccttgtgacccgtgtgatagaaagcagggagtgagggtccccgcggacctggcccttccctccttcctcccccagaaagaggagttagagcaggggtgcgagagccgttcgctgtgggtttgtctttgaacaaacattaaggtgtcttgtttttgttctgggctgggggttggctgtagtcttaggtaactgaaagttcctactctcccttaaggtattaaatgactctttttccaaaaaaaacg

SEQ ID NO: 377977 - DNA, 4260 bp, Homo sapiens
atgcgagcgggcggggcgtgtcggcccggggcggcggggacagcggcggggacagcggcgggcggctgggacggcgggtgcggcggggccgagcccgcacgatgcctcacttcaccgtggtgccagtggacgggccgaggcgcggcgactatgacaacctcgaggggctcagttgggtggactacggggagcgcgccgagctggatgactcggacggacatggcaaccacagagagagcagcccttttctttcccccttggaggcttccagaggaattgactactatgacaggaacctggcactgtttgaggaagagctggacatccgcccaaaggtatcgtctcttctgggaaagctcgtcagctacaccaacctcacccagggcgccaaagagcatgaggaggccgagagtggggagggcacccgccggagggcagccgaggcacccagcatgggcaccctcatgggggtgtacctgccctgcctgcagaatatctttggggttatcctcttcctgcggctgacctggatggtgggcacagcaggtgtgctacaggccctcctcatcgtgcttatctgctgctgttgtaccctgctgacggccatctccatgagtgccatcgccaccaacggtgtggttccagctgggggctcctatttcatgatctctcgttcactggggccagaatttggaggtgctgtgggcctgtgcttctacctgggaacaacattcgcagcagccatgtacatcctgggggccatcgagatcttgctgacctacattgccccaccagctgccattttttacccatcgggtgctcatgacacgtcgaatgccactttgaacaatatgcgtgtgtatgggaccattttcctgaccttcatgaccctggtggtgtttgtgggggtcaagtatgtgaacaaatttgcctcgctcttcctggcctgtgtgatcatctccatcctctccatctatgctgggggcataaagtctatatttgaccctcccgtgtttccggtatgcatgctgggcaacaggaccctgtcccgggaccagtttgacatctgtgccaagacagctgtagtggacaatgagacagtggccacccagctatggagtttcttctgccacagccccaaccttacgaccgactcctgtgacccctacttcatgctcaacaatgtgaccgagatccctggcatccccggggcagctgctggtgtgctccaggaaaacctgtggagcgcctacctggagaagggtgacatcgtggagaagcatgggctgccctccgcagatgccccgagcctgaaggagagcctgcctctgtacgtggtcgctgacatcgccacatccttcaccgtgctggtcggcatcttcttcccttctgtaacaggcatcatggctggctcaaaccgctctggggaccttcgtgacgcccagaagtctatccctgtggggaccattctggccatcattacaacttccctcgtgtacttcagcagtgtggttctctttggtgcctgcattgagggtgtggttctccgggacaagtatggcgatggtgtcagcaggaacttggtggtgggcacactggcctggccttcaccctgggtcatcgtcatcggctccttcttttcaacgtgtggcgctggcctccagagcctcacaggggcaccacgcctattgcaggccattgccaaggacaacatcatccccttcctccgggtgtttggccacgggaaggtgaatggtgaacccacatgggcactcctcctgacggcactcatcgccgagctgggcatcctcatcgcctccctcgacatggtggcccccatcttatccatgttctttctgatgtgctacctgttcgtgaacctcgcctgtgcggtgcagacactcctgaggacccccaactggcggccccggttcaagtactatcactgggcgctgtccttcctgggcatgagtctctgcctggcccttatgtttgtctcctcctggtactatgccctggtggccatgctcatcgccggcatgatctacaaatacatcgagtaccaaggggctgagaaggagtggggtgacgggatccgaggcctgtccctgagcgctgcccgctacgcgctgttgcggctggaggaggggcctcctcacaccaagaactggcggccgcagctgctggtgctgctgaagctggacgaggacctccacgtgaagtacccgcggctcctcaccttcgcctcccagctcaaggctggcaagggcctgaccattgttggttctgtcatccaggggagcttcttggagagctatggcgaggctcaggccgccgagcagaccatcaagaacatgatggaaattgagaaggtgaagggcttctgccaggtggtggtggccagcaaggtgcgggaggggctggcccacctcatccagtcctgtggcctgggaggcatgcggcataactccgtggtgctgggctggccctacggctggcgacagagcgaggacccccgtgcctggaagaccttcattgacaccgtgcgctgcactacggctgcccacctggccctgctcgtgcccaagaacatcgccttctaccccagcaaccacgagcgctacctggagggccacatagacgtgtggtggatcgtgcacgatggtggcatgctcatgcttctgcccttcctgctgcgccagcataaggtctggaggaagtgccggatgcgcatcttcacagtggcccagatggatgacaacagcatccagatgaagaaggacctggctgtctttctgtaccatctgcgccttgaggccgaggtggaggtggtggagatgcataacagtgacatctctgcatacacctacgagcggacgctgatgatggagcagcggtcgcagatgctgcggcagatgagactgaccaagactgagcgggagcgagaagcccagctggtcaaggatcggcactcggccctgcggctggagagcctgtactcggacgaggaagatgagtctgcagtgggggctgacaagatccagatgacgtggaccagggacaagtacatgactgagacctgggaccccagccatgcccctgacaatttccgggagctggtgcacattaagccggaccaatccaatgtgcggcgcatgcacactgctgtgaagctcaatgaagtcattgtcacgcgctcccacgacgcccgcctggttctcctaaacatgcctggcccacccaggaacagtgagggcgacgagaactacatggagttcctcgaggtgctgaccgagggccttgagcgggtgctgttggtgcgcggtggtggccgtgaagtcatcaccatctactcctgagcccagtgtcatcttgtggcctggagtcgaggtcttggccaggacataacaagctgtggtctggggtaacagcctcttcccagcacccacctgccagccctgcttgcctggccctgtcctggacccagctttgctaggtctccttggaaaccaggcctgggcctcaaaatggagatggatcccaggtcttgtgggaccctgggatgtttggggactttactatctagcaccccagtaggcctgtcctggccagagaagactggtaggggccgagtggggtttgaaggcagccggcccggcccagcccaggagcgctatttattgcatatttattgtttggatgtcaccatcagagacgaagggaagggtagccagggagggagtccagcccagctgcctgcaggaagatctggctcagtctactatgggcagggccccccaccaagctgagccgaatggagacagctgagctgaggcctgactttttcaataaaacattgtgtagttctggggcaaaaagaagcaagctgagaatataatgaagagacttttgggggccgccccgggccccctgaaaagcacctttgagaaaccacttggtggggacgcgcgcgggggaccccaaagagagtcaagtggtgcactagcgtggtccgacaaggcggttgcccaagagggataacaccgggcgaacgacaaagagaacaggggcccggggaagactcgccccgcccggatataaaaaaaaaggcgcccgggagggaggaacccacgagagcgctccgtcggagcaagcagccccaatagggggaggccccgggagagggcacaataggaggggagcgacaatcaaccaaggggaggcacacaacaggaggcagccccatactcagtatagccg

SEQ ID NO: 377978 - DNA, 3471 bp, Homo sapiens
cgagggggaaaacccccataggtaggtcgaggctggtgtgtattgaagaactcctcgcttgctgagtttgttcagagcctctctcagaccatgggatttccacaagatcaaattcgattgtggcccatgcaagcaaggagtaatggaacaaaacgaccagcaatgttagataatgaagccgacggcaataaaacaatgattgagctcagtgataatgaaaacccttggacaatattcctggaaacagttgatcccgagctggctgctagtggagcgaccttacccaagtttgataaagatcatgatgtaatgttatttttgaagatgtatgatcccaaaacgcggagcttgaattactgtgggcatatctacacaccaatatcctgtaaaatacgtgacttgctcccagttatgtgtgacagagcaggatttattcaagatactagccttatcctctatgaggaagttaaaccgaatttaacagagagaattcaggactatgacgtgtctcttgataaagcccttgatgaactaatggatggtgacatcatagtatttcagaaggatgaccctgaaaatgataacagtgaattacccaccgcaaaggagtatttccgagatctctaccaccgcgttgatgtcattttctgtgataaaacaatccctaatgatcctggatttgtggttacgttatcaaatagaatgaattattttcaggttgcaaagacagttgcacagaggctcaacacagatccaatgttgctgcagtttttcaagtctcaaggttatagggatggcccaggtaatcctcttagacataattatgaaggtactttaagagatcttctacagttcttcaagcctagacaacctaagaaactttactatcagcagcttaagatgaaaatcacagactttgagaacaggcgaagttttaaatgtatatggttaaacagccaatttagggaagaggaaataacactatatccagacaagcatgggtgtgtccgggacctgttagaagaatgtaaaaaggccgtggagcttggggagaaagcatcagggaaacttaggctgctagaaattgtaagctacaaaatcattggtgttcatcaagaagatgaactattagaatgtttatctcctgcaacgagccggacgtttcgaatagaggaaatccctttggaccaggtggacatagacaaagagaatgagatgcttgtcacagtggcgcatttccacaaagaggtcttcggaacgttcggaatcccgtttttgctgaggatacaccagggcgagcattttcgagaagtgatgaagcgaatccagagcctgctggacatccaggagaaggagtttgagaagtttaaatttgcaattgtaatgatgggccgacaccagtacataaatgaagacgagtatgaagtaaatttgaaagactttgagccacagcccggtaatatgtctcatcctcggccttggctagggctcgaccacttcaacaaagccccaaagaggagtcgctacacttaccttgaaaaggccattaaaatccataactgatttccaagctggtgtgttcaaggcgaggacggtgtgtgggtggccccttaacagcctagaactttggtgcacgtgccctctagccgaagtcttcagcaagaggattcgctgctggtgttaattttattttattgaggctgttcagtttggcttctctgtatctattgactgccctttttgagcaaaatgaagatgtttttataaagcttggatgccaatgagagttattttatggtaaccacagtgcaaggcaactgtcagcgcaatgggggagaagaggttagtggatcgggggtccctggctcaaggtctctgggctgtccctagtgggcacgagtggctcggctgccttcctggggtcccgtgcaccagccctgcagctagcaagtcttgtgtttaggctcgtctgacctatttccttcagttatactttcaatgaccttttgtgcatctgttaaggcaaaacagagaaactcacaacctaataaatagcgctcttcccttcattgtgtgcattgtcggcccttcctcgggttctcctcctccagctgcctgggggctttttaataaacttgtctcacctcgtcagccactactgtctgcagcccctttgcaaagtggatgcactgaatacagtccggacagacattgtgggggtctttttattaaatcaagaacattgttaaattcaattaaggtttactctgctgccttggcagacttacgatctcaacagttcatacgagcaggtgaaaggattataaatagaatttcgttaaagtggaacagacgacaagaaagccttttagcaagagggcatgctcactagtggttagtaagctgtcgactttgtaaaaaagttaaaaatgaaaaaaaaaggaaaaatgaattgtatatttaatgaatgaacatgtacaatttgccactgggaggaggttcctttttgttgggtgagtctgcaagtgaatttcactgatgttgatattcattgtgtgtagttttatttcggtcccagccccgtttccttttattttggagctaatgccagctgcgtgtctagttttgagtgcagtaaaatagaatcagcaaatcactcttatttttcatccttttccggtattttttgggttgtttctgtgggagcagtgtacaccaactcttcctgtatattgcctttttgctggaaaatgttgtatgttgaataaaattttctataaaaattataattcagtgagttacgtggaagtggaggaagatttctactctccctggaaacaggcctgggaaaccttggcatttgtaacaaggtttcactgagatgtacttttccttctaattccgttttgcgggggcagggtctcttgtttctttttttttttttttttttttttagcctctaactagtcacatttactcttaagaaatgaaaggttttccaggagagaactgtgtacaaataaggtgactggagatgtgacctgatgtgtcacgaggcccttcggggcggcaggcgctatcgtgggcgtggtccttgcaccgtcccatcggccttgccttccagctccgtggcacggtttcctggtctttgggccagtgtgtaccttggagtgacttcctttctcaacttccactgcagtgtgtgtgccttctgctctgagagctgccttgtgacccgtgtgatagaaagcagggagtgagggtccccgcggacctggcccttccctccttcctcccccagaaagaggagttagagcaggggtgcgagagccgttcgctgtgggtttgtctttgaacaaacattaaggtgtcttgtttttgttctgggctgggggttggctgtagtcttaggtaactgaaagttcctactctcccttaaggtattaaatgactctttttccaaaaaaaacg

SEQ ID NO: 377979 - DNA, 5353 bp, Homo sapiens
gtacgtgcgcgtctccctgccgccgccgccgcccgccgcgggccgccccggggccgccgtcgccgacgacgcgcgggaggaggaggaggaggccgccccgccgccgccgccgccgccgccgccccggctcgccgccgcccgcccgccgggctcgcagccccggcccccggccgcaggcgaggcccaggccgcggccgacatgaaccaccagcagcagcagcagcagcagaaagcgggcgagcagcagttgagcgagcccgaggacatggagatggaagcgggagatacagatgacccaccaagaattactcagaaccctgtgatcaatgggaatgtggccctgagtgatggacacaacaccgcggaggaggacatggaggatgacaccagttggcgctccgaggcaacctttcagttcactgtggagcgcttcagcagactgagtgagtcggtccttagccctccgtgttttgtgcgaaatctgccatggaagattatggtgatgccacgcttttatccagacagaccacaccaaaaaagcgtaggattctttctccagtgcaatgctgaatctgattccacgtcatggtcttgccatgcacaagcagtgctgaagataataaattacagagatgatgaaaagtcgttcagtcgtcgtattagtcatttgttcttccataaagaaaatgattggggattttccaattttatggcctggagtgaagtgaccgatcctgagaaaggatttatagatgatgacaaagttacctttgaagtctttgtacaggcggatgctccccatggagttgcgtgggattcaaagaagcacacaggctacgtcggcttaaagaatcagggagcgacttgttacatgaacagcctgctacagacgttatttttcacgaatcagctacgaaaggctgtgtacatgatgccaaccgagggggatgattcgtctaaaagcgtccctttagcattacaaagagtgttctatgaattacagcatagtgataaacctgtaggaacaaaaaagttaacaaagtcatttgggtgggaaactttagatagcttcatgcaacatgatgttcaggagctttgtcgagtgttgctcgataatgtggaaaataagatgaaaggcacctgtgtagagggcaccatacccaaattattccgcggcaaaatggtgtcctatatccagtgtaaagaagtagactatcggtctgatagaagagaagattattatgatatccagctaagtatcaaaggaaagaaaaatatatttgaatcatttgtggattatgtggcagtagaacagctcgatggggacaataaatacgacgctggggaacatggcttacaggaagcagagaaaggtgtgaaattcctaacattgccaccagtgttacatctacaactgatgagatttatgtatgaccctcagacggaccaaaatatcaagatcaatgataggtttgaattcccagagcagttaccacttgatgaatttttgcaaaaaacagatcctaaggaccctgcaaattatattcttcatgcagtcctggttcatagtggagataatcatggtggacattatgtggtttatctaaaccccaaaggggatggcaaatggtgtaaatttgatgacgacgtggtgtcaaggtgtactaaagaggaagcaattgagcacaattatgggggtcacgatgacgacctgtctgttcgacactgcactaatgcttacatgttagtctacatcagggaatcaaaactgagtgaagttttacaggcggtcaccgaccatgatattcctcagcagttggtggagcgattacaagaagagaaaaggatcgaggctcagaagcggaaggagcggcaggaagcccatctctatatgcaagtgcagatagtcgcagaggaccagttttgtggccaccaagggaatgacatgtacgatgaagaaaaagtgaaatacactgtgttcaaagtattgaagaactcctcgcttgctgagtttgttcagagcctctctcagaccatgggatttccacaagatcaaattcgattgtggcccatgcaagcaaggagtaatggaacaaaacgaccagcaatgttagataatgaagccgacggcaataaaacaatgattgagctcagtgataatgaaaacccttggacaatattcctggaaacagttgatcccgagctggctgctagtggagcgaccttacccaagtttgataaagatcatgatgtaatgttatttttgaagatgtatgatcccaaaacgcggagcttgaattactgtgggcatatctacacaccaatatcctgtaaaatacgtgacttgctcccagttatgtgtgacagagcaggatttattcaagatactagccttatcctctatgaggaagttaaaccgaatttaacagagagaattcaggactatgacgtgtctcttgataaagcccttgatgaactaatggatggtgacatcatagtatttcagaaggatgaccctgaaaatgataacagtgaattacccaccgcaaaggagtatttccgagatctctaccaccgcgttgatgtcattttctgtgatgttgcaaagacagttgcacagaggctcaacacagatccaatgttgctgcagtttttcaagtctcaaggttatagggatggcccaggtaatcctcttagacataattatgaaggtactttaagagatcttctacagttcttcaagcctagacaacctaagaaactttactatcagcagcttaagatgaaaatcacagactttgagaacaggcgaagttttaaatgtatatggttaaacagccaatttagggaagaggaaataacactatatccagacaagcatgggtgtgtccgggacctgttagaagaatgtaaaaaggccgtggagcttggggagaaagcatcagggaaacttaggctgctagaaattgtaagctacaaaatcattggtgttcatcaagaagatgaactattagaatgtttatctcctgcaacgagccggacgtttcgaatagaggaaatccctttggaccaggtggacatagacaaagagaatgagatgcttgtcacagtggcgcatttccacaaagaggtcttcggaacgttcggaatcccgtttttgctgaggatacaccagggcgagcattttcgagaagtgatgaagcgaatccagagcctgctggacatccaggagaaggagtttgagaagtttaaatttgcaattgtaatgatgggccgacaccagtacataaatgaagacgagtatgaagtaaatttgaaagactttgagccacagcccggtaatatgtctcatcctcggccttggctagggctcgaccacttcaacaaagccccaaagaggagtcgctacacttaccttgaaaaggccattaaaatccataactgatttccaagctggtgtgttcaaggcgaggacggtgtgtgggtggccccttaacagcctagaactttggtgcacgtgccctctagccgaagtcttcagcaagaggattcgctgctggtgttaattttattttattgaggctgttcagtttggcttctctgtatctattgactgccctttttgagcaaaatgaagatgtttttataaagcttggatgccaatgagagttattttatggtaaccacagtgcaaggcaactgtcagcgcaatgggggagaagaggttagtggatcgggggtccctggctcaaggtctctgggctgtccctagtgggcacgagtggctcggctgccttcctggggtcccgtgcaccagccctgcagctagcaagtcttgtgtttaggctcgtctgacctatttccttcagttatactttcaatgaccttttgtgcatctgttaaggcaaaacagagaaactcacaacctaataaatagcgctcttcccttcattgtgtgcattgtcggcccttcctcgggttctcctcctccagctgcctgggggctttttaataaacttgtctcacctcgtcagccactactgtctgcagcccctttgcaaagtggatgcactgaatacagtccggacagacattgtgggggtctttttattaaatcaagaacattgttaaattcaattaaggtttactctgctgccttggcagacttacgatctcaacagttcatacgagcaggtgaaaggattataaatagaatttcgttaaagtggaacagacgacaagaaagccttttagcaagagggcatgctcactagtggttagtaagctgtcgactttgtaaaaaagttaaaaatgaaaaaaaaaggaaaaatgaattgtatatttaatgaatgaacatgtacaatttgccactgggaggaggttcctttttgttgggtgagtctgcaagtgaatttcactgatgttgatattcattgtgtgtagttttatttcggtcccagccccgtttccttttattttggagctaatgccagctgcgtgtctagttttgagtgcagtaaaatagaatcagcaaatcactcttatttttcatccttttccggtattttttgggttgtttctgtgggagcagtgtacaccaactcttcctgtatattgcctttttgctggaaaatgttgtatgttgaataaaattttctataaaaattataattcagtgagttacgtggaagtggaggaagatttctactctccctggaaacaggcctgggaaaccttggcatttgtaacaaggtttcactgagatgtacttttccttctaattccgttttgcgggggcagggtctcttgtttctttttttttttttttttttttttagcctctaactagtcacatttactcttaagaaatgaaaggttttccaggagagaactgtgtacaaataaggtgactggagatgtgacctgatgtgtcacgaggcccttcggggcggcaggcgctatcgtgggcgtggtccttgcaccgtcccatcggccttgccttccagctccgtggcacggtttcctggtctttgggccagtgtgtaccttggagtgacttcctttctcaacttccactgcagtgtgtgtgccttctgctctgagagctgccttgtgacccgtgtgatagaaagcagggagtgagggtccccgcggacctggcccttccctccttcctcccccagaaagaggagttagagcaggggtgcgagagccgttcgctgtgggtttgtctttgaacaaacattaaggtgtcttgtttttgttctgggctgggggttggctgtagtcttaggtaactgaaagttcctactctcccttaaggtattaaatgactctttttccaaaaaaaacg

SEQ ID NO: 377980 - DNA, 3711 bp, Homo sapiens
gtacgtgcgcgtctccctgccgccgccgccgcccgccgcgggccgccccggggccgccgtcgccgacgacgcgcgggaggaggaggaggaggccgccccgccgccgccgccgccgccgccgccccggctcgccgccgcccgcccgccgggctcgcagccccggcccccggccgcaggcgaggcccaggccgcggccgacatgaaccaccagcagcagcagcagcagcagaaagcgggcgagcagcagttgagcgagcccgaggacatggagatggaagcgggagatacagatgacccaccaagaattactcagaaccctgtgatcaatgggaatgtggccctgagtgatggacacaacaccgcggaggaggacatggaggatgacaccagttggcgctccgaggcaacctttcagttcactgtggagcgcttcagcagactgagtgagtcggtccttagccctccgtgttttgtgcgaaatctgccatggaagattatggtgatgccacgcttttatccagacagaccacaccaaaaaagcgtaggattctttctccagtgcaatgctgaatctgattccacgtcatggtcttgccatgcacaagcagtgctgaagataataaattacagagatgatgaaaagtcgttcagtcgtcgtattagtcatttgttcttccataaagaaaatgattggggattttccaattttatggcctggagtgaagtgaccgatcctgagaaaggatttatagatgatgacaaagttacctttgaagtctttgtacaggcggatgctccccatggagttgcgtgggattcaaagaagcacacaggctacgtcggcttaaagaatcagggagcgacttgttacatgaacagcctgctacagacgttatttttcacgaatcagctacgaaaggctgtgtacatgatgccaaccgagggggatgattcgtctaaaagcgtccctttagcattacaaagagtgttctatgaattacagcatagtgataaacctgtaggaacaaaaaagttaacaaagtcatttgggtgggaaactttagatagcttcatgcaacatgatgttcaggagctttgtcgagtgttgctcgataatgtggaaaataagatgaaaggcacctgtgtagagggcaccatacccaaattattccgcggcaaaatggtgtcctatatccagtgtaaagaagtagactatcggtctgatagaagagaagattattatgatatccagctaagtatcaaaggaaagaaaaatatatttgaatcatttgtggattatgtggcagtagaacagctcgatggggacaataaatacgacgctggggaacatggcttacaggaagcagagaaaggtgtgaaattcctaacattgccaccagtgttacatctacaactgatgagatttatgtatgaccctcagacggaccaaaatatcaagatcaatgataggtttgaattcccagagcagttaccacttgatgaatttttgcaaaaaacagatcctaaggaccctgcaaattatattcttcatgcagtcctggttcatagtggagataatcatggtggacattatgtggtttatctaaaccccaaaggggatggcaaatggtgtaaatttgatgacgacgtggtgtcaaggtgtactaaagaggaagcaattgagcacaattatgggggtcacgatgacgacctgtctgttcgacactgcactaatgcttacatgttagtctacatcagggaatcaaaactgagtgaagttttacaggcggtcaccgaccatgatattcctcagcagttggtggagcgattacaagaagagaaaaggatcgaggctcagaagcggaaggagcggcaggaagcccatctctatatgcaagtgcagatagtcgcagaggaccagttttgtggccaccaagggaatgacatgtacgatgaagaaaaagtgaaatacactgtgttcaaagtattgaagaactcctcgcttgctgagtttgttcagagcctctctcagaccatgggatttccacaagatcaaattcgattgtggcccatgcaagcaaggagtaatggaacaaaacgaccagcaatgttagataatgaagccgacggcaataaaacaatgattgagctcagtgataatgaaaacccttggacaatattcctggaaacagttgatcccgagctggctgctagtggagcgaccttacccaagtttgataaagatcatgatgtaatgttatttttgaagatgtatgatcccaaaacgcggagcttgaattactgtgggcatatctacacaccaatatcctgtaaaatacgtgacttgctcccagttatgtgtgacagagcaggatttattcaagatactagccttatcctctatgaggaagttaaaccgaatttaacagagagaattcaggactatgacgtgtctcttgataaagcccttgatgaactaatggatggtgacatcatagtatttcagaaggatgaccctgaaaatgataacagtgaattacccaccgcaaaggagtatttccgagatctctaccaccgcgttgatgtcattttctgtgataaaacaatccctaatgatcctggatttgtggttacgttatcaaatagaatgaattattttcaggttgcaaagacagttgcacagaggctcaacacagatccaatgttgctgcagtttttcaagtctcaaggttatagggatggcccaggtaatcctcttagacataattatgaaggtactttaagagatcttctacagttcttcaagcctagacaacctaagaaactttactatcagcagcttaagatgaaaatcacagactttgagaacaggcgaagttttaaatgtatatggttaaacagccaatttagggaagaggaaataacactatatccagacaagcatgggtgtgtccgggacctgttagaagaatgtaaaaaggccgtggagcttggggagaaagcatcagggaaacttaggctgctagaaattgtaagctacaaaatcattggtgttcatcaagaagatgaactattagaatgtttatctcctgcaacgagccggacgtttcgaatagaggaaatccctttggaccaggtggacatagacaaagagaatgagatgcttgtcacagtggcgcatttccacaaagaggtcttcggaacgttcggaatcccgtttttgctgaggatacaccagggcgagcattttcgagaagtgatgaagcgaatccagagcctgctggacatccaggagaaggagtttgagaagtttaaatttgcaattgtaatgatgggccgacaccagtacataaatgaagacgagtatgaagtaaatttgaaagactttgagccacagcccggtaatatgtctcatcctcggccttggctagggctcgaccacttcaacaaagccccaaagaggagtcgctacacttaccttgaaaaggccattaaaatccataactgatttccaagctggtgtgttcaaggcgaggacggtgtgtgggtggccccttaacagcctagaactttggtgcacgtgccctctagccgaagtcttcagcaagaggattcgctgctggtgttaattttattttattgaggctgttcagtttggcttctctgtatctattgactgccctttttgagcaaaatgaagatgtttttata

SEQ ID NO: 377981 - DNA, 4215 bp, Homo sapiens
gtacgtgcgcgtctccctgccgccgccgccgcccgccgcgggccgccccggggccgccgtcgccgacgacgcgcgggaggaggaggaggaggccgccccgccgccgccgccgccgccgccgccccggctcgccgccgcccgcccgccgggctcgcagccccggcccccggccgcaggcgaggcccaggccgcggccgacatgaaccaccagcagcagcagcagcagcagaaagcgggcgagcagcagttgagcgagcccgaggacatggagatggaagcgggagatacagatgacccaccaagaattactcagaaccctgtgatcaatgggaatgtggccctgagtgatggacacaacaccgcggaggaggacatggaggatgacaccagttggcgctccgaggcaacctttcagttcactgtggagcgcttcagcagactgagtgagtcggtccttagccctccgtgttttgtgcgaaatctgccatggaagattatggtgatgccacgcttttatccagacagaccacaccaaaaaagcgtaggattctttctccagtgcaatgctgaatctgattccacgtcatggtcttgccatgcacaagcagtgctgaagataataaattacagagatgatgaaaagtcgttcagtcgtcgtattagtcatttgttcttccataaagaaaatgattggggattttccaattttatggcctggagtgaagtgaccgatcctgagaaaggatttatagatgatgacaaagttacctttgaagtctttgtacaggcggatgctccccatggagttgcgtgggattcaaagaagcacacaggctacgtcggcttaaagaatcagggagcgacttgttacatgaacagcctgctacagacgttatttttcacgaatcagctacgaaaggctgtgtacatgatgccaaccgagggggatgattcgtctaaaagcgtccctttagcattacaaagagtgttctatgaattacagcatagtgataaacctgtaggaacaaaaaagttaacaaagtcatttgggtgggaaactttagatagcttcatgcaacatgatgttcaggagctttgtcgagtgttgctcgataatgtggaaaataagatgaaaggcacctgtgtagagggcaccatacccaaattattccgcggcaaaatggtgtcctatatccagtgtaaagaagtagactatcggtctgatagaagagaagattattatgatatccagctaagtatcaaaggaaagaaaaatatatttgaatcatttgtggattatgtggcagtagaacagctcgatggggacaataaatacgacgctggggaacatggcttacaggaagcagagaaaggtgtgaaattcctaacattgccaccagtgttacatctacaactgatgagatttatgtatgaccctcagacggaccaaaatatcaagatcaatgataggtttgaattcccagagcagttaccacttgatgaatttttgcaaaaaacagatcctaaggaccctgcaaattatattcttcatgcagtcctggttcatagtggagataatcatggtggacattatgtggtttatctaaaccccaaaggggatggcaaatggtgtaaatttgatgacgacgtggtgtcaaggtgtactaaagaggaagcaattgagcacaattatgggggtcacgatgacgacctgtctgttcgacactgcactaatgcttacatgttagtctacatcagggaatcaaaactgagtgaagttttacaggcggtcaccgaccatgatattcctcagcagttggtggagcgattacaagaagagaaaaggatcgaggctcagaagcggaaggagcggcaggaagcccatctctatatgcaagtgcagatagtcgcagaggaccagttttgtggccaccaagggaatgacatgtacgatgaagaaaaagtgaaatacactgtgttcaaagtattgaagaactcctcgcttgctgagtttgttcagagcctctctcagaccatgggatttccacaagatcaaattcgattgtggcccatgcaagcaaggagtaatggaacaaaacgaccagcaatgttagataatgaagccgacggcaataaaacaatgattgagctcagtgataatgaaaacccttggacaatattcctggaaacagttgatcccgagctggctgctagtggagcgaccttacccaagtttgataaagatcatgatgtaatgttatttttgaagatgtatgatcccaaaacgcggagcttgaattactgtgggcatatctacacaccaatatcctgtaaaatacgtgacttgctcccagttatgtgtgacagagcaggatttattcaagatactagccttatcctctatgaggaagttaaaccgaatttaacagagagaattcaggactatgacgtgtctcttgataaagcccttgatgaactaatggatggtgacatcatagtatttcagaaggatgaccctgaaaatgataacagtgaattacccaccgcaaaggagtatttccgagatctctaccaccgcgttgatgtcattttctgtgataaaacaatccctaatgatcctggatttgtggttacgttatcaaatagaatgaattattttcaggttgcaaagacagttgcacagaggctcaacacagatccaatgttgctgcagtttttcaagtctcaaggttatagggatggcccaggtaatcctcttagacataattatgaaggtactttaagagatcttctacagttcttcaagcctagacaacctaagaaactttactatcagcagcttaagatgaaaatcacagactttgagaacaggcgaagttttaaatgtatatggttaaacagccaatttagggaagaggaaataacactatatccagacaagcatgggtgtgtccgggacctgttagaagaatgtaaaaaggccgtggagcttggggagaaagcatcagggaaacttaggctgctagaaattgtaagctacaaaatcattggtgttcatcaagaagatgaactattagaatgtttatctcctgcaacgagccggacgtttcgaatagaggaaatccctttggaccaggtggacatagacaaagagaatgagatgcttgtcacagtggcgcatttccacaaagaggtcttcggaacgttcggaatcccgtttttgctgaggatacaccagggcgagcattttcgagaagtgatgaagcgaatccagagcctgctggacatccaggagaaggagtttgagaagtttaaatttgcaattgtaatgatgggccgacaccagtacataaatgaagacgagtatgaagtaaatttgaaagactttgagccacagcccggtaatatgtctcatcctcggccttggctagggctcgaccacttcaacaaagccccaaagaggagtcgctacacttaccttgaaaaggccattaaaatccataactgatttccaagctggtgtgttcaaggcgaggacggtgtgtgggtggccccttaacagcctagaactttggtgcacgtgccctctagccgaagtcttcagcaagaggattcgctgctggtgttaattttattttattgaggctgttcagtttggcttctctgtatctattgactgccctttttgagcaaaatgaagatgtttttataaagcttggatgccaatgagagttattttatggtaaccacagtgcaaggcaactgtcagcgcaatgggggagaagaggttagtgtagctgaggagccattttgggccacaggtttggcacacagaggctttagctaagcaggcaggctggacacgtgggcctcctctgtcttgctcttcctctcatctcctcttgtgttcctggttctcatggcagccgggctgcagttcccttggccctttcaactgaaactgcctttccagaggccactcacaatcccacccccattgctacctccagggtggttcacctctgacttccttacaacccctcagcaaggaaacgcccgcttaggatttcccaactcaggatttctcctcttccttccactcctggttcttctccaagtccatggttcttcgctctcccatggattcttccttgtctttcttggttgacccttccagctctgtccctctctagttccctgagtcctggtccattt

SEQ ID NO: 377982 - DNA, 4389 bp, Homo sapiens
atgcgagcgggcggggcgtgtcggcccggggcggcggggacagcggcggggacagcggcgggcggctgggacggcgggtgcggcggggccgagcccgcacgatgcctcacttcaccgtggtgccagtggacgggccgaggcgcggcgactatgacaacctcgaggggctcagttgggtggactacggggagcgcgccgagctggatgactcggacggacatggcaaccacagagagagcagcccttttctttcccccttggaggcttccagaggaattgactactatgacaggaacctggcactgtttgaggaagagctggacatccgcccaaaggtatcgtctcttctgggaaagctcgtcagctacaccaacctcacccagggcgccaaagagcatgaggaggccgagagtggggagggcacccgccggagggcagccgaggcacccagcatgggcaccctcatgggggtgtacctgccctgcctgcagaatatctttggggttatcctcttcctgcggctgacctggatggtgggcacagcaggtgtgctacaggccctcctcatcgtgcttatctgctgctgttgtaccctgctgacggccatctccatgagtgccatcgccaccaacggtgtggttccagctgggggctcctatttcatgatctctcgttcactggggccagaatttggaggtgctgtgggcctgtgcttctacctgggaacaacattcgcagcagccatgtacatcctgggggccatcgagatcttgctgacctacattgccccaccagctgccattttttacccatcgggtgctcatgacacgtcgaatgccactttgaacaatatgcgtgtgtatgggaccattttcctgaccttcatgaccctggtggtgtttgtgggggtcaagtatgtgaacaaatttgcctcgctcttcctggcctgtgtgatcatctccatcctctccatctatgctgggggcataaagtctatatttgaccctcccgtgtttccggtatgcatgctgggcaacaggaccctgtcccgggaccagtttgacatctgtgccaagacagctgtagtggacaatgagacagtggccacccagctatggagtttcttctgccacagccccaaccttacgaccgactcctgtgacccctacttcatgctcaacaatgtgaccgagatccctggcatccccggggcagctgctggtgtgctccagggtgggtcctccctcccgtcgtcttgctcttgagcccacaggctgagcaggggcacagagcacagagctgtccttgtgtggccagcttgggaacgggggcaggactggccgccttcccagccccccagtgtcctcccagcctggctcctggcagccgagtttggagtgagtggagcctgtctggccagcgtccaaggcctgcagcagcctgtcttccccagccaccagcccctgacactgcctggggatgttcccacaggatccataaaggcctctgtggaaggcgggcagtggcgggctctgggtgacggtggttcagccacctttgtctgtcgacttctagctgggcagctccttctctgtggtcagggtagccctgtggctgacgctgcagtcattgggctgaagctgttccctgagtccccaaagttgccctgcatctgcgcctctggctaggctgccccaaactacctggggtagtggggggcagctgtggtggtgacacagctacccctgcagaaaacctgtggagcgcctacctggagaagggtgacatcgtggagaagcatgggctgccctccgcagatgccccgagcctgaaggagagcctgcctctgtacgtggtcgctgacatcgccacatccttcaccgtgctggtcggcatcttcttcccttctgtaacaggcatcatggctggctcaaaccgctctggggaccttcgtgacgcccagaagtctatccctgtggggaccattctggccatcattacaacttccctcgtgtacttcagcagtgtggttctctttggtgcctgcattgagggtgtggttctccgggacaagtatggcgatggtgtcagcaggaacttggtggtgggcacactggcctggccttcaccctgggtcatcgtcatcggctccttcttttcaacgtgtggcgctggcctccagagcctcacaggggcaccacgcctattgcaggccattgccaaggacaacatcatccccttcctccgggtgtttggccacgggaaggtgaatggtgaacccacatgggcactcctcctgacggcactcatcgccgagctgggcatcctcatcgcctccctcgacatggtggcccccatcttatccatgttctttctgatgtgctacctgttcgtgaacctcgcctgtgcggtgcagacactcctgaggacccccaactggcggccccggttcaagtactatcactgggcgctgtccttcctgggcatgagtctctgcctggcccttatgtttgtctcctcctggtactatgccctggtggccatgctcatcgccggcatgatctacaaatacatcgagtaccaaggggctgagaaggagtggggtgacgggatccgaggcctgtccctgagcgctgcccgctacgcgctgttgcggctggaggaggggcctcctcacaccaagaactggcggccgcagctgctggtgctgctgaagctggacgaggacctccacgtgaagtacccgcggctcctcaccttcgcctcccagctcaaggctggcaagggcctgaccattgttggttctgtcatccaggggagcttcttggagagctatggcgaggctcaggccgccgagcagaccatcaagaacatgatggaaattgagaaggtgaagggcttctgccaggtggtggtggccagcaaggtgcgggaggggctggcccacctcatccagtcctgtggcctgggaggcatgcggcataactccgtggtgctgggctggccctacggctggcgacagagcgaggacccccgtgcctggaagaccttcattgacaccgtgcgctgcactacggctgcccacctggccctgctcgtgcccaagaacatcgccttctaccccagcaaccacgagcgctacctggagggccacatagacgtgtggtggatcgtgcacgatggtggcatgctcatgcttctgcccttcctgctgcgccagcataaggtctggaggaagtgccggatgcgcatcttcacagtggcccagatggatgacaacagcatccagatgaagaaggacctggctgtctttctgtaccatctgcgccttgaggccgaggtggaggtggtggagatgcataacagtgacatctctgcatacacctacgagcggacgctgatgatggagcagcggtcgcagatgctgcggcagatgagactgaccaagactgagcgggagcgagaagcccagctggtcaaggatcggcactcggccctgcggctggagagcctgtactcggacgaggaagatgagtctgcagtgggggctgacaagatccagatgacgtggaccagggacaagtacatgactgagacctgggaccccagccatgcccctgacaatttccgggagctggtgcacattaagccggaccaatccaatgtgcggcgcatgcacactgctgtgaagctcaatgaagtcattgtcacgcgctcccacgacgcccgcctggttctcctaaacatgcctggcccacccaggaacagtgagggcgacgagaactacatggagttcctcgaggtgctgaccgagggccttgagcgggtgctgttggtgcgcggtggtggccgtgaagtcatcaccatctactcctgagcccagtgtcatcttgtggcctggagtcgaggtcttggccaggacataacaagctgtggtctggggtaacagcctcttcccagcacccacctgccagccctgcttgcctggccctgtcctggacccagctttgctaggtctccttggaaaccaggcctgggcctcaaaatggagatggatcccaggtcttgtgggaccctgggatgtttggggactttactatctagcaccccagtaggcctgtcctggccagagaagactggtaggggccgagtggggtttgaaggcagccggcccggcccagcccaggagcgctatttattgcatatttattgtttggatgtcaccatcagagacgaagggaagggtagccagggagggagtccagcccagctgcctgcaggaagatctggctcagtctactatgggcagggccccccaccaagctgagccgaatggagacagctgagctgaggcctgactttttcaataaaacattgtgtagttctggg

SEQ ID NO: 377983 - DNA, 3776 bp, Homo sapiens
gtcttgcggggcccagcggctctgattccgtaccccccaccccaagggctggaggctggcagtaggcgtagtcagaggacgccacccgagccacgcgagggagaagagtggagatagacaagacatggcaaccacagagagagcagcccttttctttcccccttggaggcttccagaggaattgactactatgacaggaacctggcactgtttgaggaagagctggacatccgcccaaaggtatcgtctcttctgggaaagctcgtcagctacaccaacctcacccagggcgccaaagagcatgaggaggccgagagtggggagggcacccgccggagggcagccgaggcacccagcatgggcaccctcatgggggtgtacctgccctgcctgcagaatatctttggggttatcctcttcctgcggctgacctggatggtgggcacagcaggtgtgctacaggccctcctcatcgtgcttatctgctgctgttgtaccctgctgacggccatctccatgagtgccatcgccaccaacggtgtggttccagctgggggctcctatttcatgatctctcgttcactggggccagaatttggaggtgctgtgggcctgtgcttctacctgggaacaacattcgcagcagccatgtacatcctgggggccatcgagatcttgctgacctacattgccccaccagctgccattttttacccatcgggtgctcatgacacgtcgaatgccactttgaacaatatgcgtgtgtatgggaccattttcctgaccttcatgaccctggtggtgtttgtgggggtcaagtatgtgaacaaatttgcctcgctcttcctggcctgtgtgatcatctccatcctctccatctatgctgggggcataaagtctatatttgaccctcccgtgtttccggtatgcatgctgggcaacaggaccctgtcccgggaccagtttgacatctgtgccaagacagctgtagtggacaatgagacagtggccacccagctatggagtttcttctgccacagccccaaccttacgaccgactcctgtgacccctacttcatgctcaacaatgtgaccgagatccctggcatccccggggcagctgctggtgtgctccaggaaaacctgtggagcgcctacctggagaagggtgacatcgtggagaagcatgggctgccctccgcagatgccccgagcctgaaggagagcctgcctctgtacgtggtcgctgacatcgccacatccttcaccgtgctggtcggcatcttcttcccttctgtaacaggcatcatggctggctcaaaccgctctggggaccttcgtgacgcccagaagtctatccctgtggggaccattctggccatcattacaacttccctcgtgtacttcagcagtgtggttctctttggtgcctgcattgagggtgtggttctccgggacaagtatggcgatggtgtcagcaggaacttggtggtgggcacactggcctggccttcaccctgggtcatcgtcatcggctccttcttttcaacgtgtggcgctggcctccagagcctcacaggggcaccacgcctattgcaggccattgccaaggacaacatcatccccttcctccgggtgtttggccacgggaaggtgaatggtgaacccacatgggcactcctcctgacggcactcatcgccgagctgggcatcctcatcgcctccctcgacatggtggcccccatcttatccatgttctttctgatgtgctacctgttcgtgaacctcgcctgtgcggtgcagacactcctgaggacccccaactggcggccccggttcaagtactatcactgggcgctgtccttcctgggcatgagtctctgcctggcccttatgtttgtctcctcctggtactatgccctggtggccatgctcatcgccggcatgatctacaaatacatcgagtaccaaggggctgagaaggagtggggtgacgggatccgaggcctgtccctgagcgctgcccgctacgcgctgttgcggctggaggaggggcctcctcacaccaagaactggcggccgcagctgctggtgctgctgaagctggacgaggacctccacgtgaagtacccgcggctcctcaccttcgcctcccagctcaaggctggcaagggcctgaccattgttggttctgtcatccaggggagcttcttggagagctatggcgaggctcaggccgccgagcagaccatcaagaacatgatggaaattgagaaggtgaagggcttctgccaggtggtggtggccagcaaggtgcgggaggggctggcccacctcatccagtcctgtggcctgggaggcatgcggcataactccgtggtgctgggctggccctacggctggcgacagagcgaggacccccgtgcctggaagaccttcattgacaccgtgcgctgcactacggctgcccacctggccctgctcgtgcccaagaacatcgccttctaccccagcaaccacgagcgctacctggagggccacatagacgtgtggtggatcgtgcacgatggtggcatgctcatgcttctgcccttcctgctgcgccagcataaggtctggaggaagtgccggatgcgcatcttcacagtggcccagatggatgacaacagcatccagatgaagaaggacctggctgtctttctgtaccatctgcgccttgaggccgaggtggaggtggtggagatgcataacagtgacatctctgcatacacctacgagcggacgctgatgatggagcagcggtcgcagatgctgcggcagatgagactgaccaagactgagcgggagcgagaagcccagctggtcaaggatcggcactcggccctgcggctggagagcctgtactcggacgaggaagatgagtctgcagtgggggctgacaagatccagatgacgtggaccagggacaagtacatgactgagacctgggaccccagccatgcccctgacaatttccgggagctggtgcacattaagccggaccaatccaatgtgcggcgcatgcacactgctgtgaagctcaatgaagtcattgtcacgcgctcccacgacgcccgcctggttctcctaaacatgcctggcccacccaggaacagtgagggcgacgagaactacatggagttcctcgaggtgctgaccgagggccttgagcgggtgctgttggtgcgcggtggtggccgtgaagtcatcaccatctactcctgagcccagtgtcatcttgtggcctggagtcgaggtcttggccaggacataacaagctgtggtctggggtaacagcctcttcccagcacccacctgccagccctgcttgcctggccctgtcctggacccagctttgctaggtctccttggaaaccaggcctgggcctcaaaatggagatggatcccaggtcttgtgggaccctgggatgtttggggactttactatctagcaccccagtaggcctgtcctggccagagaagactggtaggggccgagtggggtttgaaggcagccggcccggcccagcccaggagcgctatttattgcatatttattgtttggatgtcaccatcagagacgaagggaagggtagccagggagggagtccagcccagctgcctgcaggaagatctggctcagtctactatgggcagggccccccaccaagctgagccgaatggagacagctgagctgaggcctgactttttcaataaaacattgtgtagttctggg

SEQ ID NO: 377984 - DNA, 3311 bp, Homo sapiens
atgcgagcgggcggggcgtgtcggcccggggcggcggggacagcggcggggacagcggcgggcggctgggacggcgggtgcggcggggccgagcccgcacgatgcctcacttcaccgtggtgccagtggacgggccgaggcgcggcgactatgacaacctcgaggggctcagttgggtggactacggggagcgcgccgagctggatgactcggacgacctacattgccccaccagctgccattttttacccatcgggtgctcatgacacgtcgaatgccactttgaacaatatgcgtgtgtatgggaccattttcctgaccttcatgaccctggtggtgtttgtgggggtcaagtatgtgaacaaatttgcctcgctcttcctggcctgtgtgatcatctccatcctctccatctatgctgggggcataaagtctatatttgaccctcccgtgtttccggtatgcatgctgggcaacaggaccctgtcccgggaccagtttgacatctgtgccaagacagctgtagtggacaatgagacagtggccacccagctatggagtttcttctgccacagccccaaccttacgaccgactcctgtgacccctacttcatgctcaacaatgtgaccgagatccctggcatccccggggcagctgctggtgtgctccaggaaaacctgtggagcgcctacctggagaagggtgacatcgtggagaagcatgggctgccctccgcagatgccccgagcctgaaggagagcctgcctctgtacgtggtcgctgacatcgccacatccttcaccgtgctggtcggcatcttcttcccttctgtaacaggcatcatggctggctcaaaccgctctggggaccttcgtgacgcccagaagtctatccctgtggggaccattctggccatcattacaacttccctcgtgtacttcagcagtgtggttctctttggtgcctgcattgagggtgtggttctccgggacaagtatggcgatggtgtcagcaggaacttggtggtgggcacactggcctggccttcaccctgggtcatcgtcatcggctccttcttttcaacgtgtggcgctggcctccagagcctcacaggggcaccacgcctattgcaggccattgccaaggacaacatcatccccttcctccgggtgtttggccacgggaaggtgaatggtgaacccacatgggcactcctcctgacggcactcatcgccgagctgggcatcctcatcgcctccctcgacatggtggcccccatcttatccatgttctttctgatgtgctacctgttcgtgaacctcgcctgtgcggtgcagacactcctgaggacccccaactggcggccccggttcaagtactatcactgggcgctgtccttcctgggcatgagtctctgcctggcccttatgtttgtctcctcctggtactatgccctggtggccatgctcatcgccggcatgatctacaaatacatcgagtaccaaggggctgagaaggagtggggtgacgggatccgaggcctgtccctgagcgctgcccgctacgcgctgttgcggctggaggaggggcctcctcacaccaagaactggcggccgcagctgctggtgctgctgaagctggacgaggacctccacgtgaagtacccgcggctcctcaccttcgcctcccagctcaaggctggcaagggcctgaccattgttggttctgtcatccaggggagcttcttggagagctatggcgaggctcaggccgccgagcagaccatcaagaacatgatggaaattgagaaggtgaagggcttctgccaggtggtggtggccagcaaggtgcgggaggggctggcccacctcatccagtcctgtggcctgggaggcatgcggcataactccgtggtgctgggctggccctacggctggcgacagagcgaggacccccgtgcctggaagaccttcattgacaccgtgcgctgcactacggctgcccacctggccctgctcgtgcccaagaacatcgccttctaccccagcaaccacgagcgctacctggagggccacatagacgtgtggtggatcgtgcacgatggtggcatgctcatgcttctgcccttcctgctgcgccagcataaggtctggaggaagtgccggatgcgcatcttcacagtggcccagatggatgacaacagcatccagatgaagaaggacctggctgtctttctgtaccatctgcgccttgaggccgaggtggaggtggtggagatgcataacagtgacatctctgcatacacctacgagcggacgctgatgatggagcagcggtcgcagatgctgcggcagatgagactgaccaagactgagcgggagcgagaagcccagctggtcaaggatcggcactcggccctgcggctggagagcctgtactcggacgaggaagatgagtctgcagtgggggctgacaagatccagatgacgtggaccagggacaagtacatgactgagacctgggaccccagccatgcccctgacaatttccgggagctggtgcacattaagccggaccaatccaatgtgcggcgcatgcacactgctgtgaagctcaatgaagtcattgtcacgcgctcccacgacgcccgcctggttctcctaaacatgcctggcccacccaggaacagtgagggcgacgagaactacatggagttcctcgaggtgctgaccgagggccttgagcgggtgctgttggtgcgcggtggtggccgtgaagtcatcaccatctactcctgagcccagtgtcatcttgtggcctggagtcgaggtcttggccaggacataacaagctgtggtctggggtaacagcctcttcccagcacccacctgccagccctgcttgcctggccctgtcctggacccagctttgctaggtctccttggaaaccaggcctgggcctcaaaatggagatggatcccaggtcttgtgggaccctgggatgtttggggactttactatctagcaccccagtaggcctgtcctggccagagaagactggtaggggccgagtggggtttgaaggcagccggcccggcccagcccaggagcgctatttattgcatatttattgtttggatgtcaccatcagagacgaagggaagggtagccagggagggagtccagcccagctgcctgcaggaagatctggctcagtctactatgggcagggccccccaccaagctgagccgaatggagacagctgagctgaggcctgactttttcaataaaacattgtgtagttctggg

SEQ ID NO: 377985 - DNA, 3345 bp, Homo sapiens
actctagaggatctgatggagaccaggctgaggaggagtactaccgcaagctcgcagggctggtggaggagatgcacgctgcctatgggaagcctgtcttcctcattggccacagcctcggctgtctacacttgctctatttcctgctgcgccagccccaggcctggaaggaccgctttattgatggcttcatctctcttggggctccctggggtggctccatcaagcccatgctggtcttggcctcagagacagggtctcactatattgcccagactggtcttgagctcctgggctcaagcatccttctgcctcagcctcccagagtgttggcattacaggcattaggtggttcttcaaaaaagtctgcatgcctatttagatgctagatctctcaccctttctagctctacaagtatagagggaaaattcgagacataaatagcctcacctttgtagaattgagctccctgaaggcccacagtctgcctctggtcttgtatctggaccagcattcctttctcattgtgctgagagttgggaaggccctgggtgacccctcgggaccatttcctgagaaggtgttctgtaaatgacaggcttcttgcatcaaggccacttttgttaacctcccgtcagtatttggttggtcctaggattagggccagtgtcctcactgtgagtgaattcacagatgagggagttggggtggggaatgagagcaagaacatgggggccagctggggacagttgagaacaatgatgcaactttctcctctcttcctttgtggtagcagaccttttatgctttcttgaaagcacttattttatcttttcattacttaggaaataacactatatccagacaagcatgggtgtgtccgggacctgttagaagaatgtaaaaaggccgtggagcttggggagaaagcatcagggaaacttaggctgctagaaattgtaagctacaaaatcattggtgttcatcaagaagatgaactattagaatgtttatctcctgcaacgagccggacgtttcgaatagaggaaatccctttggaccaggtggacatagacaaagagaatgagatgcttgtcacagtggcgcatttccacaaagaggtcttcggaacgttcggaatcccgtttttgctgaggatacaccagggcgagcattttcgagaagtgatgaagcgaatccagagcctgctggacatccaggagaaggagtttgagaagtttaaatttgcaattgtaatgatgggccgacaccagtacataaatgaagacgagtatgaagtaaatttgaaagactttgagccacagcccggtaatatgtctcatcctcggccttggctagggctcgaccacttcaacaaagccccaaagaggagtcgctacacttaccttgaaaaggccattaaaatccataactgatttccaagctggtgtgttcaaggcgaggacggtgtgtgggtggccccttaacagcctagaactttggtgcacgtgccctctagccgaagtcttcagcaagaggattcgctgctggtgttaattttattttattgaggctgttcagtttggcttctctgtatctattgactgccctttttgagcaaaatgaagatgtttttataaagcttggatgccaatgagagttattttatggtaaccacagtgcaaggcaactgtcagcgcaatgggggagaagaggttagtggatcgggggtccctggctcaaggtctctgggctgtccctagtgggcacgagtggctcggctgccttcctggggtcccgtgcaccagccctgcagctagcaagtcttgtgtttaggctcgtctgacctatttccttcagttatactttcaatgaccttttgtgcatctgttaaggcaaaacagagaaactcacaacctaataaatagcgctcttcccttcattgtgtgcattgtcggcccttcctcgggttctcctcctccagctgcctgggggctttttaataaacttgtctcacctcgtcagccactactgtctgcagcccctttgcaaagtggatgcactgaatacagtccggacagacattgtgggggtctttttattaaatcaagaacattgttaaattcaattaaggtttactctgctgccttggcagacttacgatctcaacagttcatacgagcaggtgaaaggattataaatagaatttcgttaaagtggaacagacgacaagaaagccttttagcaagagggcatgctcactagtggttagtaagctgtcgactttgtaaaaaagttaaaaatgaaaaaaaaaggaaaaatgaattgtatatttaatgaatgaacatgtacaatttgccactgggaggaggttcctttttgttgggtgagtctgcaagtgaatttcactgatgttgatattcattgtgtgtagttttatttcggtcccagccccgtttccttttattttggagctaatgccagctgcgtgtctagttttgagtgcagtaaaatagaatcagcaaatcactcttatttttcatccttttccggtattttttgggttgtttctgtgggagcagtgtacaccaactcttcctgtatattgcctttttgctggaaaatgttgtatgttgaataaaattttctataaaaattataattcagtgagttacgtggaagtggaggaagatttctactctccctggaaacaggcctgggaaaccttggcatttgtaacaaggtttcactgagatgtacttttccttctaattccgttttgcgggggcagggtctcttgtttctttttttttttttttttttttttagcctctaactagtcacatttactcttaagaaatgaaaggttttccaggagagaactgtgtacaaataaggtgactggagatgtgacctgatgtgtcacgaggcccttcggggcggcaggcgctatcgtgggcgtggtccttgcaccgtcccatcggccttgccttccagctccgtggcacggtttcctggtctttgggccagtgtgtaccttggagtgacttcctttctcaacttccactgcagtgtgtgtgccttctgctctgagagctgccttgtgacccgtgtgatagaaagcagggagtgagggtccccgcggacctggcccttccctccttcctcccccagaaagaggagttagagcaggggtgcgagagccgttcgctgtgggtttgtctttgaacaaacattaaggtgtcttgtttttgttctgggctgggggttggctgtagtcttaggtaactgaaagttcctactctcccttaaggtattaaatgactctttttccaaaaaaaacg

SEQ ID NO: 377986 - DNA, 2585 bp, Homo sapiens
catagctgactctagaggataaacgccaacgcaccaacaggcgaagttttaaatgtatatggttaaacagccaatttagggaagaggaaataacactatatccagacaagcatgggtgtgtccgggacctgttagaagaatgtaaaaaggccgtggagcttggggagaaagcatcagggaaacttaggctgctagaaattgtaagctacaaaatcattggtgttcatcaagaagatgaactattagaatgtttatctcctgcaacgagccggacgtttcgaatagaggaaatccctttggaccaggtggacatagacaaagagaatgagatgcttgtcacagtggcgcatttccacaaagaggtcttcggaacgttcggaatcccgtttttgctgaggatacaccagggcgagcattttcgagaagtgatgaagcgaatccagagcctgctggacatccaggagaaggagtttgagaagtttaaatttgcaattgtaatgatgggccgacaccagtacataaatgaagacgagtatgaagtaaatttgaaagactttgagccacagcccggtaatatgtctcatcctcggccttggctagggctcgaccacttcaacaaagccccaaagaggagtcgctacacttaccttgaaaaggccattaaaatccataactgatttccaagctggtgtgttcaaggcgaggacggtgtgtgggtggccccttaacagcctagaactttggtgcacgtgccctctagccgaagtcttcagcaagaggattcgctgctggtgttaattttattttattgaggctgttcagtttggcttctctgtatctattgactgccctttttgagcaaaatgaagatgtttttataaagcttggatgccaatgagagttattttatggtaaccacagtgcaaggcaactgtcagcgcaatgggggagaagaggttagtggatcgggggtccctggctcaaggtctctgggctgtccctagtgggcacgagtggctcggctgccttcctggggtcccgtgcaccagccctgcagctagcaagtcttgtgtttaggctcgtctgacctatttccttcagttatactttcaatgaccttttgtgcatctgttaaggcaaaacagagaaactcacaacctaataaatagcgctcttcccttcattgtgtgcattgtcggcccttcctcgggttctcctcctccagctgcctgggggctttttaataaacttgtctcacctcgtcagccactactgtctgcagcccctttgcaaagtggatgcactgaatacagtccggacagacattgtgggggtctttttattaaatcaagaacattgttaaattcaattaaggtttactctgctgccttggcagacttacgatctcaacagttcatacgagcaggtgaaaggattataaatagaatttcgttaaagtggaacagacgacaagaaagccttttagcaagagggcatgctcactagtggttagtaagctgtcgactttgtaaaaaagttaaaaatgaaaaaaaaaggaaaaatgaattgtatatttaatgaatgaacatgtacaatttgccactgggaggaggttcctttttgttgggtgagtctgcaagtgaatttcactgatgttgatattcattgtgtgtagttttatttcggtcccagccccgtttccttttattttggagctaatgccagctgcgtgtctagttttgagtgcagtaaaatagaatcagcaaatcactcttatttttcatccttttccggtattttttgggttgtttctgtgggagcagtgtacaccaactcttcctgtatattgcctttttgctggaaaatgttgtatgttgaataaaattttctataaaaattataattcagtgagttacgtggaagtggaggaagatttctactctccctggaaacaggcctgggaaaccttggcatttgtaacaaggtttcactgagatgtacttttccttctaattccgttttgcgggggcagggtctcttgtttctttttttttttttttttttttttagcctctaactagtcacatttactcttaagaaatgaaaggttttccaggagagaactgtgtacaaataaggtgactggagatgtgacctgatgtgtcacgaggcccttcggggcggcaggcgctatcgtgggcgtggtccttgcaccgtcccatcggccttgccttccagctccgtggcacggtttcctggtctttgggccagtgtgtaccttggagtgacttcctttctcaacttccactgcagtgtgtgtgccttctgctctgagagctgccttgtgacccgtgtgatagaaagcagggagtgagggtccccgcggacctggcccttccctccttcctcccccagaaagaggagttagagcaggggtgcgagagccgttcgctgtgggtttgtctttgaacaaacattaaggtgtcttgtttttgttctgggctgggggttggctgtagtcttaggtaactgaaagttcctactctcccttaaggtattaaatgactctttttccaaaaaaaacg

SEQ ID NO: 377987 - DNA, 3868 bp, Homo sapiens
gtacgtgcgcgtctccctgccgccgccgccgcccgccgcgggccgccccggggccgccgtcgccgacgacgcgcgggaggaggaggaggaggccgccccgccgccgccgccgccgccgccgccccggctcgccgccgcccgcccgccgggctcgcagccccggcccccggccgcaggcgaggcccaggccgcggccgacatgaaccaccagcagcagcagcagcagcagaaagcgggcgagcagcagttgagcgagcccgaggacatggagatggaagcgggagatacagatgacccaccaagaattactcagaaccctgtgatcaatgggaatgtggccctgagtgatggacacaacaccgcggaggaggacatggaggatgacaccagttggcgctccgaggcaacctttcagttcactgtggagcgcttcagcagactgagtgagtcggtccttagccctccgtgttttgtgcgaaatctgccatggaagattatggtgatgccacgcttttatccagacagaccacaccaaaaaagcgtaggattctttctccagtgcaatgctgaatctgattccacgtcatggtcttgccatgcacaagcagtgctgaagataataaattacagagatgatgaaaagtcgttcagtcgtcgtattagtcatttgttcttccataaagaaaatgattggggattttccaattttatggcctggagtgaagtgaccgatcctgagaaaggatttatagatgatgacaaagttacctttgaagtctttgtacaggcggatgctccccatggagttgcgtgggattcaaagaagcacacaggctacgtcggcttaaagaatcagggagcgacttgttacatgaacagcctgctacagacgttatttttcacgaatcagctacgaaaggctgtgtacatgatgccaaccgagggggatgattcgtctaaaagcgtccctttagcattacaaagagtgttctatgaattacagcatagtgataaacctgtaggaacaaaaaagttaacaaagtcatttgggtgggaaactttagatagcttcatgcaacatgatgttcaggagctttgtcgagtgttgctcgataatgtggaaaataagatgaaaggcacctgtgtagagggcaccatacccaaattattccgcggcaaaatggtgtcctatatccagtgtaaagaagtagactatcggtctgatagaagagaagattattatgatatccagctaagtatcaaaggaaagaaaaatatatttgaatcatttgtggattatgtggcagtagaacagctcgatggggacaataaatacgacgctggggaacatggcttacaggaagcagagaaaggtgtgaaattcctaacattgccaccagtgttacatctacaactgatgagatttatgtatgaccctcagacggaccaaaatatcaagatcaatgataggtttgaattcccagagcagttaccacttgatgaatttttgcaaaaaacagatcctaaggaccctgcaaattatattcttcatgcagtcctggttcatagtggagataatcatggtggacattatgtggtttatctaaaccccaaaggggatggcaaatggtgtaaatttgatgacgacgtggtgtcaaggtgtactaaagaggaagcaattgagcacaattatgggggtcacgatgacgacctgtctgttcgacactgcactaatgcttacatgttagtctacatcagggaatcaaaactgagtgaagttttacaggcggtcaccgaccatgatattcctcagcagttggtggagcgattacaagaagagaaaaggatcgaggctcagaagcggaaggagcggcaggaagcccatctctatatgcaagtgcagatagtcgcagaggaccagttttgtggccaccaagggaatgacatgtacgatgaagaaaaagtgaaatacactgtgttcaaagtattgaagaactcctcgcttgctgagtttgttcagagcctctctcagaccatgggatttccacaagatcaaattcgattgtggcccatgcaagcaaggagtaatggaacaaaacgaccagcaatgttagataatgaagccgacggcaataaaacaatgattgagctcagtgataatgaaaacccttggacaatattcctggaaacagttgatcccgagctggctgctagtggagcgaccttacccaagtttgataaagatcatgatgtaatgttatttttgaagatgtatgatcccaaaacgcggagcttgaattactgtgggcatatctacacaccaatatcctgtaaaatacgtgacttgctcccagttatgtgtgacagagcaggatttattcaagatactagccttatcctctatgaggaagttaaaccgaatttaacagagagaattcaggactatgacgtgtctcttgataaagcccttgatgaactaatggatggtgacatcatagtatttcagaaggatgaccctgaaaatgataacagtgaattacccaccgcaaaggagtatttccgagatctctaccaccgcgttgatgtcattttctgtgataaaacaatccctaatgatcctggatttgtggttacgttatcaaatagaatgaattattttcaggttgcaaagacagttgcacagaggctcaacacagatccaatgttgctgcagtttttcaagtctcaaggttatagggatggcccaggtaatcctcttagacataattatgaaggtactttaagagatcttctacagttcttcaagcctagacaacctaagaaactttactatcagcagcttaagatgaaaatcacagactttgagaacaggcgaagttttaaatgtatatggttaaacagccaatttagggaagaggaaataacactatatccagacaagcatgggtgtgtccgggacctgttagaagaatgtaaaaaggccgtggagcttggggagaaagcatcagggaaacttaggcaagtatttcttgagcccaattgtggacgttcagttaggggtggcagttaacgctgacctctgcagttgcgttggtggaaatcacccagctgggatccatgcgcgtcattcccagactcagtggggtgtgcctccattgcaaagacagttgcacagaagctcaacacagacccagtgttgctccagtttttcaagtctcaggggtaaccctcaagccgctgtggtgcagagggttatgcgtgtttcacaattaagccacgtttttcctccttccccttgtatcttctgataacattagctgtagtaaaaaggcgcagttcccatagaaaagccaaacagaggaaggatatgattccatttgaacgatgaactgaaactggaaggggtgactcctgattttgtatttgacagattgagtcacttctgttccatctagccaacatttgggctgtagaaagaagcccctgaattgattgtttatttcagagagatgggcatgattctcactactttgccctgtagtcgcttggaggacaaatggcttttggagccatttggttcccaaactttctttagttttaataaaacaattattaaacagtgagaccctaatctattacctaataagagtaagtgaggaaaacgccactatcagctgaatgtgaattccttgtgggaaaggtttatgcaactttcggaggcccagtctgtacatctctgtgcccaaatgtggccatttccactttgtccagcagagccctttaatcttatgcttcaaggggaccccctctccgtgccttgctccggtctctgtttctgatatttcagatcctctttaaaaaaaaaaaa

SEQ ID NO: 377988 - DNA, 3005 bp, Homo sapiens
atgcgagcgggcggggcgtgtcggcccggggcggcggggacagcggcggggacagcggcgggcggctgggacggcgggtgcggcggggccgagcccgcacgatgcctcacttcaccgtggtgccagtggacgggccgaggcgcggcgactatgacaacctcgaggggctcagttgggtggactacggggagcgcgccgagctggatgactcggacggacatggcaaccacagagagagcagcccttttctttcccccttggaggcttccagaggaattgactactatgacaggaacctggcactgtttgaggaagagctggacatccgcccaaaggtatcgtctcttctgggaaagctcgtcagctacaccaacctcacccagggcgccaaagagcatgaggaggccgagagtggggagggcacccgccggagggcagccgaggcacccagcatgggcaccctcatgggggtgtacctgccctgcctgcagaatatctttggggttatcctcttcctgcggctgacctggatggtgggcacagcaggtgtgctacaggccctcctcatcgtgcttatctgctgctgttgtaccctgctgacggccatctccatgagtgccatcgccaccaacggtgtggttccagctgggggctcctatttcatgatctctcgttcactggggccagaatttggaggtgctgtgggcctgtgcttctacctgggaacaacattcgcagcagccatgtacatcctgggggccatcgagatcttgctgacctacattgccccaccagctgccattttttacccatcgggtgctcatgacacgtcgaatgccactttgaacaatatgcgtgtgtatgggaccattttcctgaccttcatgaccctggtggtgtttgtgggggtcaagtatgtgaacaaatttgcctcgctcttcctggcctgtgtgatcatctccatcctctccatctatgctgggggcataaagtctatatttgaccctcccgtgtttccggtatgcatgctgggcaacaggaccctgtcccgggaccagtttgacatctgtgccaagacagctgtagtggacaatgagacagtggccacccagctatggagtttcttctgccacagccccaaccttacgaccgactcctgtgacccctacttcatgctcaacaatgtgaccgagatccctggcatccccggggcagctgctggtgtgctccaggaaaacctgtggagcgcctacctggagaagggtgacatcgtggagaagcatgggctgccctccgcagatgccccgagcctgaaggagagcctgcctctgtacgtggtcgctgacatcgccacatccttcaccgtgctggtcggcatcttcttcccttctgtaacaggcatcatggctggctcaaaccgctctggggaccttcgtgacgcccagaagtctatccctgtggggaccattctggccatcattacaacttccctcgtgtacttcagcagtgtggttctctttggtgcctgcattgagggtgtggttctccgggacaagtatggcgatggtgtcagcaggaacttggtggtgggcacactggcctggccttcaccctgggtcatcgtcatcggctccttcttttcaacgtgtggcgctggcctccagagcctcacaggggcaccacgcctattgcaggccattgccaaggacaacatcatccccttcctccgggtgtttggccacgggaaggtgaatggtgaacccacatgggcactcctcctgacggcactcatcgccgagctgggcatcctcatcgcctccctcgacatggtggcccccatcttatccatgttctttctgatgtgctacctgttcgtgaacctcgcctgtgcggtgcagacactcctgaggacccccaactggcggccccggttcaagtactatcactgggcgctgtccttcctgggcatgagtctctgcctggcccttatgtttgtctcctcctggtactatgccctggtggccatgctcatcgccggcatgatctacaaatacatcgagtaccaaggggctgagaaggagtggggtgacgggatccgaggcctgtccctgagcgctgcccgctacgcgctgttgcggctggaggaggggcctcctcacaccaagaactggcggccgcagctgctggtgctgctgaagctggacgaggacctccacgtgaagtacccgcggctcctcaccttcgcctcccagctcaaggctggcaagggcctgaccattgttggttctgtcatccaggggagcttcttggagagctatggcgaggctcaggccgccgagcagaccatcaagaacatgatggaaattgagaaggtgaagggcttctgccaggtggtggtggccagcaaggtgcgggaggggctggcccacctcatccagtcctgtggcctgggaggcatgcggcataactccgtggtgctgggctggccctacggctggcgacagagcgaggacccccgtgcctggaagaccttcattgacaccgtgcgctgcactacggctgcccacctggccctgctcgtgcccaagaacatcgccttctaccccagcaaccacgagcgctacctggagggccacatagacgtgtggtggatcgtgcacgatggtggcatgctcatgcttctgcccttcctgctgcgccagcataaggtctggaggaagtgccggatgcgcatcttcacagtggcccagatggatgacaacagcatccagatgaagaaggacctggctgtctttctgtaccatctgcgccttgaggccgaggtggaggtggtggagatgcataacagtgacatctctgcatacacctacgagcggacgctgatgatggagcagcggtcgcagatgctgcggcagatgagactgaccaagactgagcgggagcgagaaccatctgtcaaggatcgaactcgcctgcgctgagacctgcaaggatcctctagatac

SEQ ID NO: 377989 - DNA, 3675 bp, Homo sapiens
atgcgagcgggcggggcgtgtcggcccggggcggcggggacagcggcggggacagcggcgggcggctgggacggcgggtgcggcggggccgagcccgcacgatgcctcacttcaccgtggtgccagtggacgggccgaggcgcggcgactatgacaacctcgaggggctcagttgggtggactacggggagcgcgccgagctggatgactcggacggacatggcaaccacagagagagcagcccttttctttcccccttggaggcttccagaggaattgactactatgacaggaacctggcactgtttgaggaagagctggacatccgcccaaaggtatcgtctcttctgggaaagctcgtcagctacaccaacctcacccagggcgccaaagagcatgaggaggccgagagtggggagggcacccgccggagggcagccgaggcacccagcatgggcaccctcatgggggtgtacctgccctgcctgcagaatatctttggggttatcctcttcctgcggctgacctggatggtgggcacagcaggtgtgctacaggccctcctcatcgtgcttatctgctgctgttgtaccctgctgacggccatctccatgagtgccatcgccaccaacggtgtggttccagctgggggctcctatttcatgatctctcgttcactggggccagaatttggaggtgctgtgggcctgtgcttctacctgggaacaacattcgcagcagccatgtacatcctgggggccatcgagatcttgctgacctacattgccccaccagctgccattttttacccatcgggtgctcatgacacgtcgaatgccactttgaacaatatgcgtgtgtatgggaccattttcctgaccttcatgaccctggtggtgtttgtgggggtcaagtatgtgaacaaatttgcctcgctcttcctggcctgtgtgatcatctccatcctctccatctatgctgggggcataaagtctatatttgaccctcccgtgtttccggtatgcatgctgggcaacaggaccctgtcccgggaccagtttgacatctgtgccaagacagctgtagtggacaatgagacagtggccacccagctatggagtttcttctgccacagccccaaccttacgaccgactcctgtgacccctacttcatgctcaacaatgtgaccgagatccctggcatccccggggcagctgctggtgtgctccaggaaaacctgtggagcgcctacctggagaagggtgacatcgtggagaagcatgggctgccctccgcagatgccccgagcctgaaggagagcctgcctctgtacgtggtcgctgacatcgccacatccttcaccgtgctggtcggcatcttcttcccttctgtaacaggcatcatggctggctcaaaccgctctggggaccttcgtgacgcccagaagtctatccctgtggggaccattctggccatcattacaacttccctcgtgtacttcagcagtgtggttctctttggtgcctgcattgagggtgtggttctccgggacaagtatggcgatggtgtcagcaggaacttggtggtgggcacactggcctggccttcaccctgggtcatcgtcatcggctccttcttttcaacgtgtggcgctggcctccagagcctcacaggggcaccacgcctattgcaggccattgccaaggacaacatcatccccttcctccgggtgtttggccacgggaaggtgaatggtgaacccacatgggcactcctcctgacggcactcatcgccgagctgggcatcctcatcgcctccctcgacatggtggcccccatcttatccatgttctttctgatgtgctacctgttcgtgaacctcgcctgtgcggtgcagacactcctgaggacccccaactggcggccccggttcaagtactatcactgggcgctgtccttcctgggcatgagtctctgcctggcccttatgtttgtctcctcctggtactatgccctggtggccatgctcatcgccggcatgatctacaaatacatcgagtaccaaggggctgagaaggagtggggtgacgggatccgaggcctgtccctgagcgctgcccgctacgcgctgttgcggctggaggaggggcctcctcacaccaagaactggcggccgcagctgctggtgctgctgaagctggacgaggacctccacgtgaagtacccgcggctcctcaccttcgcctcccagctcaaggctggcaagggcctgaccattgttggttctgtcatccaggggagcttcttggagagctatggcgaggctcaggccgccgagcagacaccgtgcgctgcactacggctgcccacctggccctgctcgtgcccaagaacatcgccttctaccccagcaaccacgagcgctacctggagggccacatagacgtgtggtggatcgtgcacgatggtggcatgctcatgcttctgcccttcctgctgcgccagcataaggtctggaggaagtgccggatgcgcatcttcacagtggcccagatggatgacaacagcatccagatgaagaaggacctggctgtctttctgtaccatctgcgccttgaggccgaggtggaggtggtggagatgcataacagtgacatctctgcatacacctacgagcggacgctgatgatggagcagcggtcgcagatgctgcggcagatgagactgaccaagactgagcgggagcgagaagcccagctggtcaaggatcggcactcggccctgcggctggagagcctgtactcggacgaggaagatgagtctgcagtgggggctgacaagatccagatgacgtggaccagggacaagtacatgactgagacctgggaccccagccatgcccctgacaatttccgggagctggtgcacattaagccggaccaatccaatgtgcggcgcatgcacactgctgtgaagctcaatgaagtcattgtcacgcgctcccacgacgcccgcctggttctcctaaacatgcctggcccacccaggaacagtgagggcgacgagaactacatggagttcctcgaggtgctgaccgagggccttgagcgggtgctgttggtgcgcggtggtggccgtgaagtcatcaccatctactcctgagcccagtgtcatcttgtggcctggagtcgaggtcttggccaggacataacaagctgtggtctggggtaacagcctcttcccagcacccacctgccagccctgcttgcctggccctgtcctggacccagctttgctaggtctccttggaaaccaggcctgggcctcaaaatggagatggatcccaggtcttgtgggaccctgggatgtttggggactttactatctagcaccccagtaggcctgtcctggccagagaagactggtaggggccgagtggggtttgaaggcagccggcccggcccagcccaggagcgctatttattgcatatttattgtttggatgtcaccatcagagacgaagggaagggtagccagggagggagtccagcccagctgcctgcaggaagatctggctcagtctactatgggcagggccccccaccaagctgagccgaatggagacagctgagctgaggcctgactttttcaataaaacattgtgtagttctggg

SEQ ID NO: 377990 - DNA, 1961 bp, Homo sapiens
gtacgtgcgcgtctccctgccgccgccgccgcccgccgcgggccgccccggggccgccgtcgccgacgacgcgcgggaggaggaggaggaggccgccccgccgccgccgccgccgccgccgccccggctcgccgccgcccgcccgccgggctcgcagccccggcccccggccgcaggcgaggcccaggccgcggccgacatgaaccaccagcagcagcagcagcagcagaaagcgggcgagcagcagttgagcgagcccgaggacatggagatggaagcgggagatacagatgacccaccaagaattactcagaaccctgtgatcaatgggaatgtggccctgagtgatggacacaacaccgcggaggaggacatggaggatgacaccagttggcgctccgaggcaacctttcagttcactgtggagcgcttcagcagactgagtgagtcggtccttagccctccgtgttttgtgcgaaatctgccatggaagattatggtgatgccacgcttttatccagacagaccacaccaaaaaagcgtaggattctttctccagtgcaatgctgaatctgattccacgtcatggtcttgccatgcacaagcagtgctgaagataataaatttgtctcacctcgtcagccactactgtctgcagcccctttgcaaagtggatgcactgaatacagtccggacagacattgtgggggtctttttattaaatcaagaacattgttaaattcaattaaggtttactctgctgccttggcagacttacgatctcaacagttcatacgagcaggtgaaaggattataaatagaatttcgttaaagtggaacagacgacaagaaagccttttagcaagagggcatgctcactagtggttagtaagctgtcgactttgtaaaaaagttaaaaatgaaaaaaaaaggaaaaatgaattgtatatttaatgaatgaacatgtacaatttgccactgggaggaggttcctttttgttgggtgagtctgcaagtgaatttcactgatgttgatattcattgtgtgtagttttatttcggtcccagccccgtttccttttattttggagctaatgccagctgcgtgtctagttttgagtgcagtaaaatagaatcagcaaatcactcttatttttcatccttttccggtattttttgggttgtttctgtgggagcagtgtacaccaactcttcctgtatattgcctttttgctggaaaatgttgtatgttgaataaaattttctataaaaattataattcagtgagttacgtggaagtggaggaagatttctactctccctggaaacaggcctgggaaaccttggcatttgtaacaaggtttcactgagatgtacttttccttctaattccgttttgcgggggcagggtctcttgtttctttttttttttttttttttttttagcctctaactagtcacatttactcttaagaaatgaaaggttttccaggagagaactgtgtacaaataaggtgactggagatgtgacctgatgtgtcacgaggcccttcggggcggcaggcgctatcgtgggcgtggtccttgcaccgtcccatcggccttgccttccagctccgtggcacggtttcctggtctttgggccagtgtgtaccttggagtgacttcctttctcaacttccactgcagtgtgtgtgccttctgctctgagagctgccttgtgacccgtgtgatagaaagcagggagtgagggtccccgcggacctggcccttccctccttcctcccccagaaagaggagttagagcaggggtgcgagagccgttcgctgtgggtttgtctttgaacaaacattaaggtgtcttgtttttgttctgggctgggggttggctgtagtcttaggtaactgaaagttcctactctcccttaaggtattaaatgactctttttccaaaaaaaacg

SEQ ID NO: 377991 - DNA, 1798 bp, Homo sapiens
gtacgtgcgcgtctccctgccgccgccgccgcccgccgcgggccgccccggggccgccgtcgccgacgacgcgcgggaggaggaggaggaggccgccccgccgccgccgccgccgccgccgccccggctcgccgccgcccgcccgccgggctcgcagccccggcccccggccgcaggcgaggcccaggccgcggccgacatgaaccaccagcagcagcagcagcagcagaaagcgggcgagcagcagttgagcgagcccgaggacatggagatggaagcgggagatacagatgacccaccaagaattactcagaaccctgtgatcaatgggaatgtggccctgagtgatggacacaacaccgcggaggaggacatggaggatgacaccagttggcgctccgaggcaacctttcagttcactgtggagcgcttcagcagactgagtgagtcggtccttagccctccgtgttttgtgcgaaatctgccatggaagattatggtgatgccacgcttttatccagacagaccacaccaaaaaagcgtaggattctttctccagtgcaatgctgaatctgattccacgtcatggtcttgccatgcacaagcagtgctgaagataataaattacagagatgatgaaaagtcgttcagtcgtcgtattagtcatttgttcttccataaagaaaatgattggggattttccaattttatggcctggagtgaagtgaccgatcctgagaaaggatttatagatgatgacaaagttacctttgaagtctttgtacaggcggatgctccccatggagttgcgtgggattcaaagaagcacacaggctacgtcggcttaaagaatcagggagcgacttgttacatgaacagcctgctacagacgttatttttcacgaatcagctacgaaaggctgtgtacatgatgccaaccgagggggatgattcgtctaaaagcgtccctttagcattacaaagagtgttctatgaattacagcatagtgataaacctgtaggaacaaaaaagttaacaaagtcatttgggtgggaaactttagatagcttcatgcaacatgatgttcaggagctttgtcgagtgttgctcgataatgtggaaaataagatgaaaggcacctgtgtagagggcaccatacccaaattattccgcggcaaaatggtgtcctatatccagtgtaaagaagtagactatcggtctgatagaagagaagattattatgatatccagctaagtatcaaaggaaagaaaaatatatttgaatcatttgtggattatgtggcagtagaacagctcgatggggacaataaatacgacgctggggaacatggcttacaggaagcagagaaaggtgtgaaattcctaacattgccaccagtgttacatctacaactgatgagatttatgtatgaccctcagacggaccaaaatatcaagatcaatgataggtttgaattcccagagcagttaccacttgatgaattttttaaatcctagggctctcatgcattccttgtgggcctcaattagatgtccacagtgttcttctcctttctcgatgatacacgcatcgcgcgccttcttggtctccgggcaagcgcagcagggcttcagcggcttcttctcctgagactcaggcggggcagggtttgagtcaaccagacccggcatctttcgcgccacaagcagctatgagcggagacagccaaatctatgccagcctcggaaacgccaatcgccgcgtgtaaaattgacgggaccacccaatcgaacatc

SEQ ID NO: 377992 - DNA, 834 bp, Homo sapiens
tttacacatttttgggcccccctgacaatttccgggagctggtgcacattaagccgatggctcatggcgacctgtgactggctacactacgtgtagggaccaatccaatgtgcggcgcatgcacactgctgtgaagctcaatgaagtcattgtcacgcgctcccacgacgcccgcctggttctcctaaacatgcctggcccacccaggaacagtgagggcgacgagaactacatggagttcctcgaggtgctgaccgagggccttgagcgggtgctgttggtgcgcggtggtggccgtgaagtcatcaccatctactcctgagcccagtgtcatcttgtggcctggagtcgaggtcttggccaggacataacaagctgtggtctggggtaacagcctcttcccagcacccacctgccagccctgcttgcctggccctgtcctggacccagctttgctaggtctccttggaaaccaggcctgggcctcaaaatggagatggatcccaggtcttgtgggaccctgggatgtttggggactttactatctagcaccccagtaggcctgtcctggccagagaagactggtaggggccgagtggggtttgaaggcagccggcccggcccagcccaggagcgctatttattgcatatttattgtttggatgtcaccatcagagacgaagggaagggtagccagggagggagtccagcccagctgcctgcaggaagatctggctcagtctactatgggcagggccccccaccaagctgagccgaatggagacagctgagctgaggcctgactttttcaataaaacattgtgtagttctggg

SEQ ID NO: 377993 - DNA, 858 bp, Homo sapiens
atgcgagcgggcggggcgtgtcggcccggggcggcggggacagcggcggggacagcggcgggcggctgggacggcgggtgcggcggggccgagcccgcacgatgcctcacttcaccgtggtgccagtggacgggccgaggcgcggcgactatgacaacctcgaggggctcagttgggtggactacggggagcgcgccgagctggatgactcggacggacatggcaaccacagagagagcagcccttttctttcccccttggaggcttccagaggaattgactactatgacaggaacctggcactgtttgaggaagagctggacatccgcccaaaggtatcgtctcttctgggaaagctcgtcagctacaccaacctcacccagggcgccaaagagcatgaggaggccgagagtggggagggcacccgccggagggcagccgaggcacccagcatgggcaccctcatgggggtgtacctgccctgcctgcagaatatctttggggttatcctcttcctgcggctgacctggatggtgggcacagcaggtgtgctacaggccctcctcatcgtgcttatctgctgctgttgtaccctgctgacggccatctccatgagtgccatcgccaccaacggtgtggttccaggtcagtgagcgccacccaaggcctggtggaagagaaaaggacccagtatctgccttgacctacctgggaacccccatagcacacccctgccccaagcagttctgtagtgggctcccaatccctgatgccaggacagtgcccacgtaggagctttcctgcttgacagagttggagagtgccattgtggtttttgttaatataaaagcaatacca

SEQ ID NO: 377994 - DNA, 433 bp, Homo sapiens
cttcatgcaacatgatgttcaggagctttgtcgagtggtaagtttcaagcaatacttgtatatttcttacaatgaatattttgaagcatggtcagaagttattaccaagtaaaacctcagacctaattcagaaaatgcccatctttgtttaggatcagacttaggctacaaaaaggcagcagatgtctagttataaaggctggtaagaattacttgaatagggatttgaaggtgaagtgaggaagcttgaattttaatactagcaggcagtaggcttttaatttgttaaattggtatatatacaggagttattaatccagaaaccaaagactggctttgttggctgtcccgttggtcctgagtcactgtacagtggtgacttctgttgttactccagtgtccagacccctcctgtgcagcgaggttctcattg

SEQ ID NO: 377995 - DNA, 571 bp, Homo sapiens
tctaccaccgcgttgatgtcattttctgtgataaaacaatccctaatgatcctggatttgtggttacgttatcaaatagaatgaattattttcaggtatttaataaatgctcctttcctcttcagatcccactccagaaagacaaatttctttcttaaaatgcttgttgaagaagctatctcatggttttggttcagaaggggctatgcccgaggaaatctcccactgatggattcaggctctctgccttgggagctagaataatcgccatcagaaaagaacctgtagacctcaccattaaaagtgaaaaccctttccaaagttatcttcatcagatatgctactcccatggtgattcattaaggaataatatagtttattcctgtttaataaatttctagggaatttaaattcaggctgctcatggcacattttaagtaattaagcatgaagtttatgaccaagtttcaatttttccccaaaatgtgaaccttcctttctgtgtctgttgcaaagacagttgcacagaggctcaacacagatccaatgttgctgcagtttttcaagtctc

SEQ ID NO: 377996 - DNA, 4014 bp, Homo sapiens
gtacgtgcgcgtctccctgccgccgccgccgcccgccgcgggccgccccggggccgccgtcgccgacgacgcgcgggaggaggaggaggaggccgccccgccgccgccgccgccgccgccgccccggctcgccgccgcccgcccgccgggctcgcagccccggcccccggccgcaggcgaggcccaggccgcggccgacatgaaccaccagcagcagcagcagcagcagaaagcgggcgagcagcagttgagcgagcccgaggacatggagatggaagcgggagatacagatgacccaccaagaattactcagaaccctgtgatcaatgggaatgtggccctgagtgatggacacaacaccgcggaggaggacatggaggatgacaccagttggcgctccgaggcaacctttcagttcactgtggagcgcttcagcagactgagtgagtcggtccttagccctccgtgttttgtgcgaaatctgccatggaagattatggtgatgccacgcttttatccagacagaccacaccaaaaaagcgtaggattctttctccagtgcaatgctgaatctgattccacgtcatggtcttgccatgcacaagcagtgctgaagataataaattacagagatgatgaaaagtcgttcagtcgtcgtattagtcatttgttcttccataaagaaaatgattggggattttccaattttatggcctggagtgaagtgaccgatcctgagaaaggatttatagatgatgacaaagttacctttgaagtctttgtacaggcggatgctccccatggagttgcgtgggattcaaagaagcacacaggctacgtcggcttaaagaatcagggagcgacttgttacatgaacagcctgctacagacgttatttttcacgaatcagctacgaaaggctgtgtacatgatgccaaccgagggggatgattcgtctaaaagcgtccctttagcattacaaagagtgttctatgaattacagcatagtgataaacctgtaggaacaaaaaagttaacaaagtcatttgggtgggaaactttagatagcttcatgcaacatgatgttcaggagctttgtcgagtgttgctcgataatgtggaaaataagatgaaaggcacctgtgtagagggcaccatacccaaattattccgcggcaaaatggtgtcctatatccagtgtaaagaagtagactatcggtctgatagaagagaagattattatgatatccagctaagtatcaaaggaaagaaaaatatatttgaatcatttgtggattatgtggcagtagaacagctcgatggggacaataaatacgacgctggggaacatggcttacaggaagcagagaaaggtgtgaaattcctaacattgccaccagtgttacatctacaactgatgagatttatgtatgaccctcagacggaccaaaatatcaagatcaatgataggtttgaattcccagagcagttaccacttgatgaatttttgcaaaaaacagatcctaaggaccctgcaaattatattcttcatgcagtcctggttcatagtggagataatcatggtggacattatgtggtttatctaaaccccaaaggggatggcaaatggtgtaaatttgatgacgacgtggtgtcaaggtgtactaaagaggaagcaattgagcacaattatgggggtcacgatgacgacctgtctgttcgacactgcactaatgcttacatgttagtctacatcagggaatcaaaactgagtgaagttttacaggcggtcaccgaccatgatattcctcagcagttggtggagcgattacaagaagagaaaaggatcgaggctcagaagcggaaggagcggcaggaagcccatctctatatgcaagtgcagatagtcgcagaggaccagttttgtggccaccaagggaatgacatgtacgatgaagaaaaagtgaaatacactgtgttcaaagtattgaagaactcctcgcttgctgagtttgttcagagcctctctcagaccatgggatttccacaagatcaaattcgattgtggcccatgcaagcaaggagtaatggaacaaaacgaccagcaatgttagataatgaagccgacggcaataaaacaatgattgagctcagtgataatgaaaacccttggacaatattcctggaaacagttgatcccgagctggctgctagtggagcgaccttacccaagtttgataaagatcatgatgtaatgttatttttgaagatgtatgatcccaaaacgcggagcttgaattactgtgggcatatctacacaccaatatcctgtaaaatacgtgacttgctcccagttatgtgtgacagagcaggatttattcaagatactagccttatcctctatgaggaagttaaaccgaatttaacagagagaattcaggactatgacgtgtctcttgataaagcccttgatgaactaatggatggtgacatcatagtatttcagaaggatgaccctgaaaatgataacagtgaattacccaccgcaaaggagtatttccgagatctctaccaccgcgttgatgtcattttctgtgataaaacaatccctaatgatcctggatttgtggttacgttatcaaatagaatgaattattttcaggttgcaaagacagttgcacagaggctcaacacagatccaatgttgctgcagtttttcaagtctcaaggttatagggatggcccaggtaatcctcttagacataattatgaaggtactttaagagatcttctacagttcttcaagcctagacaacctaagaaactttactatcagcagcttaagatgaaaatcacagactttgagaacaggcgaagttttaaatgtatatggttaaacagccaatttagggaagaggaaataacactatatccagacaagcatgggtgtgtccgggacctgttagaagaatgtaaaaaggccgtggagcttggggagaaagcatcagggaaacttaggctgctagaaattgtaagctacaaaatcattggtgttcatcaagaagatgaactattagaatgtttatctcctgcaacgagccggacgtttcgaatagaggaaatccctttggaccaggtggacatagacaaagagaatgagatgcttgtcacagtggcgcatttccacaaagaggtcttcggaacgttcggaatcccgtttttgctgaggatacaccagggcgagcattttcgagaagtgatgaagcgaatccagagcctgctggacatccaggagaaggagtttgagaagtttaaatttgcaattgtaatgatgggccgacaccagtacataaatgaagacgagtatgaagtaaatttgaaagactttgagccacagcccggtaatatgtctcatcctcggccttggctagggctcgaccacttcaacaaagccccaaagaggagtcgctacacttaccttgaaaaggccattaaaatccataactgatttccaagctggtgtgttcaaggcgaggacggtgtgtgggtggccccttaacagcctagaactttggtgcacgtgccctctagccgaagtcttcagcaagaggattcgctgctggtgttaattttattttattgaggctgttcagtttggcttctctgtatctattgactgccctttttgagcaaaatgaagatgtttttataaagcttggatgccaatgagagttattttatggtaaccacagtgcaaggcaactgtcagcgcaatgggggagaagaggttagtggatcgggggtccctggctcaaggtctctgggctgtccctagtgggcacgagtggctcggctgccttcctggggtcccgtgcaccagccctgcagctagcaagtcttgtgtttaggctcgtctgacctatttccttcagttatactttcaatgaccttttgtgcatctgttaaggcaaaacagagaaactcacaacctaataaatagcgctcttcccttca

SEQ ID NO: 377997 - DNA, 522 bp, Homo sapiens
atgcgagcgggcggggcgtgtcggcccggggcggcggggacagcggcggggacagcggcgggcggctgggacggcgggtgcggcggggccgagcccgcacgatgcctcacttcaccgtggtgccagtggacgggccgaggcgcggcgactatgacaacctcgaggggctcagttgggtggactacggggagcgcgccgagctggatgactcggacgacatggcaaccacagagagagcttaagtgaaggcagtttttatggcgttttgtagtaaattctgtaaaatactttggtttaatttgtgactttttttgtaagaaattgtttataatatgttgcatttgtacttaagtcattccatctttcactcaggatgaatgcgaaaagtgactgttcacagacctcagtgatgtgagcactgttgctcaggagtgacaagttgctaatatgcagaagggatgggtgatacttcttgcttctcatgatggcatgtttctgtatgtttaatgacttgttggggta

SEQ ID NO: 377998 - DNA, 5247 bp, Homo sapiens
attctatgcagtcactctgatgtgggtgagagaacctcccccatcccccagcagaggccactgcagagccatgcagagatggctgggaaccacaggcttgggctcgaagcgggagatacagatgacccaccaagaattactcagaaccctgtgatcaatgggaatgtggccctgagtgatggacacaacaccgcggaggaggacatggaggatgacaccagttggcgctccgaggcaacctttcagttcactgtggagcgcttcagcagactgagtgagtcggtccttagccctccgtgttttgtgcgaaatctgccatggaagattatggtgatgccacgcttttatccagacagaccacaccaaaaaagcgtaggattctttctccagtgcaatgctgaatctgattccacgtcatggtcttgccatgcacaagcagtgctgaagataataaattacagagatgatgaaaagtcgttcagtcgtcgtattagtcatttgttcttccataaagaaaatgattggggattttccaattttatggcctggagtgaagtgaccgatcctgagaaaggatttatagatgatgacaaagttacctttgaagtctttgtacaggcggatgctccccatggagttgcgtgggattcaaagaagcacacaggctacgtcggcttaaagaatcagggagcgacttgttacatgaacagcctgctacagacgttatttttcacgaatcagctacgaaaggctgtgtacatgatgccaaccgagggggatgattcgtctaaaagcgtccctttagcattacaaagagtgttctatgaattacagcatagtgataaacctgtaggaacaaaaaagttaacaaagtcatttgggtgggaaactttagatagcttcatgcaacatgatgttcaggagctttgtcgagtgttgctcgataatgtggaaaataagatgaaaggcacctgtgtagagggcaccatacccaaattattccgcggcaaaatggtgtcctatatccagtgtaaagaagtagactatcggtctgatagaagagaagattattatgatatccagctaagtatcaaaggaaagaaaaatatatttgaatcatttgtggattatgtggcagtagaacagctcgatggggacaataaatacgacgctggggaacatggcttacaggaagcagagaaaggtgtgaaattcctaacattgccaccagtgttacatctacaactgatgagatttatgtatgaccctcagacggaccaaaatatcaagatcaatgataggtttgaattcccagagcagttaccacttgatgaatttttgcaaaaaacagatcctaaggaccctgcaaattatattcttcatgcagtcctggttcatagtggagataatcatggtggacattatgtggtttatctaaaccccaaaggggatggcaaatggtgtaaatttgatgacgacgtggtgtcaaggtgtactaaagaggaagcaattgagcacaattatgggggtcacgatgacgacctgtctgttcgacactgcactaatgcttacatgttagtctacatcagggaatcaaaactgagtgaagttttacaggcggtcaccgaccatgatattcctcagcagttggtggagcgattacaagaagagaaaaggatcgaggctcagaagcggaaggagcggcaggaagcccatctctatatgcaagtgcagatagtcgcagaggaccagttttgtggccaccaagggaatgacatgtacgatgaagaaaaagtgaaatacactgtgttcaaagtattgaagaactcctcgcttgctgagtttgttcagagcctctctcagaccatgggatttccacaagatcaaattcgattgtggcccatgcaagcaaggagtaatggaacaaaacgaccagcaatgttagataatgaagccgacggcaataaaacaatgattgagctcagtgataatgaaaacccttggacaatattcctggaaacagttgatcccgagctggctgctagtggagcgaccttacccaagtttgataaagatcatgatgtaatgttatttttgaagatgtatgatcccaaaacgcggagcttgaattactgtgggcatatctacacaccaatatcctgtaaaatacgtgacttgctcccagttatgtgtgacagagcaggatttattcaagatactagccttatcctctatgaggaagttaaaccgaatttaacagagagaattcaggactatgacgtgtctcttgataaagcccttgatgaactaatggatggtgacatcatagtatttcagaaggatgaccctgaaaatgataacagtgaattacccaccgcaaaggagtatttccgagatctctaccaccgcgttgatgtcattttctgtgataaaacaatccctaatgatcctggatttgtggttacgttatcaaatagaatgaattattttcaggttgcaaagacagttgcacagaggctcaacacagatccaatgttgctgcagtttttcaagtctcaaggttatagggatggcccaggtaatcctcttagacataattatgaaggtactttaagagatcttctacagttcttcaagcctagacaacctaagaaactttactatcagcagcttaagatgaaaatcacagactttgagaacaggcgaagttttaaatgtatatggttaaacagccaatttagggaagaggaaataacactatatccagacaagcatgggtgtgtccgggacctgttagaagaatgtaaaaaggccgtggagcttggggagaaagcatcagggaaacttaggctgctagaaattgtaagctacaaaatcattggtgttcatcaagaagatgaactattagaatgtttatctcctgcaacgagccggacgtttcgaatagaggaaatccctttggaccaggtggacatagacaaagagaatgagatgcttgtcacagtggcgcatttccacaaagaggtcttcggaacgttcggaatcccgtttttgctgaggatacaccagggcgagcattttcgagaagtgatgaagcgaatccagagcctgctggacatccaggagaaggagtttgagaagtttaaatttgcaattgtaatgatgggccgacaccagtacataaatgaagacgagtatgaagtaaatttgaaagactttgagccacagcccggtaatatgtctcatcctcggccttggctagggctcgaccacttcaacaaagccccaaagaggagtcgctacacttaccttgaaaaggccattaaaatccataactgatttccaagctggtgtgttcaaggcgaggacggtgtgtgggtggccccttaacagcctagaactttggtgcacgtgccctctagccgaagtcttcagcaagaggattcgctgctggtgttaattttattttattgaggctgttcagtttggcttctctgtatctattgactgccctttttgagcaaaatgaagatgtttttataaagcttggatgccaatgagagttattttatggtaaccacagtgcaaggcaactgtcagcgcaatgggggagaagaggttagtggatcgggggtccctggctcaaggtctctgggctgtccctagtgggcacgagtggctcggctgccttcctggggtcccgtgcaccagccctgcagctagcaagtcttgtgtttaggctcgtctgacctatttccttcagttatactttcaatgaccttttgtgcatctgttaaggcaaaacagagaaactcacaacctaataaatagcgctcttcccttcattgtgtgcattgtcggcccttcctcgggttctcctcctccagctgcctgggggctttttaataaacttgtctcacctcgtcagccactactgtctgcagcccctttgcaaagtggatgcactgaatacagtccggacagacattgtgggggtctttttattaaatcaagaacattgttaaattcaattaaggtttactctgctgccttggcagacttacgatctcaacagttcatacgagcaggtgaaaggattataaatagaatttcgttaaagtggaacagacgacaagaaagccttttagcaagagggcatgctcactagtggttagtaagctgtcgactttgtaaaaaagttaaaaatgaaaaaaaaaggaaaaatgaattgtatatttaatgaatgaacatgtacaatttgccactgggaggaggttcctttttgttgggtgagtctgcaagtgaatttcactgatgttgatattcattgtgtgtagttttatttcggtcccagccccgtttccttttattttggagctaatgccagctgcgtgtctagttttgagtgcagtaaaatagaatcagcaaatcactcttatttttcatccttttccggtattttttgggttgtttctgtgggagcagtgtacaccaactcttcctgtatattgcctttttgctggaaaatgttgtatgttgaataaaattttctataaaaattataattcagtgagttacgtggaagtggaggaagatttctactctccctggaaacaggcctgggaaaccttggcatttgtaacaaggtttcactgagatgtacttttccttctaattccgttttgcgggggcagggtctcttgtttctttttttttttttttttttttttagcctctaactagtcacatttactcttaagaaatgaaaggttttccaggagagaactgtgtacaaataaggtgactggagatgtgacctgatgtgtcacgaggcccttcggggcggcaggcgctatcgtgggcgtggtccttgcaccgtcccatcggccttgccttccagctccgtggcacggtttcctggtctttgggccagtgtgtaccttggagtgacttcctttctcaacttccactgcagtgtgtgtgccttctgctctgagagctgccttgtgacccgtgtgatagaaagcagggagtgagggtccccgcggacctggcccttccctccttcctcccccagaaagaggagttagagcaggggtgcgagagccgttcgctgtgggtttgtctttgaacaaacattaaggtgtcttgtttttgttctgggctgggggttggctgtagtcttaggtaactgaaagttcctactctcccttaaggtattaaatgactctttttccaaaaaaaacg

SEQ ID NO: 377999 - DNA, 4945 bp, Homo sapiens
gagctccgacccacaccacctgattatggtgatgccacgcttttatccagacagaccacaccaaaaaagcgtaggattctttctccagtgcaatgctgaatctgattccacgtcatggtcttgccatgcacaagcagtgctgaagataataaattacagagatgatgaaaagtcgttcagtcgtcgtattagtcatttgttcttccataaagaaaatgattggggattttccaattttatggcctggagtgaagtgaccgatcctgagaaaggatttatagatgatgacaaagttacctttgaagtctttgtacaggcggatgctccccatggagttgcgtgggattcaaagaagcacacaggctacgtcggcttaaagaatcagggagcgacttgttacatgaacagcctgctacagacgttatttttcacgaatcagctacgaaaggctgtgtacatgatgccaaccgagggggatgattcgtctaaaagcgtccctttagcattacaaagagtgttctatgaattacagcatagtgataaacctgtaggaacaaaaaagttaacaaagtcatttgggtgggaaactttagatagcttcatgcaacatgatgttcaggagctttgtcgagtgttgctcgataatgtggaaaataagatgaaaggcacctgtgtagagggcaccatacccaaattattccgcggcaaaatggtgtcctatatccagtgtaaagaagtagactatcggtctgatagaagagaagattattatgatatccagctaagtatcaaaggaaagaaaaatatatttgaatcatttgtggattatgtggcagtagaacagctcgatggggacaataaatacgacgctggggaacatggcttacaggaagcagagaaaggtgtgaaattcctaacattgccaccagtgttacatctacaactgatgagatttatgtatgaccctcagacggaccaaaatatcaagatcaatgataggtttgaattcccagagcagttaccacttgatgaatttttgcaaaaaacagatcctaaggaccctgcaaattatattcttcatgcagtcctggttcatagtggagataatcatggtggacattatgtggtttatctaaaccccaaaggggatggcaaatggtgtaaatttgatgacgacgtggtgtcaaggtgtactaaagaggaagcaattgagcacaattatgggggtcacgatgacgacctgtctgttcgacactgcactaatgcttacatgttagtctacatcagggaatcaaaactgagtgaagttttacaggcggtcaccgaccatgatattcctcagcagttggtggagcgattacaagaagagaaaaggatcgaggctcagaagcggaaggagcggcaggaagcccatctctatatgcaagtgcagatagtcgcagaggaccagttttgtggccaccaagggaatgacatgtacgatgaagaaaaagtgaaatacactgtgttcaaagtattgaagaactcctcgcttgctgagtttgttcagagcctctctcagaccatgggatttccacaagatcaaattcgattgtggcccatgcaagcaaggagtaatggaacaaaacgaccagcaatgttagataatgaagccgacggcaataaaacaatgattgagctcagtgataatgaaaacccttggacaatattcctggaaacagttgatcccgagctggctgctagtggagcgaccttacccaagtttgataaagatcatgatgtaatgttatttttgaagatgtatgatcccaaaacgcggagcttgaattactgtgggcatatctacacaccaatatcctgtaaaatacgtgacttgctcccagttatgtgtgacagagcaggatttattcaagatactagccttatcctctatgaggaagttaaaccgaatttaacagagagaattcaggactatgacgtgtctcttgataaagcccttgatgaactaatggatggtgacatcatagtatttcagaaggatgaccctgaaaatgataacagtgaattacccaccgcaaaggagtatttccgagatctctaccaccgcgttgatgtcattttctgtgataaaacaatccctaatgatcctggatttgtggttacgttatcaaatagaatgaattattttcaggttgcaaagacagttgcacagaggctcaacacagatccaatgttgctgcagtttttcaagtctcaaggttatagggatggcccaggtaatcctcttagacataattatgaaggtactttaagagatcttctacagttcttcaagcctagacaacctaagaaactttactatcagcagcttaagatgaaaatcacagactttgagaacaggcgaagttttaaatgtatatggttaaacagccaatttagggaagaggaaataacactatatccagacaagcatgggtgtgtccgggacctgttagaagaatgtaaaaaggccgtggagcttggggagaaagcatcagggaaacttaggctgctagaaattgtaagctacaaaatcattggtgttcatcaagaagatgaactattagaatgtttatctcctgcaacgagccggacgtttcgaatagaggaaatccctttggaccaggtggacatagacaaagagaatgagatgcttgtcacagtggcgcatttccacaaagaggtcttcggaacgttcggaatcccgtttttgctgaggatacaccagggcgagcattttcgagaagtgatgaagcgaatccagagcctgctggacatccaggagaaggagtttgagaagtttaaatttgcaattgtaatgatgggccgacaccagtacataaatgaagacgagtatgaagtaaatttgaaagactttgagccacagcccggtaatatgtctcatcctcggccttggctagggctcgaccacttcaacaaagccccaaagaggagtcgctacacttaccttgaaaaggccattaaaatccataactgatttccaagctggtgtgttcaaggcgaggacggtgtgtgggtggccccttaacagcctagaactttggtgcacgtgccctctagccgaagtcttcagcaagaggattcgctgctggtgttaattttattttattgaggctgttcagtttggcttctctgtatctattgactgccctttttgagcaaaatgaagatgtttttataaagcttggatgccaatgagagttattttatggtaaccacagtgcaaggcaactgtcagcgcaatgggggagaagaggttagtggatcgggggtccctggctcaaggtctctgggctgtccctagtgggcacgagtggctcggctgccttcctggggtcccgtgcaccagccctgcagctagcaagtcttgtgtttaggctcgtctgacctatttccttcagttatactttcaatgaccttttgtgcatctgttaaggcaaaacagagaaactcacaacctaataaatagcgctcttcccttcattgtgtgcattgtcggcccttcctcgggttctcctcctccagctgcctgggggctttttaataaacttgtctcacctcgtcagccactactgtctgcagcccctttgcaaagtggatgcactgaatacagtccggacagacattgtgggggtctttttattaaatcaagaacattgttaaattcaattaaggtttactctgctgccttggcagacttacgatctcaacagttcatacgagcaggtgaaaggattataaatagaatttcgttaaagtggaacagacgacaagaaagccttttagcaagagggcatgctcactagtggttagtaagctgtcgactttgtaaaaaagttaaaaatgaaaaaaaaaggaaaaatgaattgtatatttaatgaatgaacatgtacaatttgccactgggaggaggttcctttttgttgggtgagtctgcaagtgaatttcactgatgttgatattcattgtgtgtagttttatttcggtcccagccccgtttccttttattttggagctaatgccagctgcgtgtctagttttgagtgcagtaaaatagaatcagcaaatcactcttatttttcatccttttccggtattttttgggttgtttctgtgggagcagtgtacaccaactcttcctgtatattgcctttttgctggaaaatgttgtatgttgaataaaattttctataaaaattataattcagtgagttacgtggaagtggaggaagatttctactctccctggaaacaggcctgggaaaccttggcatttgtaacaaggtttcactgagatgtacttttccttctaattccgttttgcgggggcagggtctcttgtttctttttttttttttttttttttttagcctctaactagtcacatttactcttaagaaatgaaaggttttccaggagagaactgtgtacaaataaggtgactggagatgtgacctgatgtgtcacgaggcccttcggggcggcaggcgctatcgtgggcgtggtccttgcaccgtcccatcggccttgccttccagctccgtggcacggtttcctggtctttgggccagtgtgtaccttggagtgacttcctttctcaacttccactgcagtgtgtgtgccttctgctctgagagctgccttgtgacccgtgtgatagaaagcagggagtgagggtccccgcggacctggcccttccctccttcctcccccagaaagaggagttagagcaggggtgcgagagccgttcgctgtgggtttgtctttgaacaaacattaaggtgtcttgtttttgttctgggctgggggttggctgtagtcttaggtaactgaaagttcctactctcccttaaggtattaaatgactctttttccaaaaaaaacg

SEQ ID NO: 378000 - DNA, 4956 bp, Homo sapiens
ccttgcgtgtgataagtgtaatatgtaaccaaactctaccatgaggcatgttgggtgtgagcatgcaggtctccgttaagtgtctgttggtgctgggcttgatcagtgacaggagtgccactgtcagcaggcaggtgcttcgagggctgtgcgaatgtgggggttgcatttgcaccagttcacacactggagcaagcagaagggaatcggtgaccattgaaggatgctgtgtgataagtgttcctggcctcggtttccttaaggctgaccttgagtcagattgcttcacacacactgcaggagcaatggggtatctgcaagatcccctcaaccttgaactgatctttcaggtgggattcaaagaagcacacaggctacgtcggcttaaagaatcagggagcgacttgttacatgaacagcctgctacagacgttatttttcacgaatcagctacgaaaggctgtgtacatgatgccaaccgagggggatgattcgtctaaaagcgtccctttagcattacaaagagtgttctatgaattacagcatagtgataaacctgtaggaacaaaaaagttaacaaagtcatttgggtgggaaactttagatagcttcatgcaacatgatgttcaggagctttgtcgagtgttgctcgataatgtggaaaataagatgaaaggcacctgtgtagagggcaccatacccaaattattccgcggcaaaatggtgtcctatatccagtgtaaagaagtagactatcggtctgatagaagagaagattattatgatatccagctaagtatcaaaggaaagaaaaatatatttgaatcatttgtggattatgtggcagtagaacagctcgatggggacaataaatacgacgctggggaacatggcttacaggaagcagagaaaggtgtgaaattcctaacattgccaccagtgttacatctacaactgatgagatttatgtatgaccctcagacggaccaaaatatcaagatcaatgataggtttgaattcccagagcagttaccacttgatgaatttttgcaaaaaacagatcctaaggaccctgcaaattatattcttcatgcagtcctggttcatagtggagataatcatggtggacattatgtggtttatctaaaccccaaaggggatggcaaatggtgtaaatttgatgacgacgtggtgtcaaggtgtactaaagaggaagcaattgagcacaattatgggggtcacgatgacgacctgtctgttcgacactgcactaatgcttacatgttagtctacatcagggaatcaaaactgagtgaagttttacaggcggtcaccgaccatgatattcctcagcagttggtggagcgattacaagaagagaaaaggatcgaggctcagaagcggaaggagcggcaggaagcccatctctatatgcaagtgcagatagtcgcagaggaccagttttgtggccaccaagggaatgacatgtacgatgaagaaaaagtgaaatacactgtgttcaaagtattgaagaactcctcgcttgctgagtttgttcagagcctctctcagaccatgggatttccacaagatcaaattcgattgtggcccatgcaagcaaggagtaatggaacaaaacgaccagcaatgttagataatgaagccgacggcaataaaacaatgattgagctcagtgataatgaaaacccttggacaatattcctggaaacagttgatcccgagctggctgctagtggagcgaccttacccaagtttgataaagatcatgatgtaatgttatttttgaagatgtatgatcccaaaacgcggagcttgaattactgtgggcatatctacacaccaatatcctgtaaaatacgtgacttgctcccagttatgtgtgacagagcaggatttattcaagatactagccttatcctctatgaggaagttaaaccgaatttaacagagagaattcaggactatgacgtgtctcttgataaagcccttgatgaactaatggatggtgacatcatagtatttcagaaggatgaccctgaaaatgataacagtgaattacccaccgcaaaggagtatttccgagatctctaccaccgcgttgatgtcattttctgtgataaaacaatccctaatgatcctggatttgtggttacgttatcaaatagaatgaattattttcaggttgcaaagacagttgcacagaggctcaacacagatccaatgttgctgcagtttttcaagtctcaaggttatagggatggcccaggtaatcctcttagacataattatgaaggtactttaagagatcttctacagttcttcaagcctagacaacctaagaaactttactatcagcagcttaagatgaaaatcacagactttgagaacaggcgaagttttaaatgtatatggttaaacagccaatttagggaagaggaaataacactatatccagacaagcatgggtgtgtccgggacctgttagaagaatgtaaaaaggccgtggagcttggggagaaagcatcagggaaacttaggctgctagaaattgtaagctacaaaatcattggtgttcatcaagaagatgaactattagaatgtttatctcctgcaacgagccggacgtttcgaatagaggaaatccctttggaccaggtggacatagacaaagagaatgagatgcttgtcacagtggcgcatttccacaaagaggtcttcggaacgttcggaatcccgtttttgctgaggatacaccagggcgagcattttcgagaagtgatgaagcgaatccagagcctgctggacatccaggagaaggagtttgagaagtttaaatttgcaattgtaatgatgggccgacaccagtacataaatgaagacgagtatgaagtaaatttgaaagactttgagccacagcccggtaatatgtctcatcctcggccttggctagggctcgaccacttcaacaaagccccaaagaggagtcgctacacttaccttgaaaaggccattaaaatccataactgatttccaagctggtgtgttcaaggcgaggacggtgtgtgggtggccccttaacagcctagaactttggtgcacgtgccctctagccgaagtcttcagcaagaggattcgctgctggtgttaattttattttattgaggctgttcagtttggcttctctgtatctattgactgccctttttgagcaaaatgaagatgtttttataaagcttggatgccaatgagagttattttatggtaaccacagtgcaaggcaactgtcagcgcaatgggggagaagaggttagtggatcgggggtccctggctcaaggtctctgggctgtccctagtgggcacgagtggctcggctgccttcctggggtcccgtgcaccagccctgcagctagcaagtcttgtgtttaggctcgtctgacctatttccttcagttatactttcaatgaccttttgtgcatctgttaaggcaaaacagagaaactcacaacctaataaatagcgctcttcccttcattgtgtgcattgtcggcccttcctcgggttctcctcctccagctgcctgggggctttttaataaacttgtctcacctcgtcagccactactgtctgcagcccctttgcaaagtggatgcactgaatacagtccggacagacattgtgggggtctttttattaaatcaagaacattgttaaattcaattaaggtttactctgctgccttggcagacttacgatctcaacagttcatacgagcaggtgaaaggattataaatagaatttcgttaaagtggaacagacgacaagaaagccttttagcaagagggcatgctcactagtggttagtaagctgtcgactttgtaaaaaagttaaaaatgaaaaaaaaaggaaaaatgaattgtatatttaatgaatgaacatgtacaatttgccactgggaggaggttcctttttgttgggtgagtctgcaagtgaatttcactgatgttgatattcattgtgtgtagttttatttcggtcccagccccgtttccttttattttggagctaatgccagctgcgtgtctagttttgagtgcagtaaaatagaatcagcaaatcactcttatttttcatccttttccggtattttttgggttgtttctgtgggagcagtgtacaccaactcttcctgtatattgcctttttgctggaaaatgttgtatgttgaataaaattttctataaaaattataattcagtgagttacgtggaagtggaggaagatttctactctccctggaaacaggcctgggaaaccttggcatttgtaacaaggtttcactgagatgtacttttccttctaattccgttttgcgggggcagggtctcttgtttctttttttttttttttttttttttagcctctaactagtcacatttactcttaagaaatgaaaggttttccaggagagaactgtgtacaaataaggtgactggagatgtgacctgatgtgtcacgaggcccttcggggcggcaggcgctatcgtgggcgtggtccttgcaccgtcccatcggccttgccttccagctccgtggcacggtttcctggtctttgggccagtgtgtaccttggagtgacttcctttctcaacttccactgcagtgtgtgtgccttctgctctgagagctgccttgtgacccgtgtgatagaaagcagggagtgagggtccccgcggacctggcccttccctccttcctcccccagaaagaggagttagagcaggggtgcgagagccgttcgctgtgggtttgtctttgaacaaacattaaggtgtcttgtttttgttctgggctgggggttggctgtagtcttaggtaactgaaagttcctactctcccttaaggtattaaatgactctttttccaaaaaaaacg

SEQ ID NO: 378001 - DNA, 4164 bp, Homo sapiens
cgtaagtaagtccaaaagaaaaatatatttgaatcatttgtggattatgtggcagtagaacagctcgatggggacaataaatacgacgctggggaacatggcttacaggaagcagagaaaggtgtgaaattcctaacattgccaccagtgttacatctacaactgatgagatttatgtatgaccctcagacggaccaaaatatcaagatcaatgataggtttgaattcccagagcagttaccacttgatgaatttttgcaaaaaacagatcctaaggaccctgcaaattatattcttcatgcagtcctggttcatagtggagataatcatggtggacattatgtggtttatctaaaccccaaaggggatggcaaatggtgtaaatttgatgacgacgtggtgtcaaggtgtactaaagaggaagcaattgagcacaattatgggggtcacgatgacgacctgtctgttcgacactgcactaatgcttacatgttagtctacatcagggaatcaaaactgagtgaagttttacaggcggtcaccgaccatgatattcctcagcagttggtggagcgattacaagaagagaaaaggatcgaggctcagaagcggaaggagcggcaggaagcccatctctatatgcaagtgcagatagtcgcagaggaccagttttgtggccaccaagggaatgacatgtacgatgaagaaaaagtgaaatacactgtgttcaaagtattgaagaactcctcgcttgctgagtttgttcagagcctctctcagaccatgggatttccacaagatcaaattcgattgtggcccatgcaagcaaggagtaatggaacaaaacgaccagcaatgttagataatgaagccgacggcaataaaacaatgattgagctcagtgataatgaaaacccttggacaatattcctggaaacagttgatcccgagctggctgctagtggagcgaccttacccaagtttgataaagatcatgatgtaatgttatttttgaagatgtatgatcccaaaacgcggagcttgaattactgtgggcatatctacacaccaatatcctgtaaaatacgtgacttgctcccagttatgtgtgacagagcaggatttattcaagatactagccttatcctctatgaggaagttaaaccgaatttaacagagagaattcaggactatgacgtgtctcttgataaagcccttgatgaactaatggatggtgacatcatagtatttcagaaggatgaccctgaaaatgataacagtgaattacccaccgcaaaggagtatttccgagatctctaccaccgcgttgatgtcattttctgtgataaaacaatccctaatgatcctggatttgtggttacgttatcaaatagaatgaattattttcaggttgcaaagacagttgcacagaggctcaacacagatccaatgttgctgcagtttttcaagtctcaaggttatagggatggcccaggtaatcctcttagacataattatgaaggtactttaagagatcttctacagttcttcaagcctagacaacctaagaaactttactatcagcagcttaagatgaaaatcacagactttgagaacaggcgaagttttaaatgtatatggttaaacagccaatttagggaagaggaaataacactatatccagacaagcatgggtgtgtccgggacctgttagaagaatgtaaaaaggccgtggagcttggggagaaagcatcagggaaacttaggctgctagaaattgtaagctacaaaatcattggtgttcatcaagaagatgaactattagaatgtttatctcctgcaacgagccggacgtttcgaatagaggaaatccctttggaccaggtggacatagacaaagagaatgagatgcttgtcacagtggcgcatttccacaaagaggtcttcggaacgttcggaatcccgtttttgctgaggatacaccagggcgagcattttcgagaagtgatgaagcgaatccagagcctgctggacatccaggagaaggagtttgagaagtttaaatttgcaattgtaatgatgggccgacaccagtacataaatgaagacgagtatgaagtaaatttgaaagactttgagccacagcccggtaatatgtctcatcctcggccttggctagggctcgaccacttcaacaaagccccaaagaggagtcgctacacttaccttgaaaaggccattaaaatccataactgatttccaagctggtgtgttcaaggcgaggacggtgtgtgggtggccccttaacagcctagaactttggtgcacgtgccctctagccgaagtcttcagcaagaggattcgctgctggtgttaattttattttattgaggctgttcagtttggcttctctgtatctattgactgccctttttgagcaaaatgaagatgtttttataaagcttggatgccaatgagagttattttatggtaaccacagtgcaaggcaactgtcagcgcaatgggggagaagaggttagtggatcgggggtccctggctcaaggtctctgggctgtccctagtgggcacgagtggctcggctgccttcctggggtcccgtgcaccagccctgcagctagcaagtcttgtgtttaggctcgtctgacctatttccttcagttatactttcaatgaccttttgtgcatctgttaaggcaaaacagagaaactcacaacctaataaatagcgctcttcccttcattgtgtgcattgtcggcccttcctcgggttctcctcctccagctgcctgggggctttttaataaacttgtctcacctcgtcagccactactgtctgcagcccctttgcaaagtggatgcactgaatacagtccggacagacattgtgggggtctttttattaaatcaagaacattgttaaattcaattaaggtttactctgctgccttggcagacttacgatctcaacagttcatacgagcaggtgaaaggattataaatagaatttcgttaaagtggaacagacgacaagaaagccttttagcaagagggcatgctcactagtggttagtaagctgtcgactttgtaaaaaagttaaaaatgaaaaaaaaaggaaaaatgaattgtatatttaatgaatgaacatgtacaatttgccactgggaggaggttcctttttgttgggtgagtctgcaagtgaatttcactgatgttgatattcattgtgtgtagttttatttcggtcccagccccgtttccttttattttggagctaatgccagctgcgtgtctagttttgagtgcagtaaaatagaatcagcaaatcactcttatttttcatccttttccggtattttttgggttgtttctgtgggagcagtgtacaccaactcttcctgtatattgcctttttgctggaaaatgttgtatgttgaataaaattttctataaaaattataattcagtgagttacgtggaagtggaggaagatttctactctccctggaaacaggcctgggaaaccttggcatttgtaacaaggtttcactgagatgtacttttccttctaattccgttttgcgggggcagggtctcttgtttctttttttttttttttttttttttagcctctaactagtcacatttactcttaagaaatgaaaggttttccaggagagaactgtgtacaaataaggtgactggagatgtgacctgatgtgtcacgaggcccttcggggcggcaggcgctatcgtgggcgtggtccttgcaccgtcccatcggccttgccttccagctccgtggcacggtttcctggtctttgggccagtgtgtaccttggagtgacttcctttctcaacttccactgcagtgtgtgtgccttctgctctgagagctgccttgtgacccgtgtgatagaaagcagggagtgagggtccccgcggacctggcccttccctccttcctcccccagaaagaggagttagagcaggggtgcgagagccgttcgctgtgggtttgtctttgaacaaacattaaggtgtcttgtttttgttctgggctgggggttggctgtagtcttaggtaactgaaagttcctactctcccttaaggtattaaatgactctttttccaaaaaaaacg

SEQ ID NO: 378002 - DNA, 5509 bp, Homo sapiens
gtacgtgcgcgtctccctgccgccgccgccgcccgccgcgggccgccccggggccgccgtcgccgacgacgcgcgggaggaggaggaggaggccgccccgccgccgccgccgccgccgccgccccggctcgccgccgcccgcccgccgggctcgcagccccggcccccggccgcaggcgaggcccaggccgcggccgacatgaaccaccagcagcagcagcagcagcagaaagcgggcgagcagcagttgagcgagcccgaggacatggagatggaagcgggagatacagatgacccaccaagaattactcagaaccctgtgatcaatgggaatgtggccctgagtgatggacacaacaccgcggaggaggacatggaggatgacaccagttggcgctccgaggcaacctttcagttcactgtggagcgcttcagcagactgagtgagtcggtccttagccctccgtgttttgtgcgaaatctgccatggaagattatggtgatgccacgcttttatccagacagaccacaccaaaaaagcgtaggattctttctccagtgcaatgctgaatctgattccacgtcatggtcttgccatgcacaagcagtgctgaagataataaattacagagatgatgaaaagtcgttcagtcgtcgtattagtcatttgttcttccataaagaaaatgattggggattttccaattttatggcctggagtgaagtgaccgatcctgagaaaggatttatagatgatgacaaagttacctttgaagtctttgtacaggcggatgctccccatggagttgcgtgggattcaaagaagcacacaggctacgtcggcttaaagaatcagggagcgacttgttacatgaacagcctgctacagacgttatttttcacgaatcagctacgaaaggctgtgtacatgatgccaaccgagggggatgattcgtctaaaagcgtccctttagcattacaaagagtgttctatgaattacagcatagtgataaacctgtaggaacaaaaaagttaacaaagtcatttgggtgggaaactttagatagcttcatgcaacatgatgttcaggagctttgtcgagtgttgctcgataatgtggaaaataagatgaaaggcacctgtgtagagggcaccatacccaaattattccgcggcaaaatggtgtcctatatccagtgtaaagaagtagactatcggtctgatagaagagaagattattatgatatccagctaagtatcaaaggaaagaaaaatatatttgaatcatttgtggattatgtggcagtagaacagctcgatggggacaataaatacgacgctggggaacatggcttacaggaagcagagaaaggtgtgaaattcctaacattgccaccagtgttacatctacaactgatgagatttatgtatgaccctcagacggaccaaaatatcaagatcaatgataggtttgaattcccagagcagttaccacttgatgaatttttgcaaaaaacagatcctaaggaccctgcaaattatattcttcatgcagtcctggttcatagtggagataatcatggtggacattatgtggtttatctaaaccccaaaggggatggcaaatggtgtaaatttgatgacgacgtggtgtcaaggtgtactaaagaggaagcaattgagcacaattatgggggtcacgatgacgacctgtctgttcgacactgcactaatgcttacatgttagtctacatcagggaatcaaaactgagtgaagttttacaggcggtcaccgaccatgatattcctcagcagttggtggagcgattacaagaagagaaaaggatcgaggctcagaagcggaaggagcggcaggaagcccatctctatatgcaagtgcagatagtcgcagaggaccagttttgtggccaccaagggaatgacatgtacgatgaagaaaaagtgaaatacactgtgttcaaagtattgaagaactcctcgcttgctgagtttgttcagagcctctctcagaccatgggatttccacaagatcaaattcgattgtggcccatgcaagcaaggagtaatggaacaaaacgaccagcaatgttagataatgaagccgacggcaataaaacaatgattgagctcagtgataatgaaaacccttggacaatattcctggaaacagttgatcccgagctggctgctagtggagcgaccttacccaagtttgataaagatcatgatgtaatgttatttttgaagatgtatgatcccaaaacgcggagcttgaattactgtgggcatatctacacaccaatatcctgtaaaatacgtgacttgctcccagttatgtgtgacagagcaggatttattcaagatactagccttatcctctatgaggaagttaaaccgaatttaacagagagaattcaggactatgacgtgtctcttgataaagcccttgatgaactaatggatggtgacatcatagtatttcagaaggatgaccctgaaaatgataacagtgaattacccaccgcaaaggagtatttccgagatctctaccaccgcgttgatgtcattttctgtgataaaacaatccctaatgatcctggatttgtggttacgttatcaaatagaatgaattattttcaggttgcaaagacagttgcacagaggctcaacacagatccaatgttgctgcagtttttcaagtctcaaggttatagggatggcccaggtaatcctcttagacataattatgaaggtactttaagagatcttctacagttcttcaagcctagacaacctaagaaactttactatcagcaggtatgagtccaaattaatgtaactatgggtcataaagagaaggctcggggttttggtgacggtatctgatgtgaatctttcttttcttaatagcttaagatgaaaatcacagactttgagaacaggcgaagttttaaatgtatatggttaaacagccaatttagggaagaggaaataacactatatccagacaagcatgggtgtgtccgggacctgttagaagaatgtaaaaaggccgtggagcttggggagaaagcatcagggaaacttaggctgctagaaattgtaagctacaaaatcattggtgttcatcaagaagatgaactattagaatgtttatctcctgcaacgagccggacgtttcgaatagaggaaatccctttggaccaggtggacatagacaaagagaatgagatgcttgtcacagtggcgcatttccacaaagaggtcttcggaacgttcggaatcccgtttttgctgaggatacaccagggcgagcattttcgagaagtgatgaagcgaatccagagcctgctggacatccaggagaaggagtttgagaagtttaaatttgcaattgtaatgatgggccgacaccagtacataaatgaagacgagtatgaagtaaatttgaaagactttgagccacagcccggtaatatgtctcatcctcggccttggctagggctcgaccacttcaacaaagccccaaagaggagtcgctacacttaccttgaaaaggccattaaaatccataactgatttccaagctggtgtgttcaaggcgaggacggtgtgtgggtggccccttaacagcctagaactttggtgcacgtgccctctagccgaagtcttcagcaagaggattcgctgctggtgttaattttattttattgaggctgttcagtttggcttctctgtatctattgactgccctttttgagcaaaatgaagatgtttttataaagcttggatgccaatgagagttattttatggtaaccacagtgcaaggcaactgtcagcgcaatgggggagaagaggttagtggatcgggggtccctggctcaaggtctctgggctgtccctagtgggcacgagtggctcggctgccttcctggggtcccgtgcaccagccctgcagctagcaagtcttgtgtttaggctcgtctgacctatttccttcagttatactttcaatgaccttttgtgcatctgttaaggcaaaacagagaaactcacaacctaataaatagcgctcttcccttcattgtgtgcattgtcggcccttcctcgggttctcctcctccagctgcctgggggctttttaataaacttgtctcacctcgtcagccactactgtctgcagcccctttgcaaagtggatgcactgaatacagtccggacagacattgtgggggtctttttattaaatcaagaacattgttaaattcaattaaggtttactctgctgccttggcagacttacgatctcaacagttcatacgagcaggtgaaaggattataaatagaatttcgttaaagtggaacagacgacaagaaagccttttagcaagagggcatgctcactagtggttagtaagctgtcgactttgtaaaaaagttaaaaatgaaaaaaaaaggaaaaatgaattgtatatttaatgaatgaacatgtacaatttgccactgggaggaggttcctttttgttgggtgagtctgcaagtgaatttcactgatgttgatattcattgtgtgtagttttatttcggtcccagccccgtttccttttattttggagctaatgccagctgcgtgtctagttttgagtgcagtaaaatagaatcagcaaatcactcttatttttcatccttttccggtattttttgggttgtttctgtgggagcagtgtacaccaactcttcctgtatattgcctttttgctggaaaatgttgtatgttgaataaaattttctataaaaattataattcagtgagttacgtggaagtggaggaagatttctactctccctggaaacaggcctgggaaaccttggcatttgtaacaaggtttcactgagatgtacttttccttctaattccgttttgcgggggcagggtctcttgtttctttttttttttttttttttttttagcctctaactagtcacatttactcttaagaaatgaaaggttttccaggagagaactgtgtacaaataaggtgactggagatgtgacctgatgtgtcacgaggcccttcggggcggcaggcgctatcgtgggcgtggtccttgcaccgtcccatcggccttgccttccagctccgtggcacggtttcctggtctttgggccagtgtgtaccttggagtgacttcctttctcaacttccactgcagtgtgtgtgccttctgctctgagagctgccttgtgacccgtgtgatagaaagcagggagtgagggtccccgcggacctggcccttccctccttcctcccccagaaagaggagttagagcaggggtgcgagagccgttcgctgtgggtttgtctttgaacaaacattaaggtgtcttgtttttgttctgggctgggggttggctgtagtcttaggtaactgaaagttcctactctcccttaaggtattaaatgactctttttccaaaaaaaacg

SEQ ID NO: 378003 - DNA, 5168 bp, Homo sapiens
gtacgtgcgcgtctccctgccgccgccgccgcccgccgcgggccgccccggggccgccgtcgccgacgacgcgcgggaggaggaggaggaggccgccccgccgccgccgccgccgccgccgccccggctcgccgccgcccgcccgccgggctcgcagccccggcccccggccgcaggcgaggcccaggccgcggccgacatgaaccaccagcagcagcagcagcagcagaaagcgggcgagcagcagttgagcgagcccgaggacatggagatggaagcgggagatacagatgacccaccaagaattactcagaaccctgtgatcaatgggaatgtggccctgagtgatggacacaacaccgcggaggaggacatggaggatgacaccagttggcgctccgaggcaacctttcagttcactgtggagcgcttcagcagactgagtgagtcggtccttagccctccgtgttttgtgcgaaatctgccatggaagattatggtgatgccacgcttttatccagacagaccacaccaaaaaagcgtaggattctttctccagtgcaatgctgaatctgattccacgtcatggtcttgccatgcacaagcagtgctgaagataataaattacagagatgatgaaaagtcgttcagtcgtcgtattagtcatttgttcttccataaagaaaatgattggggattttccaattttatggcctggagtgaagtgaccgatcctgagaaaggatttatagatgatgacaaagttacctttgaagtctttgtacaggcggatgctccccatggagttgcgtgggattcaaagaagcacacaggctacgtcggcttaaagaatcagggagcgacttgttacatgaacagcctgctacagacgttatttttcacgaatcagctacgaaaggctgtgtacatgatgccaaccgagggggatgattcgtctaaaagcgtccctttagcattacaaagagtgttctatgaattacagcatagtgataaacctgtaggaacaaaaaagttaacaaagtcatttgggtgggaaactttagatagcttcatgcaacatgatgttcaggagctttgtcgagtgttgctcgataatgtggaaaataagatgaaaggcacctgtgtagagggcaccatacccaaattattccgcggcaaaatggtgtcctatatccagtgtaaagaagtagactatcggtctgatagaagagaagattattatgatatccagctaagtatcaaaggaaagaaaaatatatttgaatcatttgtggattatgtggcagtagaacagctcgatggggacaataaatacgacgctggggaacatggcttacaggaagcagagaaaggtgtgaaattcctaacattgccaccagtgttacatctacaactgatgagatttatgtatgaccctcagacggaccaaaatatcaagatcaatgataggtttgaattcccagagcagttaccacttgatgaatttttgcaaaaaacagatcctaaggaccctgcaaattatattcttcatgcagtcctggttcatagtggagataatcatggtggacattatgtggtttatctaaaccccaaaggggatggcaaatggtgtaaatttgatgacgacgtggtgtcaaggtgtactaaagaggaagcaattgagcacaattatgggggtcacgatgacgacctgtctgttcgacactgcactaatgcttacatgttagtctacatcagggaatcaaaactgagtgaagttttacaggcggtcaccgaccatgatattcctcagcagttggtggagcgattacaagaagagaaaaggatcgaggctcagaagcggaaggagcggcaggaagcccatctctatatgcaagtgcagatagtcgcagaggaccagttttgtggccaccaagggaatgacatgtacgatgaagaaaaagtgaaatacactgtgttcaaagtattgaagaactcctcgcttgctgagtttgttcagagcctctctcagaccatgggatttccacaagatcaaattcgattgtggcccatgcaagcaaggagtaatggaacaaaacgaccagcaatgttagataatgaagccgacggcaataaaacaatgattgagctcagtgataatgaaaacccttggacaatattcctggaaacagttgatcccgagctggctgctagtggagcgaccttacccaagtttgataaagatcatgatgtaatgttatttttgaagatgtatgatcccaaaacgcggagcttgaattactgtgggcatatctacacaccaatatcctgtaaaatacgtgacttgctcccagttatgtgtgacagagcaggatttattcaagatactagccttatcctctatgaggaagttaaaccgaatttaacagagagaattcaggactatgacgtgtctcttgataaagcccttgatgaactaatggatggtgacatcatagtatttcagaaggatgaccctgaaaatgataacagtgaattacccaccgcaaaggagtatttccgagatctctaccaccgcgttgatgtcattttctgtgataaaacaatccctaatgatcctggatttgtggttacgttatcaaatagaatgaattattttcaggttgcaaagacagttgcacagaggctcaacacagatccaatgttgctgcagtttttcaagtctcaaggttatagggatggcccaggtaatcctcttagacataattatgaaggtactttaagagatcttctacagttcttcaagcctagacaacctaagaaactttactatcagcagcttaagatgaaaatcacagactttgagaacaggcgaagttttaaatgtatatggttaaacagccaatttagggaagaggaaataacactatatccagacaagcatgggtgtgtccgggacctgttagaagaatgtaaaaaggccgtggagcttggggagaaagcatcagggaaacttaggctgctagaaattgtaagctacaaaatcattggtgttcatcaagaagatgaactattagaatgtttatctcctgcaacgagccggacgtttcgaatagaggaaatccctttggaccaggtggacatagacaaagagaatgagatgcttgtcacagtggcgcatttccacaaagaggtcttcggaacgttcggaatcccgtttttgctgaggatacaccagggcgagcattttcgagaagtgatgaagcgaatccagagcctgctggacatccaggagaaggagtttgagaagtttaaatttgcaattgtaatgatgggccgacaccagtacataaatgaagacgagtatgaagtaaatttgaaagactttgagccacagcccggtaatatgtctcatcctcggccttggctagggctcgaccacttcaacaaagccccaaagaggagtcgctacacttaccttgaaaaggccattaaaatccataactgatttccaagctggtgtgttcaaggcgaggacggtgtgtgggtggccccttaacagcctagaactttggtgcacgtgccctctagccgaagtcttcagcaagaggattcgctgctggtgttaattttattttattgaggctgttcagtttggcttctctgtatctattgactgccctttttgagcaaaatgaagatgtttttataaagcttggatgccaatgagagttattttatggtaaccacagtgcaaggcaactgtcagcgcaatgggggagaagaggttagtgttctcctcctccagctgcctgggggctttttaataaacttgtctcacctcgtcagccactactgtctgcagcccctttgcaaagtggatgcactgaatacagtccggacagacattgtgggggtctttttattaaatcaagaacattgttaaattcaattaaggtttactctgctgccttggcagacttacgatctcaacagttcatacgagcaggtgaaaggattataaatagaatttcgttaaagtggaacagacgacaagaaagccttttagcaagagggcatgctcactagtggttagtaagctgtcgactttgtaaaaaagttaaaaatgaaaaaaaaaggaaaaatgaattgtatatttaatgaatgaacatgtacaatttgccactgggaggaggttcctttttgttgggtgagtctgcaagtgaatttcactgatgttgatattcattgtgtgtagttttatttcggtcccagccccgtttccttttattttggagctaatgccagctgcgtgtctagttttgagtgcagtaaaatagaatcagcaaatcactcttatttttcatccttttccggtattttttgggttgtttctgtgggagcagtgtacaccaactcttcctgtatattgcctttttgctggaaaatgttgtatgttgaataaaattttctataaaaattataattcagtgagttacgtggaagtggaggaagatttctactctccctggaaacaggcctgggaaaccttggcatttgtaacaaggtttcactgagatgtacttttccttctaattccgttttgcgggggcagggtctcttgtttctttttttttttttttttttttttagcctctaactagtcacatttactcttaagaaatgaaaggttttccaggagagaactgtgtacaaataaggtgactggagatgtgacctgatgtgtcacgaggcccttcggggcggcaggcgctatcgtgggcgtggtccttgcaccgtcccatcggccttgccttccagctccgtggcacggtttcctggtctttgggccagtgtgtaccttggagtgacttcctttctcaacttccactgcagtgtgtgtgccttctgctctgagagctgccttgtgacccgtgtgatagaaagcagggagtgagggtccccgcggacctggcccttccctccttcctcccccagaaagaggagttagagcaggggtgcgagagccgttcgctgtgggtttgtctttgaacaaacattaaggtgtcttgtttttgttctgggctgggggttggctgtagtcttaggtaactgaaagttcctactctcccttaaggtattaaatgactctttttccaaaaaaaacg

SEQ ID NO: 378004 - DNA, 5348 bp, Homo sapiens
gtacgtgcgcgtctccctgccgccgccgccgcccgccgcgggccgccccggggccgccgtcgccgacgacgcgcgggaggaggaggaggaggccgccccgccgccgccgccgccgccgccgccccggctcgccgccgcccgcccgccgggctcgcagccccggcccccggccgcaggcgaggcccaggccgcggccgacatgaaccaccagcagcagcagcagcagcagaaagcgggcgagcagcagttgagcgagcccgaggacatggagatggaagcgggagatacagatgacccaccaagaattactcagaaccctgtgatcaatgggaatgtggccctgagtgatggacacaacaccgcggaggaggacatggaggatgacaccagttggcgctccgaggcaacctttcagttcactgtggagcgcttcagcagactgagtgagtcggtccttagccctccgtgttttgtgcgaaatctgccatggaagattatggtgatgccacgcttttatccagacagaccacaccaaaaaagcgtaggattctttctccagtgcaatgctgaatctgattccacgtcatggtcttgccatgcacaagcagtgctgaagataataaattacagagatgatgaaaagtcgttcagtcgtcgtattagtcatttgttcttccataaagaaaatgattggggattttccaattttatggcctggagtgaagtgaccgatcctgagaaaggatttatagatgatgacaaagttacctttgaagtctttgtacaggcggatgctccccatggagttgcgtgggattcaaagaagcacacaggctacgtcggcttaaagaatcagggagcgacttgttacatgaacagcctgctacagacgttatttttcacgaatcagctacgaaaggctgtgtacatgatgccaaccgagggggatgattcgtctaaaagcgtccctttagcattacaaagagtgttctatgaattacagcatagtgataaacctgtaggaacaaaaaagttaacaaagtcatttgggtgggaaactttagatagcttcatgcaacatgatgttcaggagctttgtcgagtgttgctcgataatgtggaaaataagatgaaaggcacctgtgtagagggcaccatacccaaattattccgcggcaaaatggtgtcctatatccagtgtaaagaagtagactatcggtctgatagaagagaagattattatgatatccagctaagtatcaaaggaaagaaaaatatatttgaatcatttgtggattatgtggcagtagaacagctcgatggggacaataaatacgacgctggggaacatggcttacaggaagcagagaaaggtgtgaaattcctaacattgccaccagtgttacatctacaactgatgagatttatgtatgaccctcagacggaccaaaatatcaagatcaatgataggtttgaattcccagagcagttaccacttgatgaatttttgcaaaaaacagatcctaaggaccctgcaaattatattcttcatgcagtcctggttcatagtggagataatcatggtggacattatgtggtttatctaaaccccaaaggggatggcaaatggtgtaaatttgatgacgacgtggtgtcaaggtgtactaaagaggaagcaattgagcacaattatgggggtcacgatgacgacctgtctgttcgacactgcactaatgcttacatgttagtctacatcagggaatcaaaactgagtgaagttttacaggcggtcaccgaccatgatattcctcagcagttggtggagcgattacaagaagagaaaaggatcgaggctcagaagcggaaggagcggcaggaagcccatctctatatgcaagtgcagatagtcgcagaggaccagttttgtggccaccaagggaatgacatgtacgatgaagaaaaagtgaaatacactgtgttcaaagtattgaagaactcctcgcttgctgagtttgttcagagcctctctcagaccatgggatttccacaagatcaaattcgattgtggcccatgcaagcaaggagtaatggaacaaaacgaccagcaatgttagataatgaagccgacggcaataaaacaatgattgagctcagtgataatgaaaacccttggacaatattcctggaaacagttgatcccgagctggctgctagtggagcgaccttacccaagtttgataaagatcatgatgtaatgttatttttgaagatgtatgatcccaaaacgcggagcttgaattactgtgggcatatctacacaccaatatcctgtaaaatacgtgacttgctcccagttatgtgtgacagagcaggatttattcaagatactagccttatcctctatgaggaagttaaaccgaatttaacagagagaattcaggactatgacgtgtctcttgataaagcccttgatgaactaatggatggtgacatcatagtatttcagaaggatgaccctgaaaatgataacagtgaattacccaccgcaaaggagtatttccgagatctctaccaccgcgttgatgtcattttctgtgataaaacaatccctaatgatcctggatttgtggttacgttatcaaatagaatgaattattttcagttatagggatggcccaggtaatcctcttagacataattatgaaggtactttaagagatcttctacagttcttcaagcctagacaacctaagaaactttactatcagcagcttaagatgaaaatcacagactttgagaacaggcgaagttttaaatgtatatggttaaacagccaatttagggaagaggaaataacactatatccagacaagcatgggtgtgtccgggacctgttagaagaatgtaaaaaggccgtggagcttggggagaaagcatcagggaaacttaggctgctagaaattgtaagctacaaaatcattggtgttcatcaagaagatgaactattagaatgtttatctcctgcaacgagccggacgtttcgaatagaggaaatccctttggaccaggtggacatagacaaagagaatgagatgcttgtcacagtggcgcatttccacaaagaggtcttcggaacgttcggaatcccgtttttgctgaggatacaccagggcgagcattttcgagaagtgatgaagcgaatccagagcctgctggacatccaggagaaggagtttgagaagtttaaatttgcaattgtaatgatgggccgacaccagtacataaatgaagacgagtatgaagtaaatttgaaagactttgagccacagcccggtaatatgtctcatcctcggccttggctagggctcgaccacttcaacaaagccccaaagaggagtcgctacacttaccttgaaaaggccattaaaatccataactgatttccaagctggtgtgttcaaggcgaggacggtgtgtgggtggccccttaacagcctagaactttggtgcacgtgccctctagccgaagtcttcagcaagaggattcgctgctggtgttaattttattttattgaggctgttcagtttggcttctctgtatctattgactgccctttttgagcaaaatgaagatgtttttataaagcttggatgccaatgagagttattttatggtaaccacagtgcaaggcaactgtcagcgcaatgggggagaagaggttagtggatcgggggtccctggctcaaggtctctgggctgtccctagtgggcacgagtggctcggctgccttcctggggtcccgtgcaccagccctgcagctagcaagtcttgtgtttaggctcgtctgacctatttccttcagttatactttcaatgaccttttgtgcatctgttaaggcaaaacagagaaactcacaacctaataaatagcgctcttcccttcattgtgtgcattgtcggcccttcctcgggttctcctcctccagctgcctgggggctttttaataaacttgtctcacctcgtcagccactactgtctgcagcccctttgcaaagtggatgcactgaatacagtccggacagacattgtgggggtctttttattaaatcaagaacattgttaaattcaattaaggtttactctgctgccttggcagacttacgatctcaacagttcatacgagcaggtgaaaggattataaatagaatttcgttaaagtggaacagacgacaagaaagccttttagcaagagggcatgctcactagtggttagtaagctgtcgactttgtaaaaaagttaaaaatgaaaaaaaaaggaaaaatgaattgtatatttaatgaatgaacatgtacaatttgccactgggaggaggttcctttttgttgggtgagtctgcaagtgaatttcactgatgttgatattcattgtgtgtagttttatttcggtcccagccccgtttccttttattttggagctaatgccagctgcgtgtctagttttgagtgcagtaaaatagaatcagcaaatcactcttatttttcatccttttccggtattttttgggttgtttctgtgggagcagtgtacaccaactcttcctgtatattgcctttttgctggaaaatgttgtatgttgaataaaattttctataaaaattataattcagtgagttacgtggaagtggaggaagatttctactctccctggaaacaggcctgggaaaccttggcatttgtaacaaggtttcactgagatgtacttttccttctaattccgttttgcgggggcagggtctcttgtttctttttttttttttttttttttttagcctctaactagtcacatttactcttaagaaatgaaaggttttccaggagagaactgtgtacaaataaggtgactggagatgtgacctgatgtgtcacgaggcccttcggggcggcaggcgctatcgtgggcgtggtccttgcaccgtcccatcggccttgccttccagctccgtggcacggtttcctggtctttgggccagtgtgtaccttggagtgacttcctttctcaacttccactgcagtgtgtgtgccttctgctctgagagctgccttgtgacccgtgtgatagaaagcagggagtgagggtccccgcggacctggcccttccctccttcctcccccagaaagaggagttagagcaggggtgcgagagccgttcgctgtgggtttgtctttgaacaaacattaaggtgtcttgtttttgttctgggctgggggttggctgtagtcttaggtaactgaaagttcctactctcccttaaggtattaaatgactctttttccaaaaaaaacg

SEQ ID NO: 378005 - DNA, 4019 bp, Homo sapiens
atgcgagcgggcggggcgtgtcggcccggggcggcggggacagcggcggggacagcggcgggcggctgggacggcgggtgcggcggggccgagcccgcacgatgcctcacttcaccgtggtgccagtggacgggccgaggcgcggcgactatgacaacctcgaggggctcagttgggtggactacggggagcgcgccgagctggatgactcggacggacatggcaaccacagagagagcagcccttttctttcccccttggaggcttccagaggaattgactactatgacaggaacctggcactgtttgaggaagagctggacatccgcccaaaggtatcgtctcttctgggaaagctcgtcagctacaccaacctcacccagggcgccaaagagcatgaggaggccgagagtggggagggcacccgccggagggcagccgaggcacccagcatgggcaccctcatgggggtgtacctgccctgcctgcagaatatctttggggttatcctcttcctgcggctgacctggatggtgggcacagcaggtgtgctacaggccctcctcatcgtgcttatctgctgctgttgtaccctgctgacggccatctccatgagtgccatcgccaccaacggtgtggttccagctgggggctcctatttcatgatctctcgttcactggggccagaatttggaggtgctgtgggcctgtgcttctacctgggaacaacattcgcagcagccatgtacatcctgggggccatcgagatcttgctgacctacattgccccaccagctgccattttttacccatcgggtgctcatgacacgtcgaatgccactttgaacaatatgcgtgtgtatgggaccattttcctgaccttcatgaccctggtggtgtttgtgggggtcaagtatgtgaacaaatttgcctcgctcttcctggcctgtgtgatcatctccatcctctccatctatgctgggggcataaagtctatatttgaccctcccgtgtttccggtatgcatgctgggcaacaggaccctgtcccgggaccagtttgacatctgtgccaagacagctgtagtggacaatgagacagtggccacccagctatggagtttcttctgccacagccccaaccttacgaccgactcctgtgacccctacttcatgctcaacaatgtgaccgagatccctggcatccccggggcagctgctggtgtgctccaggaaaacctgtggagcgcctacctggagaagggtgacatcgtggagaagcatgggctgccctccgcagatgccccgagcctgaaggagagcctgcctctgtacgtggtcgctgacatcgccacatccttcaccgtgctggtcggcatcttcttcccttctgtaacaggcatcatggctggctcaaaccgctctggggaccttcgtgacgcccagaagtctatccctgtggggaccattctggccatcattacaacttccctcgtgtacttcagcagtgtggttctctttggtgcctgcattgagggtgtggttctccgggacaagtatggcgatggtgtcagcaggaacttggtggtgggcacactggcctggccttcaccctgggtcatcgtcatcggctccttcttttcaacgtgtggcgctggcctccagagcctcacaggggcaccacgcctattgcaggccattgccaaggacaacatcatccccttcctccgggtgtttggccacgggaaggtgaatggtgaacccacatgggcactcctcctgacggcactcatcgccgagctgggcatcctcatcgcctccctcgacatggtggcccccatcttatccatgttctttctgatgtgctacctgttcgtgaacctcgcctgtgcggtgcagacactcctgaggacccccaactggcggccccggttcaagtactatcactgggcgctgtccttcctgggcatgagtctctgcctggcccttatgtttgtctcctcctggtactatgccctggtggccatgctcatcgccggcatgatctacaaatacatcgagtaccaaggggctgagaaggagtggggtgacgggatccgaggcctgtccctgagcgctgcccgctacgcgctgttgcggctggaggaggggcctcctcacaccaagaactggcggccgcagctgctggtgctgctgaagctggacgaggacctccacgtgaagtacccgcggctcctcaccttcgcctcccagctcaaggctggcaagggcctgaccattgttggttctgtcatccaggggagcttcttggagagctatggcgaggctcaggccgccgagcagaccatcaagaacatgatggaaattgagaaggtgaagggcttctgccaggtggtggtggccagcaaggtgcgggaggggctggcccacctcatccagtcctgtggcctgggaggcatgcggcataactccgtggtgctgggctggccctacggctggcgacagagcgaggacccccgtgcctggaagaccttcattgacaccgtgcgctgcactacggctgcccacctggccctgctcgtgcccaagaacatcgccttctaccccagcaaccacgagcgctacctggagggccacatagacgtgtggtggatcgtgcacgatggtggcatgctcatgcttctgcccttcctgctgcgccagcataaggtctggaggaagtgccggatgcgcatcttcacagtggcccagatggatgacaacagcatccagatgaagaaggacctggctgtctttctgtaccatctgcgccttgaggccgaggtggaggtggtggagatgcataacagtgacatctctgcatacacctacgagcggacgctgatgatggagcagcggtcgcagatgctgcggcagatgagactgaccaagactgagcgggagcgagaagcccagctggtcaaggatcggcactcggccctgcggctggagagcctgtactcggacgaggaagatgagtctgcagtgggggctgacaagatccagatgacgtggaccagggacaagtacatgactgagacctgggaccccagccatgcccctgacaatttccgggagctggtgcacattaagccgtgagtgcagcaaaaacagccccagcggcactggaatctaggggtggaggtggggtggggcagacaagtagtgttagatgggccaggggtggggaccctccttgcaggatggctcatggcgacctgtgactggctacactacgtgtagggaccaatccaatgtgcggcgcatgcacactgctgtgaagctcaatgaagtcattgtcacgcgctcccacgacgcccgcctggttctcctaaacatgcctggcccacccaggaacagtgagggcgacgagaactacatggagttcctcgaggtgctgaccgagggccttgagcgggtgctgttggtgcgcggtggtggccgtgaagtcatcaccatctactcctgagcccagtgtcatcttgtggcctggagtcgaggtcttggccaggacataacaagctgtggtctggggtaacagcctcttcccagcacccacctgccagccctgcttgcctggccctgtcctggacccagctttgctaggtctccttggaaaccaggcctgggcctcaaaatggagatggatcccaggtcttgtgggaccctgggatgtttggggactttactatctagcaccccagtaggcctgtcctggccagagaagactggtaggggccgagtggggtttgaaggcagccggcccggcccagcccaggagcgctatttattgcatatttattgtttggatgtcaccatcagagacgaagggaagggtagccagggagggagtccagcccagctgcctgcaggaagatctggctcagtctactatgggcagggccccccaccaagctgagccgaatggagacagctgagctgaggcctgactttttcaataaaacattgtgtagttctggg

SEQ ID NO: 378006 - DNA, 4026 bp, Homo sapiens
atgcgagcgggcggggcgtgtcggcccggggcggcggggacagcggcggggacagcggcgggcggctgggacggcgggtgcggcggggccgagcccgcacgatgcctcacttcaccgtggtgccagtggacgggccgaggcgcggcgactatgacaacctcgaggggctcagttgggtggactacggggagcgcgccgagctggatgactcggacggacatggcaaccacagagagagcagcccttttctttcccccttggaggcttccagaggaattgactactatgacaggaacctggcactgtttgaggaagagctggacatccgcccaaaggtatcgtctcttctgggaaagctcgtcagctacaccaacctcacccagggcgccaaagagcatgaggaggccgagagtggggagggcacccgccggagggcagccgaggcacccagcatgggcaccctcatgggggtgtacctgccctgcctgcagaatatctttggggttatcctcttcctgcggctgacctggatggtgggcacagcaggtgtgctacaggccctcctcatcgtgcttatctgctgctgttgtaccctgctgacggccatctccatgagtgccatcgccaccaacggtgtggttccagctgggggctcctatttcatgatctctcgttcactggggccagaatttggaggtgctgtgggcctgtgcttctacctgggaacaacattcgcagcagccatgtacatcctgggggccatcgagatcttgctgacctacattgccccaccagctgccattttttacccatcgggtgctcatgacacgtcgaatgccactttgaacaatatgcgtgtgtatgggaccattttcctgaccttcatgaccctggtggtgtttgtgggggtcaagtatgtgaacaaatttgcctcgctcttcctggcctgtgtgatcatctccatcctctccatctatgctgggggcataaagtctatatttgaccctcccgtgtttccggtatgcatgctgggcaacaggaccctgtcccgggaccagtttgacatctgtgccaagacagctgtagtggacaatgagacagtggccacccagctatggagtttcttctgccacagccccaaccttacgaccgactcctgtgacccctacttcatgctcaacaatgtgaccgagatccctggcatccccggggcagctgctggtgtgctccaggaaaacctgtggagcgcctacctggagaagggtgacatcgtggagaagcatgggctgccctccgcagatgccccgagcctgaaggagagcctgcctctgtacgtggtcgctgacatcgccacatccttcaccgtgctggtcggcatcttcttcccttctgtaacaggcatcatggctggctcaaaccgctctggggaccttcgtgacgcccagaagtctatccctgtggggaccattctggccatcattacaacttccctcgtgtacttcagcagtgtggttctctttggtgcctgcattgagggtgtggttctccgggacaagtatggcgatggtgtcagcaggaacttggtggtgggcacactggcctggccttcaccctgggtcatcgtcatcggctccttcttttcaacgtgtggcgctggcctccagagcctcacaggggcaccacgcctattgcaggccattgccaaggacaacatcatccccttcctccgggtgtttggccacgggaaggtgaatggtgaacccacatgggcactcctcctgacggcactcatcgccgagctgggcatcctcatcgcctccctcgacatggtggcccccatcttatccatgttctttctgatgtgctacctgttcgtgaacctcgcctgtgcggtgcagacactcctgaggacccccaactggcggccccggttcaagtactatcactgggcgctgtccttcctgggcatgagtctctgcctggcccttatgtttgtctcctcctggtactatgccctggtggccatgctcatcgccggcatgatctacaaatacatcgagtaccaaggggctgagaaggagtggggtgacgggatccgaggcctgtccctgagcgctgcccgctacgcgctgttgcggctggaggaggggcctcctcacaccaagaactggcggccgcagctgctggtgctgctgaagctggacgaggacctccacgtgaagtacccgcggctcctcaccttcgcctcccagctcaaggctggcaagggcctgaccattgttggttctgtcatccaggggagcttcttggagagctatggcgaggctcaggccgccgagcagaccatcaagaacatgatggaaattgagaaggtgaagggcttctgccaggtggtggtggccagcaaggtgcgggaggggctggcccacctcatccagtcctgtggcctgggaggcatgcggcataactccgtggtgctgggctggccctacggctggcgacagagcgaggacccccgtgcctggaagaccttcattgacaccgtgcgctgcactacggctgcccacctggccctgctcgtgcccaagaacatcgccttctaccccagcaaccacgagcgctacctggagggccacatagacgtgtggtggatcgtgcacgatggtggcatgctcatgcttctgcccttcctgctgcgccagcataaggtctggaggaagtgccggatgcgcatcttcacagtggcccagatggatgacaacagcatccagatgaagaaggacctggctgtctttctgtaccatctgcgccttgaggccgaggtggaggtggtggagatgcataacagtgacatctctgcatacacctacgagcggacgctgatgatggagcagcggtcgcagatgctgcggcagatgagactgaccaagactgagcgggagcgagaagcccagctggtcaaggatcggcactcggccctgcggctggagagcctgtactcggacgaggaagatgagtctgcagtgggggctgacaagatccagatgacgtggaccagggacaagtacatgactgagacctgggaccccagccatgcccctgacaatttccgggagctggtgcacattaagccggaccaatccaatgtgcggcgcatgcacactgctgtgaagctcaatgaagtcattgtcacgcgctcccacgacgcccgcctggttctcctaaacatgcctggcccacccaggaacagtgagggcgacgagaactgtatccctttgtggagaggcaggcagttgggaggtggatagcatgggaggtcaagccagcggcttctctcctgggcacccctgggtgggcatggcccaggtggcccgggttgcccgttgattctgttgttgcctccttgacttgaggccctgcagacatggagttcctcgaggtgctgaccgagggccttgagcgggtgctgttggtgcgcggtggtggccgtgaagtcatcaccatctactcctgagcccagtgtcatcttgtggcctggagtcgaggtcttggccaggacataacaagctgtggtctggggtaacagcctcttcccagcacccacctgccagccctgcttgcctggccctgtcctggacccagctttgctaggtctccttggaaaccaggcctgggcctcaaaatggagatggatcccaggtcttgtgggaccctgggatgtttggggactttactatctagcaccccagtaggcctgtcctggccagagaagactggtaggggccgagtggggtttgaaggcagccggcccggcccagcccaggagcgctatttattgcatatttattgtttggatgtcaccatcagagacgaagggaagggtagccagggagggagtccagcccagctgcctgcaggaagatctggctcagtctactatgggcagggccccccaccaagctgagccgaatggagacagctgagctgaggcctgactttttcaataaaacattgtgtagttctggg

SEQ ID NO: 378007 - DNA, 3761 bp, Homo sapiens
ctttgggccatggcagccgaaggtgctgtgtgcggcttcgtctatctggagggcactgcctgggcggtccctgaggacaccgaacccttggcatcctgcacattgggacatggcaaccacagagagagcagcccttttctttcccccttggaggcttccagaggaattgactactatgacaggaacctggcactgtttgaggaagagctggacatccgcccaaaggtatcgtctcttctgggaaagctcgtcagctacaccaacctcacccagggcgccaaagagcatgaggaggccgagagtggggagggcacccgccggagggcagccgaggcacccagcatgggcaccctcatgggggtgtacctgccctgcctgcagaatatctttggggttatcctcttcctgcggctgacctggatggtgggcacagcaggtgtgctacaggccctcctcatcgtgcttatctgctgctgttgtaccctgctgacggccatctccatgagtgccatcgccaccaacggtgtggttccagctgggggctcctatttcatgatctctcgttcactggggccagaatttggaggtgctgtgggcctgtgcttctacctgggaacaacattcgcagcagccatgtacatcctgggggccatcgagatcttgctgacctacattgccccaccagctgccattttttacccatcgggtgctcatgacacgtcgaatgccactttgaacaatatgcgtgtgtatgggaccattttcctgaccttcatgaccctggtggtgtttgtgggggtcaagtatgtgaacaaatttgcctcgctcttcctggcctgtgtgatcatctccatcctctccatctatgctgggggcataaagtctatatttgaccctcccgtgtttccggtatgcatgctgggcaacaggaccctgtcccgggaccagtttgacatctgtgccaagacagctgtagtggacaatgagacagtggccacccagctatggagtttcttctgccacagccccaaccttacgaccgactcctgtgacccctacttcatgctcaacaatgtgaccgagatccctggcatccccggggcagctgctggtgtgctccaggaaaacctgtggagcgcctacctggagaagggtgacatcgtggagaagcatgggctgccctccgcagatgccccgagcctgaaggagagcctgcctctgtacgtggtcgctgacatcgccacatccttcaccgtgctggtcggcatcttcttcccttctgtaacaggcatcatggctggctcaaaccgctctggggaccttcgtgacgcccagaagtctatccctgtggggaccattctggccatcattacaacttccctcgtgtacttcagcagtgtggttctctttggtgcctgcattgagggtgtggttctccgggacaagtatggcgatggtgtcagcaggaacttggtggtgggcacactggcctggccttcaccctgggtcatcgtcatcggctccttcttttcaacgtgtggcgctggcctccagagcctcacaggggcaccacgcctattgcaggccattgccaaggacaacatcatccccttcctccgggtgtttggccacgggaaggtgaatggtgaacccacatgggcactcctcctgacggcactcatcgccgagctgggcatcctcatcgcctccctcgacatggtggcccccatcttatccatgttctttctgatgtgctacctgttcgtgaacctcgcctgtgcggtgcagacactcctgaggacccccaactggcggccccggttcaagtactatcactgggcgctgtccttcctgggcatgagtctctgcctggcccttatgtttgtctcctcctggtactatgccctggtggccatgctcatcgccggcatgatctacaaatacatcgagtaccaaggggctgagaaggagtggggtgacgggatccgaggcctgtccctgagcgctgcccgctacgcgctgttgcggctggaggaggggcctcctcacaccaagaactggcggccgcagctgctggtgctgctgaagctggacgaggacctccacgtgaagtacccgcggctcctcaccttcgcctcccagctcaaggctggcaagggcctgaccattgttggttctgtcatccaggggagcttcttggagagctatggcgaggctcaggccgccgagcagaccatcaagaacatgatggaaattgagaaggtgaagggcttctgccaggtggtggtggccagcaaggtgcgggaggggctggcccacctcatccagtcctgtggcctgggaggcatgcggcataactccgtggtgctgggctggccctacggctggcgacagagcgaggacccccgtgcctggaagaccttcattgacaccgtgcgctgcactacggctgcccacctggccctgctcgtgcccaagaacatcgccttctaccccagcaaccacgagcgctacctggagggccacatagacgtgtggtggatcgtgcacgatggtggcatgctcatgcttctgcccttcctgctgcgccagcataaggtctggaggaagtgccggatgcgcatcttcacagtggcccagatggatgacaacagcatccagatgaagaaggacctggctgtctttctgtaccatctgcgccttgaggccgaggtggaggtggtggagatgcataacagtgacatctctgcatacacctacgagcggacgctgatgatggagcagcggtcgcagatgctgcggcagatgagactgaccaagactgagcgggagcgagaagcccagctggtcaaggatcggcactcggccctgcggctggagagcctgtactcggacgaggaagatgagtctgcagtgggggctgacaagatccagatgacgtggaccagggacaagtacatgactgagacctgggaccccagccatgcccctgacaatttccgggagctggtgcacattaagccggaccaatccaatgtgcggcgcatgcacactgctgtgaagctcaatgaagtcattgtcacgcgctcccacgacgcccgcctggttctcctaaacatgcctggcccacccaggaacagtgagggcgacgagaactacatggagttcctcgaggtgctgaccgagggccttgagcgggtgctgttggtgcgcggtggtggccgtgaagtcatcaccatctactcctgagcccagtgtcatcttgtggcctggagtcgaggtcttggccaggacataacaagctgtggtctggggtaacagcctcttcccagcacccacctgccagccctgcttgcctggccctgtcctggacccagctttgctaggtctccttggaaaccaggcctgggcctcaaaatggagatggatcccaggtcttgtgggaccctgggatgtttggggactttactatctagcaccccagtaggcctgtcctggccagagaagactggtaggggccgagtggggtttgaaggcagccggcccggcccagcccaggagcgctatttattgcatatttattgtttggatgtcaccatcagagacgaagggaagggtagccagggagggagtccagcccagctgcctgcaggaagatctggctcagtctactatgggcagggccccccaccaagctgagccgaatggagacagctgagctgaggcctgactttttcaataaaacattgtgtagttctggg

SEQ ID NO: 378008 - DNA, 3683 bp, Homo sapiens
tacaggatgggggacaccctgagccccggacatggcaaccacagagagagcagcccttttctttcccccttggaggcttccagaggaattgactactatgacaggaacctggcactgtttgaggaagagctggacatccgcccaaaggtatcgtctcttctgggaaagctcgtcagctacaccaacctcacccagggcgccaaagagcatgaggaggccgagagtggggagggcacccgccggagggcagccgaggcacccagcatgggcaccctcatgggggtgtacctgccctgcctgcagaatatctttggggttatcctcttcctgcggctgacctggatggtgggcacagcaggtgtgctacaggccctcctcatcgtgcttatctgctgctgttgtaccctgctgacggccatctccatgagtgccatcgccaccaacggtgtggttccagctgggggctcctatttcatgatctctcgttcactggggccagaatttggaggtgctgtgggcctgtgcttctacctgggaacaacattcgcagcagccatgtacatcctgggggccatcgagatcttgctgacctacattgccccaccagctgccattttttacccatcgggtgctcatgacacgtcgaatgccactttgaacaatatgcgtgtgtatgggaccattttcctgaccttcatgaccctggtggtgtttgtgggggtcaagtatgtgaacaaatttgcctcgctcttcctggcctgtgtgatcatctccatcctctccatctatgctgggggcataaagtctatatttgaccctcccgtgtttccggtatgcatgctgggcaacaggaccctgtcccgggaccagtttgacatctgtgccaagacagctgtagtggacaatgagacagtggccacccagctatggagtttcttctgccacagccccaaccttacgaccgactcctgtgacccctacttcatgctcaacaatgtgaccgagatccctggcatccccggggcagctgctggtgtgctccaggaaaacctgtggagcgcctacctggagaagggtgacatcgtggagaagcatgggctgccctccgcagatgccccgagcctgaaggagagcctgcctctgtacgtggtcgctgacatcgccacatccttcaccgtgctggtcggcatcttcttcccttctgtaacaggcatcatggctggctcaaaccgctctggggaccttcgtgacgcccagaagtctatccctgtggggaccattctggccatcattacaacttccctcgtgtacttcagcagtgtggttctctttggtgcctgcattgagggtgtggttctccgggacaagtatggcgatggtgtcagcaggaacttggtggtgggcacactggcctggccttcaccctgggtcatcgtcatcggctccttcttttcaacgtgtggcgctggcctccagagcctcacaggggcaccacgcctattgcaggccattgccaaggacaacatcatccccttcctccgggtgtttggccacgggaaggtgaatggtgaacccacatgggcactcctcctgacggcactcatcgccgagctgggcatcctcatcgcctccctcgacatggtggcccccatcttatccatgttctttctgatgtgctacctgttcgtgaacctcgcctgtgcggtgcagacactcctgaggacccccaactggcggccccggttcaagtactatcactgggcgctgtccttcctgggcatgagtctctgcctggcccttatgtttgtctcctcctggtactatgccctggtggccatgctcatcgccggcatgatctacaaatacatcgagtaccaaggggctgagaaggagtggggtgacgggatccgaggcctgtccctgagcgctgcccgctacgcgctgttgcggctggaggaggggcctcctcacaccaagaactggcggccgcagctgctggtgctgctgaagctggacgaggacctccacgtgaagtacccgcggctcctcaccttcgcctcccagctcaaggctggcaagggcctgaccattgttggttctgtcatccaggggagcttcttggagagctatggcgaggctcaggccgccgagcagaccatcaagaacatgatggaaattgagaaggtgaagggcttctgccaggtggtggtggccagcaaggtgcgggaggggctggcccacctcatccagtcctgtggcctgggaggcatgcggcataactccgtggtgctgggctggccctacggctggcgacagagcgaggacccccgtgcctggaagaccttcattgacaccgtgcgctgcactacggctgcccacctggccctgctcgtgcccaagaacatcgccttctaccccagcaaccacgagcgctacctggagggccacatagacgtgtggtggatcgtgcacgatggtggcatgctcatgcttctgcccttcctgctgcgccagcataaggtctggaggaagtgccggatgcgcatcttcacagtggcccagatggatgacaacagcatccagatgaagaaggacctggctgtctttctgtaccatctgcgccttgaggccgaggtggaggtggtggagatgcataacagtgacatctctgcatacacctacgagcggacgctgatgatggagcagcggtcgcagatgctgcggcagatgagactgaccaagactgagcgggagcgagaagcccagctggtcaaggatcggcactcggccctgcggctggagagcctgtactcggacgaggaagatgagtctgcagtgggggctgacaagatccagatgacgtggaccagggacaagtacatgactgagacctgggaccccagccatgcccctgacaatttccgggagctggtgcacattaagccggaccaatccaatgtgcggcgcatgcacactgctgtgaagctcaatgaagtcattgtcacgcgctcccacgacgcccgcctggttctcctaaacatgcctggcccacccaggaacagtgagggcgacgagaactacatggagttcctcgaggtgctgaccgagggccttgagcgggtgctgttggtgcgcggtggtggccgtgaagtcatcaccatctactcctgagcccagtgtcatcttgtggcctggagtcgaggtcttggccaggacataacaagctgtggtctggggtaacagcctcttcccagcacccacctgccagccctgcttgcctggccctgtcctggacccagctttgctaggtctccttggaaaccaggcctgggcctcaaaatggagatggatcccaggtcttgtgggaccctgggatgtttggggactttactatctagcaccccagtaggcctgtcctggccagagaagactggtaggggccgagtggggtttgaaggcagccggcccggcccagcccaggagcgctatttattgcatatttattgtttggatgtcaccatcagagacgaagggaagggtagccagggagggagtccagcccagctgcctgcaggaagatctggctcagtctactatgggcagggccccccaccaagctgagccgaatggagacagctgagctgaggcctgactttttcaataaaacattgtgtagttctggg

SEQ ID NO: 378009 - DNA, 3662 bp, Homo sapiens
gtacgtgcgcgtctccctgccgccgccgccgcccgccgcgggccgccccggggccgccgtcgccgacgacgcgcgggaggaggaggaggaggccgccccgccgccgccgccgccgccgccgccccggctcgccgccgcccgcccgccgggctcgcagccccggcccccggccgcaggcgaggcccaggccgcggccgacatgaaccaccagcagcagcagcagcagcagaaagcgggcgagcagcagttgagcgagcccgaggacatggagatggaagcgggagatacagatgacccaccaagaattactcagaaccctgtgatcaatgggaatgtggccctgagtgatggacacaacaccgcggaggaggacatggaggatgacaccagttggcgctccgaggcaacctttcagttcactgtggagcgcttcagcagactgagtgagtcggtccttagccctccgtgttttgtgcgaaatctgccatggaagattatggtgatgccacgcttttatccagacagaccacaccaaaaaagcgtaggattctttctccagtgcaatgctgaatctgattccacgtcatggtcttgccatgcacaagcagtgctgaagataataaattacagagatgatgaaaagtcgttcagtcgtcgtattagtcatttgttcttccataaagaaaatgattggggattttccaattttatggcctggagtgaagtgaccgatcctgagaaaggatttatagatgatgacaaagttacctttgaagtctttgtacaggcggatgctccccatggagttgcgtgggattcaaagaagcacacaggctacgtcggcttaaagaatcagggagcgacttgttacatgaacagcctgctacagacgttatttttcacgaatcagctacgaaaggctgtgtacatgatgccaaccgagggggatgattcgtctaaaagcgtccctttagcattacaaagagtgttctatgaattacagcatagtgataaacctgtaggaacaaaaaagttaacaaagtcatttgggtgggaaactttagatagcttcatgcaacatgatgttcaggagctttgtcgagtgttgctcgataatgtggaaaataagatgaaaggcacctgtgtagagggcaccatacccaaattattccgcggcaaaatggtgtcctatatccagtgtaaagaagtagactatcggtctgatagaagagaagattattatgatatccagctaagtatcaaaggaaagaaaaatatatttgaatcatttgtggattatgtggcagtagaacagctcgatggggacaataaatacgacgctggggaacatggcttacaggaagcagagaaaggtgtgaaattcctaacattgccaccagtgttacatctacaactgatgagatttatgtatgaccctcagacggaccaaaatatcaagatcaatgataggtttgaattcccagagcagttaccacttgatgaatttttgcaaaaaacagatcctaaggaccctgcaaattatattcttcatgcagtcctggttcatagtggagataatcatggtggacattatgtggtttatctaaaccccaaaggggatggcaaatggtgtaaatttgatgacgacgtggtgtcaaggtgtactaaagaggaagcaattgagcacaattatgggggtcacgatgacgacctgtctgttcgacactgcactaatgcttacatgttagtctacatcagggaatcaaaactgagtgaagttttacaggcggtcaccgaccatgatattcctcagcagttggtggagcgattacaagaagagaaaaggatcgaggctcagaagcggaaggagcggcaggaagcccatctctatatgcaagtgcagatagtcgcagaggaccagttttgtggccaccaagggaatgacatgtacgatgaagaaaaagtgaaatacactgtgttcaaagtattgaagaactcctcgcttgctgagtttgttcagagcctctctcagaccatgggatttccacaagatcaaattcgattgtggcccatgcaagcaaggagtaatggaacaaaacgaccagcaatgttagataatgaagccgacggcaataaaacaatgattgagctcagtgataatgaaaacccttggacaatattcctggaaacagttgatcccgagctggctgctagtggagcgaccttacccaagtttgataaagatcatgatgtaatgttatttttgaagatgtatgatcccaaaacgcggagcttgaattactgtgggcatatctacacaccaatatcctgtaaaatacgtgacttgctcccagttatgtgtgacagagcaggatttattcaagatactagccttatcctctatgaggaagttaaaccgaatttaacagagagaattcaggactatgacgtgtctcttgataaagcccttgatgaactaatggatggtgacatcatagtatttcagaaggatgaccctgaaaatgataacagtgaattacccaccgcaaaggagtatttccgagatctctaccaccgcgttgatgtcattttctgtgataaaacaatccctaatgatcctggatttgtggttacgttatcaaatagaatgaattattttcaggttgcaaagacagttgcacagaggctcaacacagatccaatgttgctgcagtttttcaagtctcaaggttatagggatggcccaggtaatcctcttagacataattatgaaggtactttaagagatcttctacagttcttcaagcctagacaacctaagaaactttactatcagcagcttaagatgaaaatcacagactttgagaacaggcgaagttttaaatgtatatggttaaacagccaatttagggaagaggaaataacactatatccagacaagcatgggtgtgtccgggacctgttagaagaatgtaaaaaggccgtggagcttggggagaaagcatcagggaaacttaggctgctagaaattgtaagctacaaaatcattggtgttcatcaagaagatgaactattagaatgtttatctcctgcaacgagccggacgtttcgaatagaggaaatccctttggaccaggtggacatagacaaagagaatgagatgcttgtcacagtggcgcatttccacaaagaggtcttcggaacgttcggaatcccgtttttgctgaggatacaccagggcgagcattttcgagaagtgatgaagcgaatccagagcctgctggacatccaggagaaggagtttgagaagtttaaatttgcaattgtaatgatgggccgacaccagtacataaatgaagacgagtatgaagtaaatttgaaagactttgagccacagcccggtaagggttctcccccccccgggggctggtgtgggtttcagactaagaaacaagtggtctggggctgggaggggcagccccaggttcaagtgccagctcctctctctccactggccgacctgtggaaccaggagcaatagcattccataacctacgagttcttaacaggtccttacatcctttgtaacctgtgagatcttcaaggagagaagcttggatatgtgtgcagggtgattgagactcagggttgtgagggcagtg

SEQ ID NO: 378010 - DNA, 2592 bp, Homo sapiens
gtcatagctgcttcctgagcataaaagccgggccagtgaatcgtgaatgttgtgtttagaatgtttcttggtaaaaaacacttttaggaagacgaaataacactatatccagacaagcatgggtgtgtccgggacctgttagaagaatgtaaaaaggccgtggagcttggggagaaagcatcagggaaacttaggctgctagaaattgtaagctacaaaatcattggtgttcatcaagaagatgaactattagaatgtttatctcctgcaacgagccggacgtttcgaatagaggaaatccctttggaccaggtggacatagacaaagagaatgagatgcttgtcacagtggcgcatttccacaaagaggtcttcggaacgttcggaatcccgtttttgctgaggatacaccagggcgagcattttcgagaagtgatgaagcgaatccagagcctgctggacatccaggagaaggagtttgagaagtttaaatttgcaattgtaatgatgggccgacaccagtacataaatgaagacgagtatgaagtaaatttgaaagactttgagccacagcccggtaatatgtctcatcctcggccttggctagggctcgaccacttcaacaaagccccaaagaggagtcgctacacttaccttgaaaaggccattaaaatccataactgatttccaagctggtgtgttcaaggcgaggacggtgtgtgggtggccccttaacagcctagaactttggtgcacgtgccctctagccgaagtcttcagcaagaggattcgctgctggtgttaattttattttattgaggctgttcagtttggcttctctgtatctattgactgccctttttgagcaaaatgaagatgtttttataaagcttggatgccaatgagagttattttatggtaaccacagtgcaaggcaactgtcagcgcaatgggggagaagaggttagtggatcgggggtccctggctcaaggtctctgggctgtccctagtgggcacgagtggctcggctgccttcctggggtcccgtgcaccagccctgcagctagcaagtcttgtgtttaggctcgtctgacctatttccttcagttatactttcaatgaccttttgtgcatctgttaaggcaaaacagagaaactcacaacctaataaatagcgctcttcccttcattgtgtgcattgtcggcccttcctcgggttctcctcctccagctgcctgggggctttttaataaacttgtctcacctcgtcagccactactgtctgcagcccctttgcaaagtggatgcactgaatacagtccggacagacattgtgggggtctttttattaaatcaagaacattgttaaattcaattaaggtttactctgctgccttggcagacttacgatctcaacagttcatacgagcaggtgaaaggattataaatagaatttcgttaaagtggaacagacgacaagaaagccttttagcaagagggcatgctcactagtggttagtaagctgtcgactttgtaaaaaagttaaaaatgaaaaaaaaaggaaaaatgaattgtatatttaatgaatgaacatgtacaatttgccactgggaggaggttcctttttgttgggtgagtctgcaagtgaatttcactgatgttgatattcattgtgtgtagttttatttcggtcccagccccgtttccttttattttggagctaatgccagctgcgtgtctagttttgagtgcagtaaaatagaatcagcaaatcactcttatttttcatccttttccggtattttttgggttgtttctgtgggagcagtgtacaccaactcttcctgtatattgcctttttgctggaaaatgttgtatgttgaataaaattttctataaaaattataattcagtgagttacgtggaagtggaggaagatttctactctccctggaaacaggcctgggaaaccttggcatttgtaacaaggtttcactgagatgtacttttccttctaattccgttttgcgggggcagggtctcttgtttctttttttttttttttttttttttagcctctaactagtcacatttactcttaagaaatgaaaggttttccaggagagaactgtgtacaaataaggtgactggagatgtgacctgatgtgtcacgaggcccttcggggcggcaggcgctatcgtgggcgtggtccttgcaccgtcccatcggccttgccttccagctccgtggcacggtttcctggtctttgggccagtgtgtaccttggagtgacttcctttctcaacttccactgcagtgtgtgtgccttctgctctgagagctgccttgtgacccgtgtgatagaaagcagggagtgagggtccccgcggacctggcccttccctccttcctcccccagaaagaggagttagagcaggggtgcgagagccgttcgctgtgggtttgtctttgaacaaacattaaggtgtcttgtttttgttctgggctgggggttggctgtagtcttaggtaactgaaagttcctactctcccttaaggtattaaatgactctttttccaaaaaaaacg

SEQ ID NO: 378011 - DNA, 4271 bp, Homo sapiens
atgcgagcgggcggggcgtgtcggcccggggcggcggggacagcggcggggacagcggcgggcggctgggacggcgggtgcggcggggccgagcccgcacgatgcctcacttcaccgtggtgccagtggacgggccgaggcgcggcgactatgacaacctcgaggggctcagttgggtggactacggggagcgcgccgagctggatgactcggacggacatggcaaccacagagagagcagcccttttctttcccccttggaggcttccagaggaattgactactatgacaggaacctggcactgtttgaggaagagctggacatccgcccaaaggtatcgtctcttctgggaaagctcgtcagctacaccaacctcacccagggcgccaaagagcatgaggaggccgagagtggggagggcacccgccggagggcagccgaggcacccagcatgggcaccctcatgggggtgtacctgccctgcctgcagaatatctttggggttatcctcttcctgcggctgacctggatggtgggcacagcaggtgtgctacaggccctcctcatcgtgcttatctgctgctgttgtaccctgctgacggccatctccatgagtgccatcgccaccaacggtgtggttccagctgggggctcctatttcatgatctctcgttcactggggccagaatttggaggtgctgtgggcctgtgcttctacctgggaacaacattcgcagcagccatgtacatcctgggggccatcgagatcttgctgacctacattgccccaccagctgccattttttacccatcgggtgctcatgacacgtcgaatgccactttgaacaatatgcgtgtgtatgggaccattttcctgaccttcatgaccctggtggtgtttgtgggggtcaagtatgtgaacaaatttgcctcgctcttcctggcctgtgtgatcatctccatcctctccatctatgctgggggcataaagtctatatttgaccctcccgtgtttccggtatgcatgctgggcaacaggaccctgtcccgggaccagtttgacatctgtgccaagacagctgtagtggacaatgagacagtggccacccagctatggagtttcttctgccacagccccaaccttacgaccgactcctgtgacccctacttcatgctcaacaatgtgaccgagatccctggcatccccggggcagctgctggtgtgctccaggaaaacctgtggagcgcctacctggagaagggtgacatcgtggagaagcatgggctgccctccgcagatgccccgagcctgaaggagagcctgcctctgtacgtggtcgctgacatcgccacatccttcaccgtgctggtcggcatcttcttcccttctgtaacaggcatcatggctggctcaaaccgctctggggaccttcgtgacgcccagaagtctatccctgtggggaccattctggccatcattacaacttccctcgtgtacttcagcagtgtggttctctttggtgcctgcattgagggtgtggttctccgggacaagtatggcgatggtgtcagcaggaacttggtggtgggcacactggcctggccttcaccctgggtcatcgtcatcggctccttcttttcaacgtgtggcgctggcctccagagcctcacaggggcaccacgcctattgcaggccattgccaaggacaacatcatccccttcctccgggtgagcccctctgcactcccccatggcctggctgctcccaggccctcgcccggctggggagagagatagggaacacagatgcagcacgtcctgcccttattggcccccggggccaggcggccatccatgaggagctactgagaagtgccctgggcctggcactcacctgggcctggagctgcctggacccagaatcttcatggcctgtttagggctcatccaaaggagagaggcctggtgaggtggaatcagggagactggtgacacccatagggatagacacaggggcggcctgagcccccaaggcgggccctgggggtgagggaggccaggctggggtctggggcccaaggtgtggaatgggggtgacaggacccagcttccttcctggtgcacacaggtgtttggccacgggaaggtgaatggtgaacccacatgggcactcctcctgacggcactcatcgccgagctgggcatcctcatcgcctccctcgacatggtggcccccatcttatccatgttctttctgatgtgctacctgttcgtgaacctcgcctgtgcggtgcagacactcctgaggacccccaactggcggccccggttcaagtactatcactgggcgctgtccttcctgggcatgagtctctgcctggcccttatgtttgtctcctcctggtactatgccctggtggccatgctcatcgccggcatgatctacaaatacatcgagtaccaaggggctgagaaggagtggggtgacgggatccgaggcctgtccctgagcgctgcccgctacgcgctgttgcggctggaggaggggcctcctcacaccaagaactggcggccgcagctgctggtgctgctgaagctggacgaggacctccacgtgaagtacccgcggctcctcaccttcgcctcccagctcaaggctggcaagggcctgaccattgttggttctgtcatccaggggagcttcttggagagctatggcgaggctcaggccgccgagcagaccatcaagaacatgatggaaattgagaaggtgaagggcttctgccaggtggtggtggccagcaaggtgcgggaggggctggcccacctcatccagtcctgtggcctgggaggcatgcggcataactccgtggtgctgggctggccctacggctggcgacagagcgaggacccccgtgcctggaagaccttcattgacaccgtgcgctgcactacggctgcccacctggccctgctcgtgcccaagaacatcgccttctaccccagcaaccacgagcgctacctggagggccacatagacgtgtggtggatcgtgcacgatggtggcatgctcatgcttctgcccttcctgctgcgccagcataaggtctggaggaagtgccggatgcgcatcttcacagtggcccagatggatgacaacagcatccagatgaagaaggacctggctgtctttctgtaccatctgcgccttgaggccgaggtggaggtggtggagatgcataacagtgacatctctgcatacacctacgagcggacgctgatgatggagcagcggtcgcagatgctgcggcagatgagactgaccaagactgagcgggagcgagaagcccagctggtcaaggatcggcactcggccctgcggctggagagcctgtactcggacgaggaagatgagtctgcagtgggggctgacaagatccagatgacgtggaccagggacaagtacatgactgagacctgggaccccagccatgcccctgacaatttccgggagctggtgcacattaagccggaccaatccaatgtgcggcgcatgcacactgctgtgaagctcaatgaagtcattgtcacgcgctcccacgacgcccgcctggttctcctaaacatgcctggcccacccaggaacagtgagggcgacgagaactacatggagttcctcgaggtgctgaccgagggccttgagcgggtgctgttggtgcgcggtggtggccgtgaagtcatcaccatctactcctgagcccagtgtcatcttgtggcctggagtcgaggtcttggccaggacataacaagctgtggtctggggtaacagcctcttcccagcacccacctgccagccctgcttgcctggccctgtcctggacccagctttgctaggtctccttggaaaccaggcctgggcctcaaaatggagatggatcccaggtcttgtgggaccctgggatgtttggggactttactatctagcaccccagtaggcctgtcctggccagagaagactggtaggggccgagtggggtttgaaggcagccggcccggcccagcccaggagcgctatttattgcatatttattgtttggatgtcaccatcagagacgaagggaagggtagccagggagggagtccagcccagctgcctgcaggaagatctggctcagtctactatgggcagggccccccaccaagctgagccgaatggagacagctgagctgaggcctgactttttcaataaaacattgtgtagttctggg

SEQ ID NO: 378012 - DNA, 2744 bp, Homo sapiens
  misc_feature (2701)..(2701): n is a, c, g, or t
  misc_feature (2713)..(2713): n is a, c, g, or t
  misc_feature (2738)..(2738): n is a, c, g, or t
gtacgtgcgcgtctccctgccgccgccgccgcccgccgcgggccgccccggggccgccgtcgccgacgacgcgcgggaggaggaggaggaggccgccccgccgccgccgccgccgccgccgccccggctcgccgccgcccgcccgccgggctcgcagccccggcccccggccgcaggcgaggcccaggccgcggccgacatgaaccaccagcagcagcagcagcagcagaaagcgggcgagcagcagttgagcgagcccgaggacatggagatggaagcgggagatacagatgacccaccaagaattactcagaaccctgtgatcaatgggaatgtggccctgagtgatggacacaacaccgcggaggaggacatggaggatgacaccagttggcgctccgaggcaacctttcagttcactgtggagcgcttcagcagactgagtgagtcggtccttagccctccgtgttttgtgcgaaatctgccatggaagattatggtgatgccacgcttttatccagacagaccacaccaaaaaagcgtaggattctttctccagtgcaatgctgaatctgattccacgtcatggtcttgccatgcacaagcagtgctgaagataataaattacagagatgatgaaaagtcgttcagtcgtcgtattagtcatttgttcttccataaagaaaatgattggggattttccaattttatggcctggagtgaagtgaccgatcctgagaaaggatttatagatgatgacaaagttacctttgaagtctttgtacaggcggatgctccccatggagttgcgtgggattcaaagaagcacacaggctacgtcggcttaaagaatcagggagcgacttgttacatgaacagcctgctacagacgttatttttcacgaatcagctacgaaaggctgtgtacatgatgccaaccgagggggatgattcgtctaaaagcgtccctttagcattacaaagagtgttctatgaattacagcatagtgataaacctgtaggaacaaaaaagttaacaaagtcatttgggtgggaaactttagatagcttcatgcaacatgatgttcaggagctttgtcgagtgttgctcgataatgtggaaaataagatgaaaggcacctgtgtagagggcaccatacccaaattattccgcggcaaaatggtgtcctatatccagtgtaaagaagtagactatcggtctgatagaagagaagattattatgatatccagctaagtatcaaaggaaagaaaaatatatttgaatcatttgtggattatgtggcagtagaacagctcgatggggacaataaatacgacgctggggaacatggcttacaggaagcagagaaaggtgtgaaattcctaacattgccaccagtgttacatctacaactgatgagatttatgtatgaccctcagacggaccaaaatatcaagatcaatgataggtttgaattcccagagcagttaccacttgatgaatttttgcaaaaaacagatcctaaggaccctgcaaattatattcttcatgcagtcctggttcatagtggagataatcatggtggacattatgtggtttatctaaaccccaaaggggatggcaaatggtgtaaatttgatgacgacgtggtgtcaaggtgtactaaagaggaagcaattgagcacaattatgggggtcacgatgacgacctgtctgttcgacactgcactaatgcttacatgttagtctacatcagggaatcaaaactgagtgaagttttacaggcggtcaccgaccatgatattcctcagcagttggtggagcgattacaagaagagaaaaggatcgaggctcagaagcggaaggagcggcaggaagcccatctctatatgcaagtgcagatagtcgcagaggaccagttttgtggccaccaagggaatgacatgtacgatgaagaaaaagtgaaatacactgtgttcaaagtattgaagaactcctcgcttgctgagtttgttcagagcctctctcagaccatgggatttccacaagatcaaattcgattgtggcccatgcaagcaaggagtaatggaacaaaacgaccagcaatgttagataatgaagccgacggcaataaaacaatgattgagctcagtgataatgaaaacccttggacaatattcctggaaacagttgatcccgagctggctgctagtggagcgaccttacccaagtttgataaagatcatgatgtaatgttatttttgaagatgtatgatcccaaaacgcggagcttgaattactgtgggcatatctacacaccaatatcctgtaaaatacgtgacttgctcccagttatgtgtgacagagcaggatttattcaagatactagccttatcctctatgaggaagttaaaccgaatttaacagagagaattcaggactatgacgtgtctcttgataaagcccttgatgaactaatggatggtgacatcatagtatttcagaaggatgaccctgaaaatgataacagtgaattacccaccgcaaaggagtatttccgagatctctaccaccgcgttgatgtcattttctgtgataaaacaatccctaatgatcctggatttgtggttacgttatcaaatagaatgaattattttcaggaaatttaatttttcaagggttggcaaaaggaccaaggnttggcacaagangggcttcaaacaacaagggattccnaaatgg

SEQ ID NO: 378013 - DNA, 2202 bp, Homo sapiens
atgcgagcgggcggggcgtgtcggcccggggcggcggggacagcggcggggacagcggcgggcggctgggacggcgggtgcggcggggccgagcccgcacgatgcctcacttcaccgtggtgccagtggacgggccgaggcgcggcgactatgacaacctcgaggggctcagttgggtggactacggggagcgcgccgagctggatgactcggacggacatggcaaccacagagagagcagcccttttctttcccccttggaggcttccagaggaattgactactatgacaggaacctggcactgtttgaggaagagctggacatccgcccaaaggtatcgtctcttctgggaaagctcgtcagctacaccaacctcacccagggcgccaaagagcatgaggaggccgagagtggggagggcacccgccggagggcagccgaggcacccagcatgggcaccctcatgggggtgtacctgccctgcctgcagaatatctttggggttatcctcttcctgcggctgacctggatggtgggcacagcaggtgtgctacaggccctcctcatcgtgcttatctgctgctgttgtaccctgctgacggccatctccatgagtgccatcgccaccaacggtgtggttccagctgggggctcctatttcatgatctctcgttcactggggccagaatttggaggtgctgtgggcctgtgcttctacctgggaacaacattcgcagcagccatgtacatcctgggggccatcgagatcttgctgacctacattgccccaccagctgccattttttacccatcgggtgctcatgacacgtcgaatgccactttgaacaatatgcgtgtgtatgggaccattttcctgaccttcatgaccctggtggtgtttgtgggggtcaagtatgtgaacaaatttgcctcgctcttcctggcctgtgtgatcatctccatcctctccatctatgctgggggcataaagtctatatttgaccctcccgtgtttccggtatgcatgctgggcaacaggaccctgtcccgggaccagtttgacatctgtgccaagacagctgtagtggacaatgagacagtggccacccagctatggagtttcttctgccacagccccaaccttacgaccgactcctgtgacccctacttcatgctcaacaatgtgaccgagatccctggcatccccggggcagctgctggtgtgctccaggaaaacctgtggagcgcctacctggagaagggtgacatcgtggagaagcatgggctgccctccgcagatgccccgagcctgaaggagagcctgcctctgtacgtggtcgctgacatcgccacatccttcaccgtgctggtcggcatcttcttcccttctgtaacaggcatcatggctggctcaaaccgctctggggaccttcgtgacgcccagaagtctatccctgtggggaccattctggccatcattacaacttccctcgtgtacttcagcagtgtggttctctttggtgcctgcattgagggtgtggttctccgggacaagtatggcgatggtgtcagcaggaacttggtggtgggcacactggcctggccttcaccctgggtcatcgtcatcggctccttcttttcaacgtgtggcgctggcctccagagcctcacaggggcaccacgcctattgcaggccattgccaaggacaacatcatccccttcctccgggtgagcccctctgcactcccccatggcctggctgctcccaggccctcgcccggctggggagagagatagggaacacagatgcagcacgtcctgcccttattggcccccggggccaggcggccatccatgaggagctactgagaagtgccctgggcctggcactcacctgggcctggagctgcctggacccagaatcttcatggcctgtttagggctcatccaaaggagagaggcctggtgaggtggaatcagggagactggtgacagggggatggggaaaggcttcctgaaccccagcacctccccgtggctgcgtctggtgttggaggtccagctgggagatgtggcaggctgcatggggagatgtggcctgacagggctcagcccacccctgcatttaggagcaagcctggcacctatgccaaagctataaggtgaccaatatgtccacacctccctgaggcccccagag

SEQ ID NO: 378014 - DNA, 1797 bp, Homo sapiens
actctagaggatctgatggagaccaggctgaggaggagtactaccgcaagctcgcagggctggtggaggagatgcacgctgcctatgggaagcctgtcttcctcattggccacagcctcggctgtctacacttgctctatttcctgctgcgccagccccaggcctggaaggaccgctttattgatggcttcatctctcttggggctccctggggtggctccatcaagcccatgctggtcttggcctcagagacagggtctcactatattgcccagactggtcttgagctcctgggctcaagcatccttctgcctcagcctcccagagtgttggcattacaggcattaggtggttcttcaaaaaagtctgcatgcctatttagatgctagatctctcaccctttctagctctacaagtatagagggaaaattcgagacataaatagcctcacctttgtagaattgagctccctgaaggcccacagtctgcctctggtcttgtatctggaccagcattcctttctcattgtgctgagagttgggaaggccctgggtgacccctcgggaccatttcctgagaaggtgttctgtaaatgacaggcttcttgcatcaaggccacttttgttaacctcccgtcagtatttggttggtcctaggattagggccagtgtcctcactgtgagtgaattcacagatgagggagttggggtggggaatgagagcaagaacatgggggccagctggggacagttgagaacaatgatgcaactttctcctctcttcctttgtggtagcagaccttttatgctttcttgaaagcacttattttatcttttcattacttaggaaataacactatatccagacaagcatgggtgtgtccgggacctgttagaagaatgtaaaaaggccgtggagcttggggagaaagcatcagggaaacttaggcaagtatttcttgagcccaattgtggacgttcagttaggggtggcagttaacgctgacctctgcagttgcgttggtggaaatcacccagctgggatccatgcgcgtcattcccagactcagtggggtgtgcctccattgcaaagacagttgcacagaagctcaacacagacccagtgttgctccagtttttcaagtctcaggggtaaccctcaagccgctgtggtgcagagggttatgcgtgtttcacaattaagccacgtttttcctccttccccttgtatcttctgataacattagctgtagtaaaaaggcgcagttcccatagaaaagccaaacagaggaaggatatgattccatttgaacgatgaactgaaactggaaggggtgactcctgattttgtatttgacagattgagtcacttctgttccatctagccaacatttgggctgtagaaagaagcccctgaattgattgtttatttcagagagatgggcatgattctcactactttgccctgtagtcgcttggaggacaaatggcttttggagccatttggttcccaaactttctttagttttaataaaacaattattaaacagtgagaccctaatctattacctaataagagtaagtgaggaaaacgccactatcagctgaatgtgaattccttgtgggaaaggtttatgcaactttcggaggcccagtctgtacatctctgtgcccaaatgtggccatttccactttgtccagcagagccctttaatcttatgcttcaaggggaccccctctccgtgccttgctccggtctctgtttctgatatttcagatcctctttaaaaaaaaaaaa

SEQ ID NO: 378015 - DNA, 607 bp, Homo sapiens
gtacgtgcgcgtctccctgccgccgccgccgcccgccgcgggccgccccggggccgccgtcgccgacgacgcgcgggaggaggaggaggaggccgccccgccgccgccgccgccgccgccgccccggctcgccgccgcccgcccgccgggctcgcagccccggcccccggccgcaggcgaggcccaggccgcggccgacatgaaccaccagcagcagcagcagcagcagaaagcgggcgagcagcagttgagcgagcccgaggacatggagatggaagcgggagatacagatgacccaccaagaattactcagaaccctgtgatcaatgggaatgtggccctgagtgatggacacaacaccgcggaggaggacatggaggatggtaagtgcctgtggttcaccgcctcgcagtgggcggaaaccttgtcagaaaacaggttcagatccatgcttggtacttcttgggtacatccttgggtacttctgagcgtagctagttttcaggaggctgtaactgaggaaaatcctgtttgggttttgagtttcaagattgcctacaccattgccaggtaagtagagtctccccggatacagctcccggataca

SEQ ID NO: 378016 - DNA, 4124 bp, Homo sapiens
ggggaagggcagatggaggagggattgtaatggcggcagccggcagctccctgctctgacccacggcaggcacacagcaacgaccccttccccgcccctctcccggccggcctccgccccgcagccagcgcggggccaccctctccggcccttcccccagctgtcggcgtctcgccctgcgccccggccggggccccacacacaatggacgagcttgccggaggcggtggtggcggcccggggatggcggcccctccccggcagcagcagggacctggggggaacctgggcctttcgcccggggggaacggagcggcgggcggcgggggtcctccggcctccgagggagcgggtcccgcggcaggccccgagctgtcccggccgcagcagaacactatcccggggatactgcactacatccagcacgagtgggctcggttcgagatggagcgggcgcactgggaggtggaacgggccgaactgcaggcccggattgcatttctacaaggcgaaagaaaaggtcaagagaacctgaagaaggacttagtaagaagaataaagatgttagagtatgcattaaaacaagaaagggcaaaatatcacaaattaaaatatggcacggaactgaaccaaggtgacttgaaaatgccaacctttgagtcagaagaaaccaaagacacagaggctcccacagcacctcagaatagccagttaacgtggaagcaaggcagacagcttttaagacagtatcttcaggaagtaggttatacagatacaatattagatgtacggtctcagcgggtaaggtcattacttggactatctaattcagaaccaaatggatcagtagaaacaaagaatttagaacagatcctgaatggaggtgaatctcctaagcaaaagggacaagaaataaaaaggtcctctggtgatgttcttgagacgttcaatttcttagaaaatgccgatgacagtgatgaagatgaggaaaatgacatgatcgaaggcatcccagaaggaaaagacaaacatcggatgaataaacataaaataggtaatgaaggtttagctgctgacctaactgacgatcctgatactgaggaagcactgaaagaatttgattttttagtgactgctgaagatggtgaaggagctggagaagcacggagttcgggggatggcacagaatgggctgaaccaataacgtttccatctggaggaggcaagtcatttattatgggttctgatgatgttttgttaagtgtactgggccttggagaccttgcagacttgacggtaacaaatgatgcagactatagttatgatttgcctgctaataaagatgcctttcgaaagacatggaatcccaagtatacactacgtagccattttgatggagtacgggcattagcttttcatcctgtagaacctgtgctggttactgcttctgaggaccataccctgaaactttggaacctgcaaaaaacagttcctgccaaaaagagtgcctctttagatgtagagcctatctacacatttagggcccacatcggccctgttctgtcattagctattagttctaatggagaacagtgttttagtggtggtattgatgcaaccatccagtggtggaatatgccgagtcccagtgtagatccatatgatacatatgagccaaatgttctagctggcactttagttggtcatacagatgcagtttggggtcttgcttatagtggcataaaaaatcaattactgtcttgttcagcagatggcactgttaggttatggaatccacaagaaaaattgccatgtatttgcacttacaatggagataaaaagcatggaatacctacatcagttgactttataggctgtgatccagctcatatggtaacctctttcaacactggtagtgcagtaatttatgatttagaaacatcacagtcattggtgatactttcatcacaggtagattctggtttacaatctaataatcatatcaacagagtagtaagtcatcccacacttcctgttacaataactgctcatgaagatagacacatcaaattttttgacaataaaacgggtaaaatgatccattctatggtagctcacttggatgctgttacaagtctagcagtagatcctaatggaatctatttgatgtctggaagccatgactgttccatcagattatggaatttagacagcaagacatgtgtgcaagaaataacagctcacagaaagaaattggatgaatcaatttatgatgttgctttccactcgtcaaaagcatatatagctagtgcaggagctgatgctcttgccaaagtatttgtatgaatcaacaaaaacttgcatcgtaacaagatttgcttggacagaaagagggtctgcatcactgccatcagaaaggttactgatatgacactacatgtgatctgcctggtgaaggctatctggggcaggcacaaattggtggaaatcacatcttaatgtcaagctcattaagttaactgtaattactgtattttgtgggacaaagaaaaaaggactccagtatttgtggcctgtactggatgtgaactgagcgtatatctgtttttaggtgtctttaagccaatgtggagtctgatctttcaaaaaagttttttttttctcttcttcttcttcttttttttttttttttttttttttttttggactctgtgtgctgccttaggggttaggaatgtggtgctcttgttgggggaagtgagctccaagagtagctttttttcatctcttagtgatcttctgtttatcggttgaatgccacagattcccttttaaacttattttgctttaaaaaaaaaaaaaaaagaaaaagaaaatttaacttaaaatattttagcattagttgcacaaaatgtttggataaaattctagtttttataagtctttttatatatttagcctgtcacaacagtgctcaagattgtattgaagtttttctgcattatacaaccctaaaacacagagatctcactgacccgttgccctgtaaccactttctttccttcttttgcctaatacagctcagctaagtccttccataaagatgctaaataactttcatcatcacataaatgtcttcataaaccaaggactattaagtgtattaaaatgaaacagtggggtttagtactccaaatgaactcttaaagaaaaaaactaatcttggcatcctatcactatgtgatattttgtacatcttactgtatttacaagtttatttatcaaggattatccatcttgctaatggcctattatttatttcactttttgttggtctttatatccttttattaatgtgctaaaggaacctgtatatctattttggaactctttgaatagtctaaaatagactaaaaatggagtattttatagtttaaattacaaaccaaggtggttccccctaagatatatatcttggtttaccatgattccaaacaaaactaacttgtttaaaaatatttggagtaaagttttatttgcattacaaataggatacaaaaatagttgaatcaggatacagaaatctgctgtgttttgactagttatccctgttttatttttttagatgtgcttaattttatggtgtaactaaagattttgtttgtgtaatgcatgattaagacaataaagtattttttctagtcttccgagaaacttttctgatcagtttgcgagttttgatgagttttgtaaggtttttgttttacaaactatgaatcagcaaatttttaagattgtaccacatagcaaacatacagctgttgaaaaataatgtatataaaatgcatataataaatattaaattgtgtacctgtatgttactgttggctacatcattttgtgttgaataataaagtgcaatactttattctccataattaaactaggaaatggagatttcttagtgagtccttcatttttatgctgttctttcaaactttgtcctacttattgatattctaataagagtagatcactaaccctattaataatgtctaagtatttcaccccacttgaagattaagaaaaagtcttgcattaaattatgcaattcaaaataaccc

SEQ ID NO: 378017 - DNA, 809 bp, Homo sapiens
tatttaattaacatcatcattattgttaaatattatttatcggtcctcaaaccttgtaattttctcaatgttttgtattagaaaagatgtattacttgaataatagctatttaataattgtattggtgagactatgaatataatagtaccattcaggccagatgcagtagttcatgcctgtaatctgaggattttcggaggctgaggcgggcagatcacttgaggtcaggagttcgagaccagcctggccaacatggtgaaactccgtctctaccacaaaatacaaaaattagctgggcatgttggcgtgcgcttgtagtctcagcaactcagtaggctgaggcaggagaatcgctcgaacctgggaggtggaggttttactgagcagagatcaccactgcattccagtctgggctggtgacagagtgagaccctgtctccaaaaaaaaaaaaaaaaaaaaaaaaaaaaaaaaaaaaaaaaaaaaaaaaaaaaaaaaaaaaaaaaagtgattgtaccagtcaggtgtacatgttctcttaaaacagtttttagatattacataaattcagaggttgggggaatggagatttgagtttcttcttagaatttatcagtaatttgtttttcctctcttcctacaatagcggccctgttctgtcattagctattagttctaatggagaacagtgttttagtggtggtattgatgcaaccatccagtggtggaatatgccgagtcccagtgtagatccatatgatacatatggtaagtaaaatgatcaaaatgtattttttttaagtgaatgga

SEQ ID NO: 378018 - DNA, 3931 bp, Homo sapiens
ggcctcatcgctttatacttcttactaagtcatttttcagtttcctatgtatggttaagggaaaatgtaaataaatgcatcttttaaatttttaggcccggattgcatttctacaaggcgaaagaaaaggtcaagagaacctgaagaaggacttagtaagaagaataaagatgttagagtatgcattaaaacaagaaagggcaaaatatcacaaattaaaatatggcacggaactgaaccaaggtgacttgaaaatgccaacctttgagtcagaagaaaccaaagacacagaggctcccacagcacctcagaatagccagttaacgtggaagcaaggcagacagcttttaagacagtatcttcaggaagtaggttatacagatacaatattagatgtacggtctcagcgggtaaggtcattacttggactatctaattcagaaccaaatggatcagtagaaacaaagaatttagaacagatcctgaatggaggtgaatctcctaagcaaaagggacaagaaataaaaaggtcctctggtgatgttcttgagacgttcaatttcttagaaaatgccgatgacagtgatgaagatgaggaaaatgacatgatcgaaggcatcccagaaggaaaagacaaacatcggatgaataaacataaaataggtaatgaaggtttagctgctgacctaactgacgatcctgatactgaggaagcactgaaagaatttgattttttagtgactgctgaagatggtgaaggagctggagaagcacggagttcgggggatggcacagaatgggataaagatgacctctccccaactgctgaggtttgggatgtagaccagggactaataagtaaactgaaggaacagtacaagaaggaacgaaaggggaagaaaggggtgaagagggccaacaggacaaaactctacgacatgatagctgatctgggagatgatgagctgccccacatcccttcaggaatcattaatcagtctaggtcagcctctactagaatgactgatcatgaaggtgcaagagcagaggaagctgaaccaataacgtttccatctggaggaggcaagtcatttattatgggttctgatgatgttttgttaagtgtactgggccttggagaccttgcagacttgacggtaacaaatgatgcagactatagttatgatttgcctgctaataaagatgcctttcgaaagacatggaatcccaagtatacactacgtagccattttgatggagtacgggcattagcttttcatcctgtagaacctgtgctggttactgcttctgaggaccataccctgaaactttggaacctgcaaaaaacagttcctgccaaaaagagtgcctctttagatgtagagcctatctacacatttagggcccacatcggccctgttctgtcattagctattagttctaatggagaacagtgttttagtggtggtattgatgcaaccatccagtggtggaatatgccgagtcccagtgtagatccatatgatacatatgagccaaatgttctagctggcactttagttggtcatacagatgcagtttggggtcttgcttatagtggcataaaaaatcaattactgtcttgttcagcagatggcactgttaggttatggaatccacaagaaaaattgccatgtatttgcacttacaatggagataaaaagcatggaatacctacatcagttgactttataggctgtgatccagctcatatggtaacctctttcaacactggtagtgcagtaatttatgatttagaaacatcacagtcattggtgatactttcatcacaggtagattctggtttacaatctaataatcatatcaacagagtagtaagtcatcccacacttcctgttacaataactgctcatgaagatagacacatcaaattttttgacaataaaacgggtaaaatgatccattctatggtagctcacttggatgctgttacaagtctagcagtagatcctaatggaatctatttgatgtctggaagccatgactgttccatcagattatggaatttagacagcaagacatgtgtgcaagaaataacagctcacagaaagaaattggatgaatcaatttatgatgttgctttccactcgtcaaaagcatatatagctagtgcaggagctgatgctcttgccaaagtatttgtatgaatcaacaaaaacttgcatcgtaacaagatttgcttggacagaaagagggtctgcatcactgccatcagaaaggttactgatatgacactacatgtgatctgcctggtgaaggctatctggggcaggcacaaattggtggaaatcacatcttaatgtcaagctcattaagttaactgtaattactgtattttgtgggacaaagaaaaaaggactccagtatttgtggcctgtactggatgtgaactgagcgtatatctgtttttaggtgtctttaagccaatgtggagtctgatctttcaaaaaagttttttttttctcttcttcttcttcttttttttttttttttttttttttttttggactctgtgtgctgccttaggggttaggaatgtggtgctcttgttgggggaagtgagctccaagagtagctttttttcatctcttagtgatcttctgtttatcggttgaatgccacagattcccttttaaacttattttgctttaaaaaaaaaaaaaaaagaaaaagaaaatttaacttaaaatattttagcattagttgcacaaaatgtttggataaaattctagtttttataagtctttttatatatttagcctgtcacaacagtgctcaagattgtattgaagtttttctgcattatacaaccctaaaacacagagatctcactgacccgttgccctgtaaccactttctttccttcttttgcctaatacagctcagctaagtccttccataaagatgctaaataactttcatcatcacataaatgtcttcataaaccaaggactattaagtgtattaaaatgaaacagtggggtttagtactccaaatgaactcttaaagaaaaaaactaatcttggcatcctatcactatgtgatattttgtacatcttactgtatttacaagtttatttatcaaggattatccatcttgctaatggcctattatttatttcactttttgttggtctttatatccttttattaatgtgctaaaggaacctgtatatctattttggaactctttgaatagtctaaaatagactaaaaatggagtattttatagtttaaattacaaaccaaggtggttccccctaagatatatatcttggtttaccatgattccaaacaaaactaacttgtttaaaaatatttggagtaaagttttatttgcattacaaataggatacaaaaatagttgaatcaggatacagaaatctgctgtgttttgactagttatccctgttttatttttttagatgtgcttaattttatggtgtaactaaagattttgtttgtgtaatgcatgattaagacaatatgagttttgtaaggtttttgttttacaaactatgaatcagcaaatttttaagattgtaccacatagcaaacatacagctgttgaaaaataatgtatataaaatgcatataataaatattaaattgtgtacctgtatgttactgttggctacatcattttgtgttgaataataaagtgcaatactttattctccataattaaactaggaaatggagatttcttagtgagtccttcatttttatgctgttctttcaaactttgtcctacttattgatattctaataagagtagatcactaaccctattaataatgtctaagtatttcaccccacttgaagattaagaaaaagtcttgcattaaattatgcaattcaaaataaccc

SEQ ID NO: 378019 - DNA, 2929 bp, Homo sapiens
atttccactggacattttagccaacagttttaaatatatgtgttaaacacaccaaaaagaaacgaacaaacactccacatgccttccagtttactacttttaccactaaatattgtgctctttccttttagttgcctgctaataaagatgcctttcgaaagacatggaatcccaagtatacactacgtagccattttgatggagtacgggcattagcttttcatcctgtagaacctgtgctggttactgcttctgaggaccataccctgaaactttggaacctgcaaaaaacagttcctgccaaaaagagtgcctctttagatgtagagcctatctacacatttagggcccacatcggccctgttctgtcattagctattagttctaatggagaacagtgttttagtggtggtattgatgcaaccatccagtggtggaatatgccgagtcccagtgtagatccatatgatacatatgagccaaatgttctagctggcactttagttggtcatacagatgcagtttggggtcttgcttatagtggcataaaaaatcaattactgtcttgttcagcagatggcactgttaggttatggaatccacaagaaaaattgccatgtatttgcacttacaatggagataaaaagcatggaatacctacatcagttgactttataggctgtgatccagctcatatggtaacctctttcaacactggtagtgcagtaatttatgatttagaaacatcacagtcattggtgatactttcatcacaggtagattctggtttacaatctaataatcatatcaacagagtagtaagtcatcccacacttcctgttacaataactgctcatgaagatagacacatcaaattttttgacaataaaacgggtaaaatgatccattctatggtagctcacttggatgctgttacaagtctagcagtagatcctaatggaatctatttgatgtctggaagccatgactgttccatcagattatggaatttagacagcaagacatgtgtgcaagaaataacagctcacagaaagaaattggatgaatcaatttatgatgttgctttccactcgtcaaaagcatatatagctagtgcaggagctgatgctcttgccaaagtatttgtatgaatcaacaaaaacttgcatcgtaacaagatttgcttggacagaaagagggtctgcatcactgccatcagaaaggttactgatatgacactacatgtgatctgcctggtgaaggctatctggggcaggcacaaattggtggaaatcacatcttaatgtcaagctcattaagttaactgtaattactgtattttgtgggacaaagaaaaaaggactccagtatttgtggcctgtactggatgtgaactgagcgtatatctgtttttaggtgtctttaagccaatgtggagtctgatctttcaaaaaagttttttttttctcttcttcttcttcttttttttttttttttttttttttttttggactctgtgtgctgccttaggggttaggaatgtggtgctcttgttgggggaagtgagctccaagagtagctttttttcatctcttagtgatcttctgtttatcggttgaatgccacagattcccttttaaacttattttgctttaaaaaaaaaaaaaaaagaaaaagaaaatttaacttaaaatattttagcattagttgcacaaaatgtttggataaaattctagtttttataagtctttttatatatttagcctgtcacaacagtgctcaagattgtattgaagtttttctgcattatacaaccctaaaacacagagatctcactgacccgttgccctgtaaccactttctttccttcttttgcctaatacagctcagctaagtccttccataaagatgctaaataactttcatcatcacataaatgtcttcataaaccaaggactattaagtgtattaaaatgaaacagtggggtttagtactccaaatgaactcttaaagaaaaaaactaatcttggcatcctatcactatgtgatattttgtacatcttactgtatttacaagtttatttatcaaggattatccatcttgctaatggcctattatttatttcactttttgttggtctttatatccttttattaatgtgctaaaggaacctgtatatctattttggaactctttgaatagtctaaaatagactaaaaatggagtattttatagtttaaattacaaaccaaggtggttccccctaagatatatatcttggtttaccatgattccaaacaaaactaacttgtttaaaaatatttggagtaaagttttatttgcattacaaataggatacaaaaatagttgaatcaggatacagaaatctgctgtgttttgactagttatccctgttttatttttttagatgtgcttaattttatggtgtaactaaagattttgtttgtgtaatgcatgattaagacaataaagtattttttctagtcttccgagaaacttttctgatcagtttgcgagttttgatgagttttgtaaggtttttgttttacaaactatgaatcagcaaatttttaagattgtaccacatagcaaacatacagctgttgaaaaataatgtatataaaatgcatataataaatattaaattgtgtacctgtatgttactgttggctacatcattttgtgttgaataataaagtgcaatactttattctccataattaaactaggaaatggagatttcttagtgagtccttcatttttatgctgttctttcaaactttgtcctacttattgatattctaataagagtagatcactaaccctattaataatgtctaagtatttcaccccacttgaagattaagaaaaagtcttgcattaaattatgcaattcaaaataaccc

SEQ ID NO: 378020 - DNA, 3169 bp, Homo sapiens
tatttaattaacatcatcattattgttaaatattatttatcggtcctcaaaccttgtaattttctcaatgttttgtattagaaaagatgtattacttgaataatagctatttaataattgtattggtgagactatgaatataatagtaccattcaggccagatgcagtagttcatgcctgtaatctgaggattttcggaggctgaggcgggcagatcacttgaggtcaggagttcgagaccagcctggccaacatggtgaaactccgtctctaccacaaaatacaaaaattagctgggcatgttggcgtgcgcttgtagtctcagcaactcagtaggctgaggcaggagaatcgctcgaacctgggaggtggaggttttactgagcagagatcaccactgcattccagtctgggctggtgacagagtgagaccctgtctccaaaaaaaaaaaaaaaaaaaaagtaccagtcaggtgtacatgttctcttaaaacagtttttagatattacataaattcagaggttgggggaatggagatttgagtttcttcttagaatttatcagtaatttgtttttcctctcttcctacaatagcggccctgttctgtcattagctattagttctaatggagaacagtgttttagtggtggtattgatgcaaccatccagtggtggaatatgccgagtcccagtgtagatccatatgatacatatgagccaaatgttctagctggcactttagttggtcatacagatgcagtttggggtcttgcttatagtggcataaaaaatcaattactgtcttgttcagcagatggcactgttaggttatggaatccacaagaaaaattgccatgtatttgcacttacaatggagataaaaagcatggaatacctacatcagttgactttataggctgtgatccagctcatatggtaacctctttcaacactggtagtgcagtaatttatgatttagaaacatcacagtcattggtgatactttcatcacaggtagattctggtttacaatctaataatcatatcaacagagtagtaagtcatcccacacttcctgttacaataactgctcatgaagatagacacatcaaattttttgacaataaaacgggtaaaatgatccattctatggtagctcacttggatgctgttacaagtctagcagtagatcctaatggaatctatttgatgtctggaagccatgactgttccatcagattatggaatttagacagcaagacatgtgtgcaagaaataacagctcacagaaagaaattggatgaatcaatttatgatgttgctttccactcgtcaaaagcatatatagctagtgcaggagctgatgctcttgccaaagtatttgtatgaatcaacaaaaacttgcatcgtaacaagatttgcttggacagaaagagggtctgcatcactgccatcagaaaggttactgatatgacactacatgtgatctgcctggtgaaggctatctggggcaggcacaaattggtggaaatcacatcttaatgtcaagctcattaagttaactgtaattactgtattttgtgggacaaagaaaaaaggactccagtatttgtggcctgtactggatgtgaactgagcgtatatctgtttttaggtgtctttaagccaatgtggagtctgatctttcaaaaaagttttttttttctcttcttcttcttcttttttttttttttttttttttttttttggactctgtgtgctgccttaggggttaggaatgtggtgctcttgttgggggaagtgagctccaagagtagctttttttcatctcttagtgatcttctgtttatcggttgaatgccacagattcccttttaaacttattttgctttaaaaaaaaaaaaaaaagaaaaagaaaatttaacttaaaatattttagcattagttgcacaaaatgtttggataaaattctagtttttataagtctttttatatatttagcctgtcacaacagtgctcaagattgtattgaagtttttctgcattatacaaccctaaaacacagagatctcactgacccgttgccctgtaaccactttctttccttcttttgcctaatacagctcagctaagtccttccataaagatgctaaataactttcatcatcacataaatgtcttcataaaccaaggactattaagtgtattaaaatgaaacagtggggtttagtactccaaatgaactcttaaagaaaaaaactaatcttggcatcctatcactatgtgatattttgtacatcttactgtatttacaagtttatttatcaaggattatccatcttgctaatggcctattatttatttcactttttgttggtctttatatccttttattaatgtgctaaaggaacctgtatatctattttggaactctttgaatagtctaaaatagactaaaaatggagtattttatagtttaaattacaaaccaaggtggttccccctaagatatatatcttggtttaccatgattccaaacaaaactaacttgtttaaaaatatttggagtaaagttttatttgcattacaaataggatacaaaaatagttgaatcaggatacagaaatctgctgtgttttgactagttatccctgttttatttttttagatgtgcttaattttatggtgtaactaaagattttgtttgtgtaatgcatgattaagacaataaagtattttttctagtcttccgagaaacttttctgatcagtttgcgagttttgatgagttttgtaaggtttttgttttacaaactatgaatcagcaaatttttaagattgtaccacatagcaaacatacagctgttgaaaaataatgtatataaaatgcatataataaatattaaattgtgtacctgtatgttactgttggctacatcattttgtgttgaataataaagtgcaatactttattctccataattaaactaggaaatggagatttcttagtgagtccttcatttttatgctgttctttcaaactttgtcctacttattgatattctaataagagtagatcactaaccctattaataatgtctaagtatttcaccccacttgaagattaagaaaaagtcttgcattaaattatgcaattcaaaataaccc

SEQ ID NO: 378021 - DNA, 3196 bp, Homo sapiens
ggcctcatcgctttatacttcttactaagtcatttttcagtttcctatgtatggttaagggaaaatgtaaataaatgcatcttttaaatttttaggcccggattgcatttctacaaggcgaaagaaaaggtcaagagaacctgaagaaggacttagtaagaagaataaagatgttagagtatgcattaaaacaagaaagggcaaaatatcacaaattaaaatatggcacggaactgaaccaaggtgacttgaaaatgccaacctttgagtcagaagaaaccaaagacacagaggctcccacagcacctcagaatagccagttaacgtggaagcaaggcagacagcttttaagacagtatcttcaggaagtaggttatacagatacaatattagatgtacggtctcagcgggtaaggtcattacttggactatctaattcagaaccaaatggatcagtagaaacaaagaatttagaacagatcctgaatggaggtgaatctcctaagcaaaagggacaagaaataaaaaggtcctctggtgatgttcttgagacgttcaatttcttagaaaatgccgatgacagtgatgaagatgaggaaaatgacatgatcgaaggcatcccagaaggaaaagacaaacatcggatgaataaacataaaataggtaatgaaggtttagctgctgacctaactgacgatcctgatactgaggaagcactgaaagaatttgattttttagtgactgctgaagatggtgaaggagctggagaagcacggagttcgggggatggcacagaatgggataaagatgacctctccccaactgctgaggtttgggatgtagaccagggactaataagtaaactgaaggaacagtacaagaaggaacgaaaggggaagaaaggggtgaagagggccaacaggacaaaactctacgacatgatagctgatctgggagatgatgagctgccccacatcccttcaggaatcattaatcagtctaggtcagcctctactagaatgactgatcatgaaggtgcaagagcagaggaagctgaaccaataacgtttccatctggaggaggcaagtcatttattatgggttctgatgatgttttgttaagtgtactgggccttggagaccttgcagacttgacggtaacaaatgatgcagactatagttatgatttgcctgctaataaagatgcctttcgaaagacatggaatcccaagtatacactacgtagccattttgatggagtacgggcattagcttttcatcctgtagaacctgtgctggttactgcttctgaggaccataccctgaaactttggaacctgcaaaaaacagttcctgccaaaaagagtgcctctttagatgtagagcctatctacacatttagggcccacatcggccctgttctgtcattagctattagttctaatggagaacagtgttttagtggtggtattgatgcaaccatccagtggtggaatatgccgagtcccagtgtagatccatatgatacatatgagccaaatgttctagctggcactttagttggtcatacagatgcagtttggggtcttgcttatagtggcataaaaaatcaattactgtcttgttcagcagatggcactgttaggttatggaatccacaagaaaaattgccatgtatttgcacttacaatggagataaaaagcatggaatacctacatcagttgactttataggctgtgatccagctcatatggtaacctctttcaacactggtagtgcagtaatttatgatttagaaacatcacagtcattggtgatactttcatcacaggtagattctggtttacaatctaataatcatatcaacagagtagtaagtcatcccacacttcctgttacaataactgctcatgaagatagacacatcaaattttttgacaataaaacgggtaaaatgatccattctatggtagctcacttggatgctgttacaagtctagcagtagatcctaatggaatctatttgatgtctggaagccatgactgttccatcagattatggaatttagacagcaagacatgtgtgcaagaaataacagctcacagaaagaaattggatgaatcaatttatgatgttgctttccactcgtcaaaagcatatatagctagtgcaggagctgatgctcttgccaaagtatttgtatgaatcaacaaaaacttgcatcgtaacaagatttgcttggacagaaagagggtctgcatcactgccatcagaaaggttactgatatgacactacatgtgatctgcctggtgaaggctatctggggcaggcacaaattggtggaaatcacatcttaatgtcaagctcattaagttaactgtaattactgtattttgtgggacaaagaaaaaaggactccagtatttgtggcctgtactggatgtgaactgagcgtatatctgtttttaggtgtctttaagccaatgtggagtctgatctttcaaaaaagttttttttttctcttcttcttcttctttttttttttttttttttggggccccgggggggccgccccaggggttgcagcaatggggcgcgcccttgtgtggggagagaaggtagacgccccaaaagagtatgcgcctttttacaactcctcttaaggagagctctccgtgtaaaccgggtgagatgcgcaaaaggatccccttttaaacactgttttgcgctttcaaaaaacacacacaaagaggaacaagaagaaactattcccgcttacaaaatatttttgcccttttgttgccccccaaagtggtcgtgcgttcaaccttccaaggcttacaaaagcctcttaatattatttgcgcccggtcaccacggtgcctaacagtgtgctgaatgtttctgtgggttttatacaccccttaaaagagagagcttcagtgcccggtgccgtgtacccatttcttccttttgtggccaaaaaagccaagaggctccaaaaggggcaaaactttccacaccaatagtgttcttcaaccacggccttctggtttcacgacagggggcgtccccagacttgaaaacaactgggctcacaggattcgccctgctcacgtatcagcagcgcgcgagggagaagcggggggtcataagagagcgttcttcgcaaggaccccctgtgctgtgtgca

SEQ ID NO: 378022 - DNA, 317 bp, Homo sapiens
catttttcagtttcctatgtatggttaagggaaaatgtaaataaatgcatcttttaaatttttaggcccggattgcatttctacaaggcgaaagaaaaggtcaagagaacctgaagaaggacttagtaagaagaataaagatgttagagtatgcattaaaacaagaaaggtatgtgtgcctcattttgttacatgaataaagtagaacaatagtatactcatgtataccattgtactctgtatttggcagctttttttgaaaggtacaaatccttgcccgaatacatgatgctgtcttgatttgattcatacttggg

SEQ ID NO: 378023 - DNA, 408 bp, Homo sapiens
ataaagatgacctctccccaactgctgaggtttgggatgtagaccagggactaataagtaaactgaaggaacagtacaagaaggaacgaaaggggaagaaaggggtgaagagtaagtgcagattctgactattataatttttgtataccaataattgagaaaaaagttcttcaattctgtttctttgtgtaacttaattttttgtttcataaagggggcaactaactttaaactttgtctgttgtataattgaaatttgtttgtatataatttaggatgtgttattgatcaagtagaaaatcatttaaaatatatgagaagggtaaaggaaagattttgaggattgtttttaagctttaaaaactttaccaaattgtttggaatattggcattggaataaaaaataaa

SEQ ID NO: 378024 - DNA, 3985 bp, Homo sapiens
ggcctcatcgctttatacttcttactaagtcatttttcagtttcctatgtatggttaagggaaaatgtaaataaatgcatcttttaaatttttaggcccggattgcatttctacaaggcgaaagaaaaggtcaagagaacctgaagaaggacttagtaagaagaataaagatgttagagtatgcattaaaacaagaaagggcaaaatatcacaaattaaaatatggcacggaactgaaccaaggtgacttgaaaatgccaacctttgagtcagaagaaaccaaagacacagaggctcccacagcacctcagaatagccagttaacgtggaagcaaggcagacagcttttaagacagtatcttcaggaagtaggttatacagatacaatattagatgtacggtctcagcgggtaaggtcattacttggactatctaattcagaaccaaatggatcagtagaaacaaagaatttagaacagatcctgaatggaggtgaatctcctaagcaaaagggacaagaaataaaaaggtcctctggtgatgttcttgagacgttcaatttcttagaaaatgccgatgacagtgatgaagatgaggaaaatgacatgatcgaaggcatcccagaaggaaaagacaaacatcggatgaataaacataaaataggtaatgaaggtttagctgctgacctaactgacgatcctgatactgaggaagcactgaaagaatttgattttttagtgactgctgaagatggtgaaggagctggagaagcacggagttcgggggatggcacagaatgggataaagatgacctctccccaactgctgaggtttgggatgtagaccagggactaataagtaaactgaaggaacagtacaagaaggaacgaaaggggaagaaaggggtgaagagggccaacaggacaaaactctacgacatgatagctgatctgggagatgatgagctgccccacatcccttcaggaatcattaatcagtctaggtcagcctctactagaatgactgatcatgaaggtgcaagagcagaggaagctgaaccaataacgtttccatctggaggaggcaagtcatttattatgggttctgatgatgttttgttaagtgtactgggccttggagaccttgcagacttgacggtaacaaatgatgcagactatagttatgatttgcctgctaataaagatgcctttcgaaagacatggaatcccaagtatacactacgtagccattttgatggagtacgggcattagcttttcatcctgtagaacctgtgctggttactgcttctgaggaccataccctgaaactttggaacctgcaaaaaacagttcctgccaaaaagagtgcctctttagatgtagagcctatctacacatttagggcccacatcggccctgttctgtcattagctattagttctaatggagaacagtgttttagtggtggtattgatgcaaccatccagtggtggaatatgccgagtcccagtgtagatccatatgatacatatgagccaaatgttctagctggcactttagttggtcatacagatgcagtttggggtcttgcttatagtggcataaaaaatcaattactgtcttgttcagcagatggcactgttaggttatggaatccacaagaaaaattgccatgtatttgcacttacaatggagataaaaagcatggaatacctacatcagttgactttataggctgtgatccagctcatatggtaacctctttcaacactggtagtgcagtaatttatgatttagaaacatcacagtcattggtgatactttcatcacaggtagattctggtttacaatctaataatcatatcaacagagtagtaagtcatcccacacttcctgttacaataactgctcatgaagatagacacatcaaattttttgacaataaaacgggtaaaatgatccattctatggtagctcacttggatgctgttacaagtctagcagtagatcctaatggaatctatttgatgtctggaagccatgactgttccatcagattatggaatttagacagcaagacatgtgtgcaagaaataacagctcacagaaagaaattggatgaatcaatttatgatgttgctttccactcgtcaaaagcatatatagctagtgcaggagctgatgctcttgccaaagtatttgtatgaatcaacaaaaacttgcatcgtaacaagatttgcttggacagaaagagggtctgcatcactgccatcagaaaggttactgatatgacactacatgtgatctgcctggtgaaggctatctggggcaggcacaaattggtggaaatcacatcttaatgtcaagctcattaagttaactgtaattactgtattttgtgggacaaagaaaaaaggactccagtatttgtggcctgtactggatgtgaactgagcgtatatctgtttttaggtgtctttaagccaatgtggagtctgatctttcaaaaaagttttttttttctcttcttcttcttcttttttttttttttttttttttttttttggactctgtgtgctgccttaggggttaggaatgtggtgctcttgttgggggaagtgagctccaagagtagctttttttcatctcttagtgatcttctgtttatcggttgaatgccacagattcccttttaaacttattttgctttaaaaaaaaaaaaaaaagaaaaagaaaatttaacttaaaatattttagcattagttgcacaaaatgtttggataaaattctagtttttataagtctttttatatatttagcctgtcacaacagtgctcaagattgtattgaagtttttctgcattatacaaccctaaaacacagagatctcactgacccgttgccctgtaaccactttctttccttcttttgcctaatacagctcagctaagtccttccataaagatgctaaataactttcatcatcacataaatgtcttcataaaccaaggactattaagtgtattaaaatgaaacagtggggtttagtactccaaatgaactcttaaagaaaaaaactaatcttggcatcctatcactatgtgatattttgtacatcttactgtatttacaagtttatttatcaaggattatccatcttgctaatggcctattatttatttcactttttgttggtctttatatccttttattaatgtgctaaaggaacctgtatatctattttggaactctttgaatagtctaaaatagactaaaaatggagtattttatagtttaaattacaaaccaaggtggttccccctaagatatatatcttggtttaccatgattccaaacaaaactaacttgtttaaaaatatttggagtaaagttttatttgcattacaaataggatacaaaaatagttgaatcaggatacagaaatctgctgtgttttgactagttatccctgttttatttttttagatgtgcttaattttatggtgtaactaaagattttgtttgtgtaatgcatgattaagacaataaagtattttttctagtcttccgagaaacttttctgatcagtttgcgagttttgatgagttttgtaaggtttttgttttacaaactatgaatcagcaaatttttaagattgtaccacatagcaaacatacagctgttgaaaaataatgtatataaaatgcatataataaatattaaattgtgtacctgtatgttactgttggctacatcattttgtgttgaataataaagtgcaatactttattctccataattaaactaggaaatggagatttcttagtgagtccttcatttttatgctgttctttcaaactttgtcctacttattgatattctaataagagtagatcactaaccctattaataatgtctaagtatttcaccccacttgaagattaagaaaaagtcttgcattaaattatgcaattcaaaataaccc

SEQ ID NO: 378025 - DNA, 3961 bp, Homo sapiens
ggcctcatcgctttatacttcttactaagtcatttttcagtttcctatgtatggttaagggaaaatgtaaataaatgcatcttttaaatttttaggcccggattgcatttctacaaggcgaaagaaaaggtcaagagaacctgaagaaggacttagtaagaagaataaagatgttagagtatgcattaaaacaagaaagggcaaaatatcacaaattaaaatatggcacggaactgaaccaaggtgacttgaaaatgccaacctttgagtcagaagaaaccaaagacacagaggctcccacagcacctcagaatagccagttaacgtggaagcaaggcagacagcttttaagacagtatcttcaggaagtaggttatacagatacaatattagatgtacggtctcagcgggtaaggtcattacttggactatctaattcagaaccaaatggatcagtagaaacaaagaatttagaacagatcctgaatggaggtgaatctcctaagcaaaagggacaagaaataaaaaggtcctctggtgatgttcttgagacgttcaatttcttagaaaatgccgatgacagtgatgaagatgaggaaaatgacatgatcgaaggcatcccagaaggaaaagacaaacatcggatgaataaacataaaataggtaatgaaggtttagctgctgacctaactgacgatcctgatactgaggaagcactgaaagaatttgattttttagtgactgctgaagatggtgaaggagctggagaagcacggagttcgggggatggcacagaatgggataaagatgacctctccccaactgctgaggtttgggatgtagaccagggactaataagtaaactgaaggaacagtacaagaaggaacgaaaggggaagaaaggggtgaagagggccaacaggacaaaactctacgacatgatagctgatctgggagatgatgagctgccccacatcccttcaggaatcattaatcagtctaggtcagcctctactagaatgactgatcatgaaggtgcaagagcagaggaagctgaaccaataacgtttccatctggaggaggcaagtcatttattatgggttctgatgatgttttgttaagtgtactgggccttggagaccttgcagacttgacggtaacaaatgatgcagactatagttatgatttgcctgctaataaagatgcctttcgaaagacatggaatcccaagtatacactacgtagccattttgatggagtacgggcattagcttttcatcctgtagaacctgtgctggttactgcttctgaggaccataccctgaaactttggaacctgcaaaaaacagttcctgccaaaaagagtgcctctttagatgtagagcctatctacacatttagggcccacatcggccctgttctgtcattagctattagttctaatggagaacagtgttttagtggtggtattgatgcaaccatccagtggtggaatatgccgagtcccagtgtagatccatatgatacatatgagccaaatgttctagctggcactttagttggtcatacagatgcagtttggggtcttgcttatagtggcataaaaaatcaattactgtcttgttcagcagatggcactgttaggttatggaatccacaagaaaaattgccatgtatttgcacttacaatggagataaaaagcatggaatacctacatcagttgactttataggctgtgatccagctcatatggtaacctctttcaacactggtagtgcagtaatttatgatttagaaacatcacagtcattggtgatactttcatcacaggtagattctggtttacaatctaataatcatatcaacagagtagtaagtcatcccacacttcctgttacaataactgctcatgaagatagacacatcaaattttttgacaataaaacgggtaaaatgatccattctatggtagctcacttggatgctgttacaagtctagcagtagatcctaatggaatctatttgatgtctggaagccatgactgttccatcagattatggaatttagacagcaagacatgtgtgcaagaaataacagctcacagaaagaaattggatgaatcaatttatgatgttgctttccactcgtcaaaagcatatatagctagtgcaggagctgatgctcttgccaaagtatttgtatgaatcaacaaaaacttgcatcgtaacaagatttgcttggacagaaagagggtctgcatcactgccatcagaaaggttactgatatgacactacatgtgatctgcctggtgaaggtggaaatcacatcttaatgtcaagctcattaagttaactgtaattactgtattttgtgggacaaagaaaaaaggactccagtatttgtggcctgtactggatgtgaactgagcgtatatctgtttttaggtgtctttaagccaatgtggagtctgatctttcaaaaaagttttttttttctcttcttcttcttcttttttttttttttttttttttttttttggactctgtgtgctgccttaggggttaggaatgtggtgctcttgttgggggaagtgagctccaagagtagctttttttcatctcttagtgatcttctgtttatcggttgaatgccacagattcccttttaaacttattttgctttaaaaaaaaaaaaaaaagaaaaagaaaatttaacttaaaatattttagcattagttgcacaaaatgtttggataaaattctagtttttataagtctttttatatatttagcctgtcacaacagtgctcaagattgtattgaagtttttctgcattatacaaccctaaaacacagagatctcactgacccgttgccctgtaaccactttctttccttcttttgcctaatacagctcagctaagtccttccataaagatgctaaataactttcatcatcacataaatgtcttcataaaccaaggactattaagtgtattaaaatgaaacagtggggtttagtactccaaatgaactcttaaagaaaaaaactaatcttggcatcctatcactatgtgatattttgtacatcttactgtatttacaagtttatttatcaaggattatccatcttgctaatggcctattatttatttcactttttgttggtctttatatccttttattaatgtgctaaaggaacctgtatatctattttggaactctttgaatagtctaaaatagactaaaaatggagtattttatagtttaaattacaaaccaaggtggttccccctaagatatatatcttggtttaccatgattccaaacaaaactaacttgtttaaaaatatttggagtaaagttttatttgcattacaaataggatacaaaaatagttgaatcaggatacagaaatctgctgtgttttgactagttatccctgttttatttttttagatgtgcttaattttatggtgtaactaaagattttgtttgtgtaatgcatgattaagacaataaagtattttttctagtcttccgagaaacttttctgatcagtttgcgagttttgatgagttttgtaaggtttttgttttacaaactatgaatcagcaaatttttaagattgtaccacatagcaaacatacagctgttgaaaaataatgtatataaaatgcatataataaatattaaattgtgtacctgtatgttactgttggctacatcattttgtgttgaataataaagtgcaatactttattctccataattaaactaggaaatggagatttcttagtgagtccttcatttttatgctgttctttcaaactttgtcctacttattgatattctaataagagtagatcactaaccctattaataatgtctaagtatttcaccccacttgaagattaagaaaaagtcttgcattaaattatgcaattcaaaataaccc

SEQ ID NO: 378026 - DNA, 468 bp, Homo sapiens
atttaaaagaaaggcatattggctgggcgcagtggctcacaggtaacccagcacttcgggaggccaaggccctcgtgccgaattcggcacgagggaaaaaatgtcgaatttgcctctagcctttcctgacaaccttagaaagcactgaggaaaaatttgatagattcatttgtatacattcagatttgaagacttctgctccgatttcaacatcaccatataaaacaaataatgtttctgcttcttaaacaaagctgttggagaatgtgcaccaccaaaataagggaataagtaaaggaggaagaagaccctgagttcaggaataaggtaccacaactagagacagtcaaagagaattcctaggataagagggtgaattaggaccagacagccacccctccagagggagggcagaatggaggactcaagaggatgtctcccagaaaataaaaatgcagctgaggatta

SEQ ID NO: 378027 - DNA, 5638 bp, Homo sapiens
atttaaaagaaaggcatattggctgggcgcagtggctcacaggtaacccagcacttcgggaggccaaggccctcgtgccgaattcggcacgagggaaaaaatgtcgaatttgcctctagcctttcctgacaaccttagaaagcactgaggaaaaatttgatagattcatttgtatacattcagatttgaagacttctgctccgatttcaacatcaccatataaaacaaataatgtttctgcttcttaaacaaagctgttggagaatgtgcaccaccaaaataagggaataagtaaaggaggaagaagaccctgagttcaggaataagaatggattggtttcattgcaaccagtgcttccgaaaagatggggcccatttctttgtcaccagctgtggccatattttctgtaaaaagtgtgtgactctggaaaaatgtgctgtttgtggaactgcctgcaagcatctggctctttctgataatctgaagcctcaggagaagatgtttttcaaaagtcctgtggagacagctttgcagtattttagtcacatctctcaggtgtggagtttccagaagaaacaaacagatctcctcatcgccttttataagcatagaattacaaagttagaaacagccatgcaggaggcacagcaagcactggtgagccaggacaaagaattgtcagtcttaaggaaggagaatggagaactgaagaaatttctagccattctaaaggaatctccaagtcggtaccaaggaagcaggtcaatcacacctcgaccagtgggcattacttccccatcacagtcagttaccccacgacccagtttccagcatagcagtcaagtggtcagtcggtcctcctcagcggaatctattccttatagagaggctggctttggtagcttgggacaaggaggcagaggtctgcagggaaggagaactcccagagactcttataatgaaaccccttcaccggcttcaactcatagcctatcttatagaacttcatctgcctcctctggacaggggattttttctttcagaccatccccaaatgggcattcaggccacacaagagtcctcacccccaacaattttgctcagagggagagcacaactacactagagagtcttcctagtttccagctaccagtcctgcagactctctaccaacaacggaggcatatgggattacccagtgggagagaagcatggaccacttctagatagatcatcttcaagatctgatctatacatgctgctgaaggatggactgtagcttccagtacgcattaggggtgatggccctggaaaatgtatccctgcattgtttcctagtttcactctgtaccttatgctccccccatctttaccctattcacccttatcacctcccaggacagtggtcaggtcttacaaaaggctagtgcttcaggaagatgtttatatctcttccagaagacattggtagctcccctcatttcctacaatttggaacaaaggtcaaaaaaataattcttggcatcatgcttggttgggagttgggaatggggattgtgatggatcatatactcatcactgtttcatttctggatttcatttttagctttggatatactgtcccattgccaatgttaacgagcaatatctctgttcttttccttattatacttttttatttgtctattatttcctctatgcttagttactattaaatgttaattttcctttctattgaaaacaactgttggagacactgattttcagcttagtatatagatagtaaaataaagacgatgcccttttattgctacaattctatcacttttacaagctctagaatggtggaatgggcgaacaacactatcactgagatcaaacatgtattctactttgggttttaaaaggcagaaatgacgaattaaataggttagccactcacaagctggccttaagcaaaaatactggaaaaacagaaaatagcaggcatctgccagaaataaattaggtcttgggaatgatcttgtatctgaactaggatccccataccctttctggtactctgaatttattttaaaggcatttctagataccttctcttttaggcaagggcctgtcctgtagcaaatggagttacctccaagactgttgtatctctgttactcctgaagcctcagaaattttagtcattatcatttgatggctgagaaacaacctggctggcgatagatgctgaactacttcctttttacagtttttgttcttttaatttacctcaataagtcctgcccctccaaacaataagttaaaagtatgctgagttagaatgttaatggatttggttccattaatccctaaaccataggagtggcaaagtggttgagagagaaacaattttatttttggcctttttattattattctagcattttagggcttccactcttttatttttagatggttaactcattgatgatacctatttgccatatagctgatcccaactgatgaaaaccattctaaaacatcaataattaattcacttaaagacgatggtccctctgtccctaagacagatcctatcaagagagggaaaagtctcttttctggaaacaaattgacagcaaaaagatgaaaaattagtctctgtcaagctggacaggaggtagttaacaggtttgtaaaaccaaacctgaaacctaccttcactgcccttcaacaaggagaaactattccctctctttcacccctttgtaacacaattctactgtttaaaaggacatcttccctaattaccacctccaataaatatccattctaaattattctccacccaattattaaagttttttacaagctcggtgggggaagattttccctgagacaaacaatgaacagagtgaggattttggaaagatagaaaaagctacaaggcaaagtggtcacagcataagaactgaaaatagccgggcacggtggctcatgcctataatcccagcactttgggaggccaaggtgggcggatcatgaggtcaggagatcaagaccatcctggctaacatgatgaaacccgtctctactaaaaatataaaaaagtagccgggtgtggtggcaggtgcctgtagtcccagctactcgggaggctgaggcaggagaatggcatgaacctgggaggcggagcttgcagtgagctgagattgcgccattgcactacagcctgggcgacagagcaagactccacctcaaaaaaaaaaaaaagaactgaaaaattctgccacctgtgatttagtcatgaagcgggtgaaacatagtcaagttggtatgaggaaaaggaaatattaatatttgtgatgagactgggacttattgagaatcttggttgtctaggaaatgatcagttactaagaaaaaagtaagagagtcagttgcattacgcacagacttgtgctcagaaaaggggtacaaggcagccttatattccaggtaagatggtgggattggggatgcactggaatcatcaatcaaatcagaatcctttactcctcctttccaatcctcctggagaggtggtgccaacatctggcctctgtatagtacaccaagggaaaaaaacagcagacacgaggagagcaagagcagcttcccagcccatggtttccccagatccttagcactccctaccctaaggttagagggttggatttctgctgatccaatcccagccttacttagtgccctatggtcattctccctggtccaccctcactatatccccctgccacccaccctgaagaacacaaagctttttagttctctgccacaaggtaattttaaaaatgtggtttctttgtttaaacagttactaagttggttcatctttcagtaacagacctcccctcccccagctccccactcagtcttgtatgatcacatcatcatcatcatcatcatcttcctcctcctcctcctcctcttcctcatcatcttctggcagttcttcctcctcctcttcctcttcttcatctagacaaactaccacctcagctggctgaggtaatcgagagtcaaaccaatccagcacctgctgggtgctaagccttgatgcctgactcaattgagggatatcagtttcccgtagctgttggtgggctgcccagtacctctccaagggttgtatatccggtgggggtggagggatcggcagaggtggtgtctcagccctttcgttcaaggagcgggttgatggtggtggtgtaggaattgctgggtcttggaaactaggggcaccaggtactgcgttgtcccgaaaccactttagttgcccatgcttcaaggcatagcgtgtgtcaccaaaccactgaatgatctcaggccgaggtaaaccagtgatctgttctaacttttggtaatcctcacgccgtgcccactggcactgtaaaaaaaaggatttaaggatagccagctgctctttggttttgcgcttggtctttcgctggcgttgcatatctggggaaaggtactctgtggggccaactctacctggtactgagttatgccgtagcccttggggccaggctggttccagatgtgggggtaatgcctgttcactgggtgacactgactgtgggacacagcctagtggctggaggggtttagaggcggcagtagctccattagccagtacctggaaagaagaagaggtagaggaagaagagggagtaacactagatgctgactcctccttacaactactggcaattaatgcaattggtgggggtttatcccgagcttgtggctgggggacggttgtggagtggttccaggaagcagtacctatgccatgtgactggttgggacccctgcctgcctgctcctttgagaggccactgctttgaagatgttgccaaaaatctgattggtaggggaatgctccactgccaggtgtcatcagggactcctttaatttctggtgactctgtggcagtggtggcatctgagagggctcctcaggctctaccttcaatcctttcgtctgggtaggcttgctaagagttggaggacctattccaataccaacttgctctggagctggcactggaggaggaggcacctcctctgggggccgtcccgcatgatgagtaaaagagagaagggatttgaaatggagttggtcccgacggtagactactcgggctcgagtctcttctatttcttcagatgaccagctaataccacagcggaggcgctgggccataaaccaagtcttgactttctccatctgcaacccataacgtaggcagagaagggcaatgtctgctaggctgggatagggaaagtagctgaaggttttgagcaggtgttcattgctgtctagctcactggtctgggctgcttgcgtccacacaagctgtagctcctcagagattggagggaggcagatgagccccgctggtgaactactgagaccgctggcctctttattaggaggcatggtgccttctgatttgtgcccttcagagatagcgcagtccagcccgggcggcggctcccagcctcgcaccatgggccggggggaagtgggggagagggcagggggcctccgagtgggagtggggttgctgcccggtgcggccgccc

SEQ ID NO: 378028 - DNA, 5458 bp, Homo sapiens
atttaaaagaaaggcatattggctgggcgcagtggctcacaggtaacccagcacttcgggaggccaaggccctcgtgccgaattcggcacgagggaaaaaatgtcgaatttgcctctagcctttcctgacaaccttagaaagcactgaggaaaaatttgatagattcatttgtatacattcagatttgaagacttctgctccgatttcaacatcaccatataaaacaaataatgtttctgcttcttaaacaaagctgttggagaatgtgcaccaccaaaataagggaataagtaaaggaggaagaagaccctgagttcaggaataagaatggattggtttcattgcaaccagtgcttccgaaaagatggggcccatttctttgtcaccagctgtggccatattttctgtaaaaagtgtgtgactctggaaaaatgtgctgtttgtggaactgcctgcaagcatctggctctttctgataatctgaagcctcaggagaagatgtttttcaaaagtcctgtggagacagctttgcagtattttagtcacatctctcaggtgtggagtttccagaagaaacaaacagatctcctcatcgccttttataagcatagaattacaaagttagaaacagccatgcaggaggcacagcaagcactggtgagccaggacaatcggtcctcctcagcggaatctattccttatagagaggctggctttggtagcttgggacaaggaggcagaggtctgcagggaaggagaactcccagagactcttataatgaaaccccttcaccggcttcaactcatagcctatcttatagaacttcatctgcctcctctggacaggggattttttctttcagaccatccccaaatgggcattcaggccacacaagagtcctcacccccaacaattttgctcagagggagagcacaactacactagagagtcttcctagtttccagctaccagtcctgcagactctctaccaacaacggaggcatatgggattacccagtgggagagaagcatggaccacttctagatagatcatcttcaagatctgatctatacatgctgctgaaggatggactgtagcttccagtacgcattaggggtgatggccctggaaaatgtatccctgcattgtttcctagtttcactctgtaccttatgctccccccatctttaccctattcacccttatcacctcccaggacagtggtcaggtcttacaaaaggctagtgcttcaggaagatgtttatatctcttccagaagacattggtagctcccctcatttcctacaatttggaacaaaggtcaaaaaaataattcttggcatcatgcttggttgggagttgggaatggggattgtgatggatcatatactcatcactgtttcatttctggatttcatttttagctttggatatactgtcccattgccaatgttaacgagcaatatctctgttcttttccttattatacttttttatttgtctattatttcctctatgcttagttactattaaatgttaattttcctttctattgaaaacaactgttggagacactgattttcagcttagtatatagatagtaaaataaagacgatgcccttttattgctacaattctatcacttttacaagctctagaatggtggaatgggcgaacaacactatcactgagatcaaacatgtattctactttgggttttaaaaggcagaaatgacgaattaaataggttagccactcacaagctggccttaagcaaaaatactggaaaaacagaaaatagcaggcatctgccagaaataaattaggtcttgggaatgatcttgtatctgaactaggatccccataccctttctggtactctgaatttattttaaaggcatttctagataccttctcttttaggcaagggcctgtcctgtagcaaatggagttacctccaagactgttgtatctctgttactcctgaagcctcagaaattttagtcattatcatttgatggctgagaaacaacctggctggcgatagatgctgaactacttcctttttacagtttttgttcttttaatttacctcaataagtcctgcccctccaaacaataagttaaaagtatgctgagttagaatgttaatggatttggttccattaatccctaaaccataggagtggcaaagtggttgagagagaaacaattttatttttggcctttttattattattctagcattttagggcttccactcttttatttttagatggttaactcattgatgatacctatttgccatatagctgatcccaactgatgaaaaccattctaaaacatcaataattaattcacttaaagacgatggtccctctgtccctaagacagatcctatcaagagagggaaaagtctcttttctggaaacaaattgacagcaaaaagatgaaaaattagtctctgtcaagctggacaggaggtagttaacaggtttgtaaaaccaaacctgaaacctaccttcactgcccttcaacaaggagaaactattccctctctttcacccctttgtaacacaattctactgtttaaaaggacatcttccctaattaccacctccaataaatatccattctaaattattctccacccaattattaaagttttttacaagctcggtgggggaagattttccctgagacaaacaatgaacagagtgaggattttggaaagatagaaaaagctacaaggcaaagtggtcacagcataagaactgaaaatagccgggcacggtggctcatgcctataatcccagcactttgggaggccaaggtgggcggatcatgaggtcaggagatcaagaccatcctggctaacatgatgaaacccgtctctactaaaaatataaaaaagtagccgggtgtggtggcaggtgcctgtagtcccagctactcgggaggctgaggcaggagaatggcatgaacctgggaggcggagcttgcagtgagctgagattgcgccattgcactacagcctgggcgacagagcaagactccacctcaaaaaaaaaaaaaagaactgaaaaattctgccacctgtgatttagtcatgaagcgggtgaaacatagtcaagttggtatgaggaaaaggaaatattaatatttgtgatgagactgggacttattgagaatcttggttgtctaggaaatgatcagttactaagaaaaaagtaagagagtcagttgcattacgcacagacttgtgctcagaaaaggggtacaaggcagccttatattccaggtaagatggtgggattggggatgcactggaatcatcaatcaaatcagaatcctttactcctcctttccaatcctcctggagaggtggtgccaacatctggcctctgtatagtacaccaagggaaaaaaacagcagacacgaggagagcaagagcagcttcccagcccatggtttccccagatccttagcactccctaccctaaggttagagggttggatttctgctgatccaatcccagccttacttagtgccctatggtcattctccctggtccaccctcactatatccccctgccacccaccctgaagaacacaaagctttttagttctctgccacaaggtaattttaaaaatgtggtttctttgtttaaacagttactaagttggttcatctttcagtaacagacctcccctcccccagctccccactcagtcttgtatgatcacatcatcatcatcatcatcatcttcctcctcctcctcctcctcttcctcatcatcttctggcagttcttcctcctcctcttcctcttcttcatctagacaaactaccacctcagctggctgaggtaatcgagagtcaaaccaatccagcacctgctgggtgctaagccttgatgcctgactcaattgagggatatcagtttcccgtagctgttggtgggctgcccagtacctctccaagggttgtatatccggtgggggtggagggatcggcagaggtggtgtctcagccctttcgttcaaggagcgggttgatggtggtggtgtaggaattgctgggtcttggaaactaggggcaccaggtactgcgttgtcccgaaaccactttagttgcccatgcttcaaggcatagcgtgtgtcaccaaaccactgaatgatctcaggccgaggtaaaccagtgatctgttctaacttttggtaatcctcacgccgtgcccactggcactgtaaaaaaaaggatttaaggatagccagctgctctttggttttgcgcttggtctttcgctggcgttgcatatctggggaaaggtactctgtggggccaactctacctggtactgagttatgccgtagcccttggggccaggctggttccagatgtgggggtaatgcctgttcactgggtgacactgactgtgggacacagcctagtggctggaggggtttagaggcggcagtagctccattagccagtacctggaaagaagaagaggtagaggaagaagagggagtaacactagatgctgactcctccttacaactactggcaattaatgcaattggtgggggtttatcccgagcttgtggctgggggacggttgtggagtggttccaggaagcagtacctatgccatgtgactggttgggacccctgcctgcctgctcctttgagaggccactgctttgaagatgttgccaaaaatctgattggtaggggaatgctccactgccaggtgtcatcagggactcctttaatttctggtgactctgtggcagtggtggcatctgagagggctcctcaggctctaccttcaatcctttcgtctgggtaggcttgctaagagttggaggacctattccaataccaacttgctctggagctggcactggaggaggaggcacctcctctgggggccgtcccgcatgatgagtaaaagagagaagggatttgaaatggagttggtcccgacggtagactactcgggctcgagtctcttctatttcttcagatgaccagctaataccacagcggaggcgctgggccataaaccaagtcttgactttctccatctgcaacccataacgtaggcagagaagggcaatgtctgctaggctgggatagggaaagtagctgaaggttttgagcaggtgttcattgctgtctagctcactggtctgggctgcttgcgtccacacaagctgtagctcctcagagattggagggaggcagatgagccccgctggtgaactactgagaccgctggcctctttattaggaggcatggtgccttctgatttgtgcccttcagagatagcgcagtccagcccgggcggcggctcccagcctcgcaccatgggccggggggaagtgggggagagggcagggggcctccgagtgggagtggggttgctgcccggtgcggccgccc

SEQ ID NO: 378029 - DNA, 4403 bp, Homo sapiens
aattgtgggagctaagaacataaattaccccacgacccagtttccagcatagcagtcaagtggtcagggaggcagaggtctgcagggaaggagaactcccagagactcttataatgaaaccccttcaccggcttcaactcatagcctatcttatagaacttcatctgcctcctctggacaggggattttttctttcagaccatccccaaatgggcattcaggccacacaagagtcctcacccccaacaattttgctcagagggagagcacaactacactagagagtcttcctagtttccagctaccagtcctgcagactctctaccaacaacggaggcatatgggattacccagtgggagagaagcatggaccacttctagatagatcatcttcaagatctgatctatacatgctgctgaaggatggactgtagcttccagtacgcattaggggtgatggccctggaaaatttactattaaatgttaattttcctttctattgaaaacaactgttggagacactgattttcagcttagtatatagatagtaaaataaagacgatgcccttttattgctacaattctatcacttttacaagctctagaatggtggaatgggcgaacaacactatcactgagatcaaacatgtattctactttgggttttaaaaggcagaaatgacgaattaaataggttagccactcacaagctggccttaagcaaaaatactggaaaaacagaaaatagcaggcatctgccagaaataaattaggtcttgggaatgatcttgtatctgaactaggatccccataccctttctggtactctgaatttattttaaaggcatttctagataccttctcttttaggcaagggcctgtcctgtagcaaatggagttacctccaagactgttgtatctctgttactcctgaagcctcagaaattttagtcattatcatttgatggctgagaaacaacctggctggcgatagatgctgaactacttcctttttacagtttttgttcttttaatttacctcaataagtcctgcccctccaaacaataagttaaaagtatgctgagttagaatgttaatggatttggttccattaatccctaaaccataggagtggcaaagtggttgagagagaaacaattttatttttggcctttttattattattctagcattttagggcttccactcttttatttttagatggttaactcattgatgatacctatttgccatatagctgatcccaactgatgaaaaccattctaaaacatcaataattaattcacttaaagacgatggtccctctgtccctaagacagatcctatcaagagagggaaaagtctcttttctggaaacaaattgacagcaaaaagatgaaaaattagtctctgtcaagctggacaggaggtagttaacaggtttgtaaaaccaaacctgaaacctaccttcactgcccttcaacaaggagaaactattccctctctttcacccctttgtaacacaattctactgtttaaaaggacatcttccctaattaccacctccaataaatatccattctaaattattctccacccaattattaaagttttttacaagctcggtgggggaagattttccctgagacaaacaatgaacagagtgaggattttggaaagatagaaaaagctacaaggcaaagtggtcacagcataagaactgaaaatagccgggcacggtggctcatgcctataatcccagcactttgggaggccaaggtgggcggatcatgaggtcaggagatcaagaccatcctggctaacatgatgaaacccgtctctactaaaaatataaaaaagtagccgggtgtggtggcaggtgcctgtagtcccagctactcgggaggctgaggcaggagaatggcatgaacctgggaggcggagcttgcagtgagctgagattgcgccattgcactacagcctgggcgacagagcaagactccacctcaaaaaaaaaaaaaagaactgaaaaattctgccacctgtgatttagtcatgaagcgggtgaaacatagtcaagttggtatgaggaaaaggaaatattaatatttgtgatgagactgggacttattgagaatcttggttgtctaggaaatgatcagttactaagaaaaaagtaagagagtcagttgcattacgcacagacttgtgctcagaaaaggggtacaaggcagccttatattccaggtaagatggtgggattggggatgcactggaatcatcaatcaaatcagaatcctttactcctcctttccaatcctcctggagaggtggtgccaacatctggcctctgtatagtacaccaagggaaaaaaacagcagacacgaggagagcaagagcagcttcccagcccatggtttccccagatccttagcactccctaccctaaggttagagggttggatttctgctgatccaatcccagccttacttagtgccctatggtcattctccctggtccaccctcactatatccccctgccacccaccctgaagaacacaaagctttttagttctctgccacaaggtaattttaaaaatgtggtttctttgtttaaacagttactaagttggttcatctttcagtaacagacctcccctcccccagctccccactcagtcttgtatgatcacatcatcatcatcatcatcatcttcctcctcctcctcctcctcttcctcatcatcttctggcagttcttcctcctcctcttcctcttcttcatctagacaaactaccacctcagctggctgaggtaatcgagagtcaaaccaatccagcacctgctgggtgctaagccttgatgcctgactcaattgagggatatcagtttcccgtagctgttggtgggctgcccagtacctctccaagggttgtatatccggtgggggtggagggatcggcagaggtggtgtctcagccctttcgttcaaggagcgggttgatggtggtggtgtaggaattgctgggtcttggaaactaggggcaccaggtactgcgttgtcccgaaaccactttagttgcccatgcttcaaggcatagcgtgtgtcaccaaaccactgaatgatctcaggccgaggtaaaccagtgatctgttctaacttttggtaatcctcacgccgtgcccactggcactgtaaaaaaaaggatttaaggatagccagctgctctttggttttgcgcttggtctttcgctggcgttgcatatctggggaaaggtactctgtggggccaactctacctggtactgagttatgccgtagcccttggggccaggctggttccagatgtgggggtaatgcctgttcactgggtgacactgactgtgggacacagcctagtggctggaggggtttagaggcggcagtagctccattagccagtacctggaaagaagaagaggtagaggaagaagagggagtaacactagatgctgactcctccttacaactactggcaattaatgcaattggtgggggtttatcccgagcttgtggctgggggacggttgtggagtggttccaggaagcagtacctatgccatgtgactggttgggacccctgcctgcctgctcctttgagaggccactgctttgaagatgttgccaaaaatctgattggtaggggaatgctccactgccaggtgtcatcagggactcctttaatttctggtgactctgtggcagtggtggcatctgagagggctcctcaggctctaccttcaatcctttcgtctgggtaggcttgctaagagttggaggacctattccaataccaacttgctctggagctggcactggaggaggaggcacctcctctgggggccgtcccgcatgatgagtaaaagagagaagggatttgaaatggagttggtcccgacggtagactactcgggctcgagtctcttctatttcttcagatgaccagctaataccacagcggaggcgctgggccataaaccaagtcttgactttctccatctgcaacccataacgtaggcagagaagggcaatgtctgctaggctgggatagggaaagtagctgaaggttttgagcaggtgttcattgctgtctagctcactggtctgggctgcttgcgtccacacaagctgtagctcctcagagattggagggaggcagatgagccccgctggtgaactactgagaccgctggcctctttattaggaggcatggtgccttctgatttgtgcccttcagagatagcgcagtccagcccgggcggcggctcccagcctcgcaccatgggccggggggaagtgggggagagggcagggggcctccgagtgggagtggggttgctgcccggtgcggccgccc

SEQ ID NO: 378030 - DNA, 2614 bp, Homo sapiens
gtcaatcatttcaaagaattcgttttgttgagagtctgtattacttcttctattatctgtttcatttacttctggtttagtctatttccttccttctcattattttggatttagttctttttctagtttcctaaggtggaagtttcgattattgatttgagatcttttttactattgatgtttccagtcataaatttcactgtagcactgcttttactgcatcctataacatttggcatgctgtgttttgtttacattcattccaaaggttgtttgttcatttgtgtttttttttgagatggggaaaaggaaatattaatatttgtgatgagactgggacttattgagaatcttggttgtctaggaaatgatcagttactaagaaaaaagtaagagagtcagttgcattacgcacagacttgtgctcagaaaaggggtacaaggcagccttatattccaggtaagatggtgggattggggatgcactggaatcatcaatcaaatcagaatcctttactcctcctttccaatcctcctggagaggtggtgccaacatctggcctctgtatagtacaccaagggaaaaaaacagcagacacgaggagagcaagagcagcttcccagcccatggtttccccagatccttagcactccctaccctaaggttagagggttggatttctgctgatccaatcccagccttacttagtgccctatggtcattctccctggtccaccctcactatatccccctgccacccaccctgaagaacacaaagctttttagttctctgccacaaggtaattttaaaaatgtggtttctttgtttaaacagttactaagttggttcatctttcagtaacagacctcccctcccccagctccccactcagtcttgtatgatcacatcatcatcatcatcatcatcttcctcctcctcctcctcctcttcctcatcatcttctggcagttcttcctcctcctcttcctcttcttcatctagacaaactaccacctcagctggctgaggtaatcgagagtcaaaccaatccagcacctgctgggtgctaagccttgatgcctgactcaattgagggatatcagtttcccgtagctgttggtgggctgcccagtacctctccaagggttgtatatccggtgggggtggagggatcggcagaggtggtgtctcagccctttcgttcaaggagcgggttgatggtggtggtgtaggaattgctgggtcttggaaactaggggcaccaggtactgcgttgtcccgaaaccactttagttgcccatgcttcaaggcatagcgtgtgtcaccaaaccactgaatgatctcaggccgaggtaaaccagtgatctgttctaacttttggtaatcctcacgccgtgcccactggcactgtaaaaaaaaggatttaaggatagccagctgctctttggttttgcgcttggtctttcgctggcgttgcatatctggggaaaggtactctgtggggccaactctacctggtactgagttatgccgtagcccttggggccaggctggttccagatgtgggggtaatgcctgttcactgggtgacactgactgtgggacacagcctagtggctggaggggtttagaggcggcagtagctccattagccagtacctggaaagaagaagaggtagaggaagaagagggagtaacactagatgctgactcctccttacaactactggcaattaatgcaattggtgggggtttatcccgagcttgtggctgggggacggttgtggagtggttccaggaagcagtacctatgccatgtgactggttgggacccctgcctgcctgctcctttgagaggccactgctttgaagatgttgccaaaaatctgattggtaggggaatgctccactgccaggtgtcatcagggactcctttaatttctggtgactctgtggcagtggtggcatctgagagggctcctcaggctctaccttcaatcctttcgtctgggtaggcttgctaagagttggaggacctattccaataccaacttgctctggagctggcactggaggaggaggcacctcctctgggggccgtcccgcatgatgagtaaaagagagaagggatttgaaatggagttggtcccgacggtagactactcgggctcgagtctcttctatttcttcagatgaccagctaataccacagcggaggcgctgggccataaaccaagtcttgactttctccatctgcaacccataacgtaggcagagaagggcaatgtctgctaggctgggatagggaaagtagctgaaggttttgagcaggtgttcattgctgtctagctcactggtctgggctgcttgcgtccacacaagctgtagctcctcagagattggagggaggcagatgagccccgctggtgaactactgagaccgctggcctctttattaggaggcatggtgccttctgatttgtgcccttcagagatagcgcagtccagcccgggcggcggctcccagcctcgcaccatgggccggggggaagtgggggagagggcagggggcctccgagtgggagtggggttgctgcccggtgcggccgccc

SEQ ID NO: 378031 - DNA, 479 bp, Homo sapiens
atttaaaagaaaggcatattggctgggcgcagtggctcacaggtaacccagcacttcgggaggccaaggccctcgtgccgaattcggcacgagggaaaaaatgtcgaatttgcctctagcctttcctgacaaccttagaaagcactgaggaaaaatttgatagattcatttgtatacattcagatttgaagacttctgctccgatttcaacatcaccatataaaacaaataatgtttctgcttcttaaacggtttatgcagtcctgagaatttggatgcagctgaccctgctttgttatgatggttaattaattcagctcttctggagataatgatgaatccttgctctgacaccagagacaaaaattccaacagattactcctctgtctgctgcacttggtgggattccatggagccagcccagcactagtgggaaagaaataaagaggcactgcctgtggcaggccagatctccgca

SEQ ID NO: 378032 - DNA, 5555 bp, Homo sapiens
atttaaaagaaaggcatattggctgggcgcagtggctcacaggtaacccagcacttcgggaggccaaggccctcgtgccgaattcggcacgagggaaaaaatgtcgaatttgcctctagcctttcctgacaaccttagaaagcactgaggaaaaatttgatagattcatttgtatacattcagatttgaagacttctgctccgatttcaacatcaccatataaaacaaataatgtttctgcttcttaaacaaagctgttggagaatgtgcaccaccaaaataagggaataagtaaaggaggaagaagaccctgagttcaggaataagaatggattggtttcattgcaaccagtgcttccgaaaagatggggcccatttctttgtcaccagctgtggccatattttctgtaaaaagtgtgtgactctggaaaaatgtgctgtttgtggaactgcctgcaagcatctggctctttctgataatctgaagcctcaggagaagatgtttttcaaaagtcctgtggagacagctttgcagtattttagtcacatctctcaggtgtggagtttccagaagaaacaaacagatctcctcatcgccttttataagcatagaattacaaagttagaaacagccatgcaggaggcacagcaagcactggtgagccaggacaaagaattgtcagtcttaaggaaggagaatggagaactgaagaaatttctagccattctaaaggaatctccaagtcggtaccaaggaagcaggtcaatcacacctcgaccagtgggcattacttccccatcacagtcagtcggtcctcctcagcggaatctattccttatagagaggctggctttggtagcttgggacaaggaggcagaggtctgcagggaaggagaactcccagagactcttataatgaacttcatctgcctcctctggacaggggattttttctttcagaccatccccaaatgggcattcaggccacacaagagtcctcacccccaacaattttgctcagagggagagcacaactacactagagagtcttcctagtttccagctaccagtcctgcagactctctaccaacaacggaggcatatgggattacccagtgggagagaagcatggaccacttctagatagatcatcttcaagatctgatctatacatgctgctgaaggatggactgtagcttccagtacgcattaggggtgatggccctggaaaatgtatccctgcattgtttcctagtttcactctgtaccttatgctccccccatctttaccctattcacccttatcacctcccaggacagtggtcaggtcttacaaaaggctagtgcttcaggaagatgtttatatctcttccagaagacattggtagctcccctcatttcctacaatttggaacaaaggtcaaaaaaataattcttggcatcatgcttggttgggagttgggaatggggattgtgatggatcatatactcatcactgtttcatttctggatttcatttttagctttggatatactgtcccattgccaatgttaacgagcaatatctctgttcttttccttattatacttttttatttgtctattatttcctctatgcttagttactattaaatgttaattttcctttctattgaaaacaactgttggagacactgattttcagcttagtatatagatagtaaaataaagacgatgcccttttattgctacaattctatcacttttacaagctctagaatggtggaatgggcgaacaacactatcactgagatcaaacatgtattctactttgggttttaaaaggcagaaatgacgaattaaataggttagccactcacaagctggccttaagcaaaaatactggaaaaacagaaaatagcaggcatctgccagaaataaattaggtcttgggaatgatcttgtatctgaactaggatccccataccctttctggtactctgaatttattttaaaggcatttctagataccttctcttttaggcaagggcctgtcctgtagcaaatggagttacctccaagactgttgtatctctgttactcctgaagcctcagaaattttagtcattatcatttgatggctgagaaacaacctggctggcgatagatgctgaactacttcctttttacagtttttgttcttttaatttacctcaataagtcctgcccctccaaacaataagttaaaagtatgctgagttagaatgttaatggatttggttccattaatccctaaaccataggagtggcaaagtggttgagagagaaacaattttatttttggcctttttattattattctagcattttagggcttccactcttttatttttagatggttaactcattgatgatacctatttgccatatagctgatcccaactgatgaaaaccattctaaaacatcaataattaattcacttaaagacgatggtccctctgtccctaagacagatcctatcaagagagggaaaagtctcttttctggaaacaaattgacagcaaaaagatgaaaaattagtctctgtcaagctggacaggaggtagttaacaggtttgtaaaaccaaacctgaaacctaccttcactgcccttcaacaaggagaaactattccctctctttcacccctttgtaacacaattctactgtttaaaaggacatcttccctaattaccacctccaataaatatccattctaaattattctccacccaattattaaagttttttacaagctcggtgggggaagattttccctgagacaaacaatgaacagagtgaggattttggaaagatagaaaaagctacaaggcaaagtggtcacagcataagaactgaaaatagccgggcacggtggctcatgcctataatcccagcactttgggaggccaaggtgggcggatcatgaggtcaggagatcaagaccatcctggctaacatgatgaaacccgtctctactaaaaatataaaaaagtagccgggtgtggtggcaggtgcctgtagtcccagctactcgggaggctgaggcaggagaatggcatgaacctgggaggcggagcttgcagtgagctgagattgcgccattgcactacagcctgggcgacagagcaagactccacctcaaaaaaaaaaaaaagaactgaaaaattctgccacctgtgatttagtcatgaagcgggtgaaacatagtcaagttggtatgaggaaaaggaaatattaatatttgtgatgagactgggacttattgagaatcttggttgtctaggaaatgatcagttactaagaaaaaagtaagagagtcagttgcattacgcacagacttgtgctcagaaaaggggtacaaggcagccttatattccaggtaagatggtgggattggggatgcactggaatcatcaatcaaatcagaatcctttactcctcctttccaatcctcctggagaggtggtgccaacatctggcctctgtatagtacaccaagggaaaaaaacagcagacacgaggagagcaagagcagcttcccagcccatggtttccccagatccttagcactccctaccctaaggttagagggttggatttctgctgatccaatcccagccttacttagtgccctatggtcattctccctggtccaccctcactatatccccctgccacccaccctgaagaacacaaagctttttagttctctgccacaaggtaattttaaaaatgtggtttctttgtttaaacagttactaagttggttcatctttcagtaacagacctcccctcccccagctccccactcagtcttgtatgatcacatcatcatcatcatcatcatcttcctcctcctcctcctcctcttcctcatcatcttctggcagttcttcctcctcctcttcctcttcttcatctagacaaactaccacctcagctggctgaggtaatcgagagtcaaaccaatccagcacctgctgggtgctaagccttgatgcctgactcaattgagggatatcagtttcccgtagctgttggtgggctgcccagtacctctccaagggttgtatatccggtgggggtggagggatcggcagaggtggtgtctcagccctttcgttcaaggagcgggttgatggtggtggtgtaggaattgctgggtcttggaaactaggggcaccaggtactgcgttgtcccgaaaccactttagttgcccatgcttcaaggcatagcgtgtgtcaccaaaccactgaatgatctcaggccgaggtaaaccagtgatctgttctaacttttggtaatcctcacgccgtgcccactggcactgtaaaaaaaaggatttaaggatagccagctgctctttggttttgcgcttggtctttcgctggcgttgcatatctggggaaaggtactctgtggggccaactctacctggtactgagttatgccgtagcccttggggccaggctggttccagatgtgggggtaatgcctgttcactgggtgacactgactgtgggacacagcctagtggctggaggggtttagaggcggcagtagctccattagccagtacctggaaagaagaagaggtagaggaagaagagggagtaacactagatgctgactcctccttacaactactggcaattaatgcaattggtgggggtttatcccgagcttgtggctgggggacggttgtggagtggttccaggaagcagtacctatgccatgtgactggttgggacccctgcctgcctgctcctttgagaggccactgctttgaagatgttgccaaaaatctgattggtaggggaatgctccactgccaggtgtcatcagggactcctttaatttctggtgactctgtggcagtggtggcatctgagagggctcctcaggctctaccttcaatcctttcgtctgggtaggcttgctaagagttggaggacctattccaataccaacttgctctggagctggcactggaggaggaggcacctcctctgggggccgtcccgcatgatgagtaaaagagagaagggatttgaaatggagttggtcccgacggtagactactcgggctcgagtctcttctatttcttcagatgaccagctaataccacagcggaggcgctgggccataaaccaagtcttgactttctccatctgcaacccataacgtaggcagagaagggcaatgtctgctaggctgggatagggaaagtagctgaaggttttgagcaggtgttcattgctgtctagctcactggtctgggctgcttgcgtccacacaagctgtagctcctcagagattggagggaggcagatgagccccgctggtgaactactgagaccgctggcctctttattaggaggcatggtgccttctgatttgtgcccttcagagatagcgcagtccagcccgggcggcggctcccagcctcgcaccatgggccggggggaagtgggggagagggcagggggcctccgagtgggagtggggttgctgcccggtgcggccgccc

SEQ ID NO: 378033 - DNA, 440 bp, Homo sapiens
gtcacacctccactttcctccccctacccccgctcttcctgctaccttctccctgagctctctccagttgcctcttcatctcccgcctcactgtgtccagaggtgacctcctcaaaagtaggaccgggcatgagtttgcaggagaagggctccttgacccaccactcctagcagccactgtcactaacaggtgctcaaggtcaaggtctcttgccctgcactgtggaaacctcctgggcaggggtcaagctgatgggggcccatgaatcctggcctagctattaccaggtgttgtcacagataaataaaggctattttttatgctgggtattttttctaacgtttgtatgtgaatctagagacgctcctacatgggggtggaaagtcccgtcccttgtggacagcagcccaagcccagccggggccttgcctcctaggtc

SEQ ID NO: 378034 - DNA, 529 bp, Homo sapiens
tggacagccaaggatggacagcacagaggaggtggacagcacagaggaggtggacagcacaggaggccgcggggcctgaaaggacgcagcctggtaccttcccctctccaggacactcgctgggggccctgtgcccttgccggcggcaggttgcagccaccgcggcccaatgtcaccttcactcacagtctgagttcttgtccgcctgtcacgccctcaccaccctccccttccagccaccaccctttccgttccgctcgggccttcccagaagcgtcctgtgactctgggagaggtgacacctcactaaggggccgaccccatggagtaacgcgcccggccccgatgcgaatcaggcctcccctacatctgggggcgttggccgcgagattcccattgacacctttgtttcgtgtgcttttaaattcaggttaaatgttgcaataatctgatgcagaagactcagcttctcaagggagagggagggggcggagcggaataaatagtaacttatttaagaaatgcactt

SEQ ID NO: 378035 - DNA, 1856 bp, Homo sapiens
cggcgccccacccccgcccgctgcaggaggtggagatggagacctatggggccggcacccccttgggctccgttgcctctgtgcactctccgcccgcagagtcctgtgcctccctccagatcccattggctgtgtcgtccccagccaggagcggcgagcccctccacgccctgtcccctcggggcacagcccgctcccccagtctcagccggctgctctgcagacaggaggctgtgcacaccgattccttggaagggaagattgacagccctagggacaccctggatcctgcagagcctggtgagaaaaccccggtgaggccggtgacccaggggggctccctgcagtccccaccacactccccacggcccgccagcgtccgcactcgtaagcataccttcggacagcgctgcgtctccagccggccggcggccccaggcggagaggaggccgaggcctcggacccagccgacgaggaggtcagccacatcaccagctccgcctgcccctggcagcccacagccgagccccatggccccgaagcctctccggtggccggcggcgagcgggacctgcgcaggctctacagcgtggacgctcagggcttcctggacaagccgggccgggcagacgagcagtggcggccctcggcggagctgggcagcggggagcctggggaggcgaaggcctggggccctgaggccgagcccgctctgggtgcgcgcagaaagaagaagatgagccccccctgcatctcggtggaaccccctgcggaggacgagggctctgcgcggccctccgcggcagagggcggcagcaccacactgaggcgcaggaccccgtcctgtgaggccacgcctcacagggactccctggagcccacagagggctcaggcgccgggggggaccctgcagccaagggggagcgctggggccaggcctcctgccgggctgagcacctgaccgtccccagctttgcctttgagccgctggacctcggggtccccagtggagaccctttcttggacggtagccacagtgtgaccccagaatccagagcttcctcttcaggggccatagtgcccctggaacccccagaatcagagcctcccatgcccgtcggtgaccccccagagaagaggcgggggctgtacctcacagtcccccagtgtcctctggagaaaccagggtccccctcagccacccctgccccagggggtggtgcagatgaccccgtgtagctcggggcttggtgccgcccacggctttggccctggggtctgggggccccgctggggtggaggcccaggcagaaccctgcatggaccctgacttgggtcctgtcgtgagcagaaaggcccggggaggatgacggcccaggccctggttctctgcccagcgaagcaggagtagctgccgggccccacgagcctccatccgttctggttcgggtttctccgagttttgctaccagccgaggctgtgcgggcaactgggtcagcctcccgtcaggagagaagccgcgtctgtgggacgaagaccgggcacccgccagagaggggaaggtaccaggttgcgtcctttcaggccccgcgttgttacgtcctgtgactctgggagaggtgacacctcactaaggggccgaccccatggagtaacgcgcccggccccgatgcgaatcaggcctcccctacatctgggggcgttggccgcgagattcccattgacacctttgtttcgtgtgcttttaaattcaggttaaatgttgcaataatctgatgcagaagactcagcttctcaagggagagggagggggcggagcggaataaatagtaacttatttaagaaatgcactt

SEQ ID NO: 378036 - DNA, 2022 bp, Homo sapiens
cggcgccccacccccgcccgctgcaggaggtggagatggagacctatggggccggcacccccttgggctccgttgcctctgtgcactctccgcccgcagagtcctgtgcctccctccagatcccattggctgtgtcgtccccagccaggagcggcgagcccctccacgccctgtcccctcggggcacagcccgctcccccagtctcagccggctgctctgcagacaggaggctgtgcacaccgattccttggaagggaagattgacagccctagggacaccctggatcctgcagagcctggtgagaaaaccccggtgaggccggtgacccaggggggctccctgcagtccccaccacactccccacggcccgccagcgtccgcactcgtaagcataccttcggacagcgctgcgtctccagccggccggcggccccaggcggagaggaggccgaggcctcggacccagccgacgaggaggtcagccacatcaccagctccgcctgcccctggcagcccacagccgagccccatggccccgaagcctctccggtggccggcggcgagcgggacctgcgcaggctctacagcgtggacgctcagggcttcctggacaagccgggccgggcagacgagcagtggcggccctcggcggagctgggcagcggggagcctggggaggcgaaggcctggggccctgaggccgagcccgctctgggtgcgcgcagaaagaagaagatgagccccccctgcatctcggtggaaccccctgcggaggacgagggctctgcgcggccctccgcggcagagggcggcagcaccacactgaggcgcaggaccccgtcctgtgaggccacgcctcacagggactccctggagcccacagagggctcaggcgccgggggggaccctgcagccaagggggagcgctggggccaggcctcctgccgggctgagcacctgaccgtccccagctttgcctttgagccgctggacctcggggtccccagtggagaccctttcttggacggtagccacagtgtgaccccagaatccagagcttcctcttcaggggccatagtgcccctggaacccccagaatcagagcctcccatgcccgtcggtgaccccccagagaagaggcgggggctgtacctcacagtcccccagtgtcctctggagaaaccagggtccccctcagccacccctgccccagggggtggtgcagatgaccccgtgtagctcggggcttggtgccgcccacggctttggccctggggtctgggggccccgctggggtggaggcccaggcagaaccctgcatggaccctgacttgggtcctgtcgtgagcagaaaggcccggggaggatgacggcccaggccctggttctctgcccagcgaagcaggagtagctgccgggccccacgagcctccatccgttctggttcgggtttctccgagttttgctaccagccgaggctgtgcgggcaactgggtcagcctcccgtcaggagagaagccgcgtctgtgggacgaagaccgggcacccgccagagaggggaaggtaccaggttgcgtcctttcaggccccgcgttgttacaggacactcgctgggggccctgtgcccttgccggcggcaggttgcagccaccgcggcccaatgtcaccttcactcacagtctgagttcttgtccgcctgtcacgccctcaccaccctccccttccagccaccaccctttccgttccgctcgggccttcccagaagcgtcctgtgactctgggagaggtgacacctcactaaggggccgaccccatggagtaacgcgcccggccccgatgcgaatcaggcctcccctacatctgggggcgttggccgcgagattcccattgacacctttgtttcgtgtgcttttaaattcaggttaaatgttgcaataatctgatgcagaagactcagcttctcaagggagagggagggggcggagcggaataaatagtaacttatttaagaaatgcactt

SEQ ID NO: 378037 - DNA, 336 bp, Homo sapiens
tctcgcccctgtaacttatacgccacccagctcagttttgtcacttttctagccaaagcaagaccagtaggaaagcaaacccttgactctggcaggatttgcaggcagcaggcagcacccctctgccagccgggctccggctgcagaagtgctgttggcttggatgctgtgtgcctgtcaagattccctccggttttctggctagaaagctcacccgtttccggttttaagagtcagttcagtggcagagccaccagggacaagtgaggctcttgggggtggtttgaccctgcttacctgggagcacacttttcccttccccgatgacctgggatg

SEQ ID NO: 378038 - DNA, 465 bp, Homo sapiens
gaaaccctatctctactaaaattacaaaattagctgggcgtggtggcacatgcctgtaatcccaactactgcggaggctgaggcaggagaatctcttgaacccaggaggcagatgttgcagtgagccgagaccacaccattgcactccagcctgggcaacaagaacaaaactccttttccaaaaaaaaatcatggcagttcctattctttccttccttttgaactaccgagatcagctagaacccttgaacttcaagtgcaagttaagaggcatctctgtaaaacacaaagataaacatacttgacaaggctgcatcggctctcactctttggttgctctttctcttctatacttagttccttttctcactcccttttgtataaactaatattccacgggaatcttcccaggatggttttgagaagtgtttgatgacttacgcagtgaaatcctgtgagacccca

SEQ ID NO: 378039 - DNA, 607 bp, Homo sapiens
cccaagtagctggggctatagtcacaggccaccacacctggctgatttttcaattttttgtagaaacggggtcttgtacgttgcctgggctggtcttgaactgttggtctcaagtgatccttccaccttggtctcccaaagcactgggattacagatgtcagccaccgggcctacctaagaaaaatatttaaatttaatatcagtatctgtggggaattggttccaggaccccctgaggataccaaaatccatggatgctcaagttccttatataacatggtatagtatttgcatataacctatacgcatcttcccacaaacttttaatcctctctagattatttatgatacctaatacgatgtaaatgctatgtaaatagttgttatatggtattgtttagggaacaatgccaaggaaaaaagtctacatgttcagtagagacacaacttttcattttctttcctgaatatttttgatacgcggttggttgaatccactatgcagaacccacagatctggaggacctactataatttaatttaattctaagcttataatatgactcgatggaggagctttttgcctagagcttggcttgtgagggg

SEQ ID NO: 378040 - DNA, 5497 bp, Homo sapiens
agaagaggacaggaaagaaacttcagtctgagggttgaggacacgtcccggagcagaggaggaccaagctcccaagccccctgtcaccttgacacgcagacggttccccaggactgcgaagaggggggcaaccagcgccccgccccgccccgctgcgccgcccgccattggccggtccgaaagacgcggggcgttgtcggtttgaatgagagcgcctggagccggggcgcaggcgcagaggagggcggtgttgagaccggcggagcggcgggacccctaggtggcggagggacgctccgggaaagcgaggggcgctacgagctctggcccacgtgacctgccgggggcgggagcagggggcgcgccggcctcctgcggtgcccctgccttggggaggggccgtgaccacccgtctgtcgcccgaggcggccgccgctgcaccttcaccgcgtacccgggacccgcccgcccgcgggagaaatgttgctgaagtgctgctgaaagggccagagatgcaaggatttgggatacattttgaacctttaagctgtctgacattgacctcctttcattattaataaagaagaatcaggagcttaggatgtattaacaccaactcattaatatactaaccggacaatgttctacaaacaattctacattgtaaaggactggattggcacaaaataaaataattttattttattcagcttataatatgactcgatggaggaaaatttgataagcatgagagaagaccattcttttcatgttcgttacagaatggaagcttcttgcctagagctggccttggaaggggaacgtctatgtaaatcaggagactgccgcgctggcgtgtcattctttgaagctgcagttcaagttggaactgaagacctaaaaacacttagcgctatttacagccagttgggcaatgcttatttctatttgcatgattatgccaaagcattagaatatcaccatcatgatttaacccttgcaaggactattggagaccagctgggggaagcgaaagctagtggtaatctgggaaacaccttaaaagttcttgggaattttgacgaagccatagtttgttgtcagcgacacctagatatttccagagagcttaatgacaaggtgggagaagcaagagcactttacaatcttgggaatgtgtatcatgccaaagggaaaagttttggttgccctggtccccaggatgtaggagaatttccagaagaagtgagagatgctctgcaggcagccgtggatttttatgaggaaaacctatcattagtgactgctttgggtgaccgagcggcacaaggacgtgcctttggaaatcttggaaacacacattacctccttggcaacttcagggatgcagttatagctcatgagcagcgtctccttattgcaaaagaatttggagataaagcagctgaaagaagagcatatagcaaccttggaaatgcatatatatttcttggtgaatttgaaactgcctcggaatactacaagaagacactactgttggcccgacagcttaaagaccgagctgtagaagcacagtcttgttacagtcttggaaatacatatactttacttcaagactatgaaaaggccattgattatcatctgaagcacttagcaattgctcaagagctgaatgatagaattggtgaaggaagagcatgttggagcttaggaaatgcatacacagcactaggaaatcatgatcaagcaatgcattttgctgaaaagcacttggaaatttcaagagaggttggggataaaagtggtgaactaacagcacgacttaatctctcagaccttcaaatggttcttggtctgagctacagcacaaataactccataatgtctgaaaatactgaaattgatagcagtttgaatggtgtacgccccaagttgggacgccggcatagtatggaaaatatggaacttatgaagttaacaccagaaaaggtacagaactggaacagtgaaattcttgctaagcaaaaacctcttattgccaaaccttctgcaaagctactctttgtcaacagactgaaggggaaaaaatacaaaacgaattcctccactaaagttctccaagatgccagtaattctattgaccaccgaattccaaattctcagaggaaaatcagtgcagatactattggagatgaagggttctttgacttattaagccgatttcaaagcaataggatggatgatcagagatgttgcttacaagaaaagaactgccatacagcttcaacaacaacttcttccactccccctaaaatgatgctaaaaacatcatctgttcctgtggtatcccccaacacggatgagtttttagatcttcttgccagctcacagagtcgccgtctggatgaccagagggctagtttcagtaatttgccagggcttcgtctaacacaaaacagccagtcggtacttagccacctgatgactaatgacaacaaagaggctgatgaagatttctttgacatccttgtaaaatgtcaaggatccagattagatgatcaaagatgtgctccaccacctgctaccacaaagggtccgacagtaccagatgaagactttttcagccttattttacggtcccagggaaagagaatggatgaacagagagttcttttacaaagagatcaaaacagagacactgactttgggctaaaggactttttgcaaaataatgctttgttggagtttaaaaattcagggaaaaaatcggcagaccattagttactatggatttattttttttcctttcaaacacggtaaggaaacaatctattacttttttccttaaaaggagaatttatagcactgtaatacagcttaaaatatttttagaatgatgtaaatagttaaccttcagtagtctattaaggcattaatacttctctggacatgcgcgtttgagggtggaggggtcctgtaaggtgcttcatcgtctgtgattactgcttgggatgtgttctttggcagcttgtgagattactttacctagtgtttataaagtaggaagttaagtgaatcatagattagaatttaatactcttatggaaataattttttaacatcttaattgacaatggcgtttttttatacataaccatggatgtagtgggaaacaatgttgtttggtaaaaataatgtacttgatcaatgtaaaaaagtatataaaatagtcttactaaaaatctaggtttttttttcctccatgaaaatctgtttttttaggccaaagtcagtataaaagaaactctacttcttgggctgggcatggtggctcattcctgtaatcccagcacattgggaggctgaggcaggaggatcgcttgaggctaggagttcaagaccaacctgggcaacatagacccccgtgtctatgaaaaataaatcagcagccaggcgcagtggctcacacctgtaatcccagcactttgggaggccgaagcgggcggatcacttgaggtcgggagtttgagaccagcctggccaacatagtgaaaccctgtctctactaaaaatacaaaaattagctgggcatggtggcatgcgcctgtagtttcagctacttgggaggctgaggcaggagaatcacttgaacccctgggaggcagagattgcagtgagctgagaccaagccactggactccagcctgagtgacagagcaagactctgtctcaaaaaaaaaaaaacagcaagcatgctggcacacacctgtagtcccaactgcttaagaggctgaggcaggaggaccacttgagcccaggaggtggaggctgcactgagctatgatcgtgccactgcactccagcctgggtgacagagcaagaccctgtctctagaaaacaagtatcttttgtgtgttttgggctgtttaaaaaaattatttaaaatggtctcttctgttccataatactgctgtaaaacaaacttttctaagttctaatataaaaacaaaaaacaaaacccatgtggttaggtcaagaacctaggacacataaacaaacagaaaacagatgaaaactcacaaaaattaaatatgaaagaaagatgtcagctagaaccttagttgtcattaagctttgtcttccttatcccagatattgaaggcagtttacaaggggatgataacaaagtaactaactaactgtagcaaaagacaagtatgggacagactgggacctggagtaacactggatcacagactgcaaaggcccacgcttggaacaagttgccaacttgtttcactctgcttgcttcagactgtgcacagctgggatgggatctggggatgtggacccctattctttcaaaaagtcattcaggtgatttggatgggcaaatagaactatttctctaatggccaatgttttttaagagtcataacctggaattaattacattaagtgctcagctaaaaaaaaaaaaaaagttctaaattacaacctggattacattatgtttcatgtatactataaggtatgatgtcctggatagcattttaaaaactcaggtaagtttcatggggttcttataagaaaattcagttaagacaatataccaaaccacaacgtaaaaagtttgtgtatacaaactttttgtattatttgtacacaaagtacaaatttgtatttgtacacaaagtacaaactttgtgtattattttgtgtatacaatagttcttacagcctgtaaacattcaacattattccatttaaacattgtttttaacagctgtctaccctgttctgattttcctaaaagcttcacactatataggctgggcacaatggctcatgcctgtaatcccagcactttgggaggccgacaagggcgggtcacttgaggtcaggagttcgagaccagcctgaccaacatggtgaaaccccatcgacgcgtgggtcgacccacgcgtccgaaaggactttttgcaaaataatgcttagttggagtttaaaaattcaggcaaaaaatcggcagaccattagttactatggatttattttttttcctttcaaacacggtaaggaaacaatctattacttttttccttaaaaggagaatttatagcactgtaatacagcttaaaatatttttagaatgatgtaaatagttaaccttcagtagtctattaaggcattaatacttctctggacatgcgcgtttgagggtggaggggtcctgtaaggtgcttcatcgtctgtgattactgcttgggatgtgttctttggcagcttgtgagattactttacctagtgtttataaagtaggaagttaagtgaatcatagattagaatttaatactcttatggaaataattttttaacatcttaattgacaatggcgtttttttatacataaccatggatgtagtgggaaacaatgttgtttggtaaaaataatgtacttgatcaatgtcaacaaagtatataaaatagtcttatt

SEQ ID NO: 378041 - DNA, 4127 bp, Homo sapiens
agaagaggacaggaaagaaacttcagtctgagggttgaggacacgtcccggagcagaggaggaccaagctcccaagccccctgtcaccttgacacgcagacggttccccaggactgcgaagaggggggcaaccagcgccccgccccgccccgctgcgccgcccgccattggccggtccgaaagacgcggggcgttgtcggtttgaatgagagcgcctggagccggggcgcaggcgcagaggagggcggtgttgagaccggcggagcggcgggacccctaggtggcggagggacgctccgggaaagcgaggggcgctacgagctctggcccacgtgacctgccgggggcgggagcagggggcgcgccggcctcctgcggtgcccctgccttggggaggggccgtgaccacccgtctgtcgcccgaggcggccgccgctgcaccttcaccgcgtacccgggacccgcccgcccgcgggagaaatgttgctgaagtgctgctgaaagggccagagatgcaaggatttgggatacattttgaacctttaagctgtctgacattgacctcctttcattattaataaagaagaatcaggagcttaggatgtattaacaccaactcattaatatactaaccggacaatgttctacaaacaattctacattgtaaaggactggattggcacaaaataaaataattttattttattcagcttataatatgactcgatggaggaaaatttgataagcatgagagaagaccattcttttcatgttcgttacagaatggaagcttcttgcctagagctggccttggaaggggaacgtctatgtaaatcaggagactgccgcgctggcgtgtcattctttgaagctgcagttcaagttggaactgaagacctaaaaacacttagcgctatttacagccagttgggcaatgcttatttctatttgcatgattatgccaaagcattagaatatcaccatcatgatttaacccttgcaaggactattggagaccagctgggggaagcgaaagctagtggtaatctgggaaacaccttaaaagttcttgggaattttgacgaagccatagtttgttgtcagcgacacctagatatttccagagagcttaatgacaaggtgggagaagcaagagcactttacaatcttgggaatgtgtatcatgccaaagggaaaagttttggttgccctggtccccaggatgtaggagaatttccagaagaagtgagagatgctctgcaggcagccgtggatttttatgaggaaaacctatcattagtgactgctttgggtgaccgagcggcacaaggacgtgcctttggaaatcttggaaacacacattacctccttggcaacttcagggatgcagttatagctcatgagcagcgtctccttattgcaaaagaatttggagataaagcagctgaaagaagagcatatagcaaccttggaaatgcatatatatttcttggtgaatttgaaactgcctcggaatactacaagaagacactactgttggcccgacagcttaaagaccgagctgtagaagcacagtcttgttacagtcttggaaatacatatactttacttcaagactatgaaaaggccattgattatcatctgaagcacttagcaattgctcaagagctgaatgatagaattggtgaaggaagagcatgttggagcttaggaaatgcatacacagcactaggaaatcatgatcaagcaatgcattttgctgaaaagcacttggaaatttcaagagaggttggggataaaagtggtgaactaacagcacgacttaatctctcagaccttcaaatggttcttggtctgagctacagcacaaataactccataatgtctgaaaatactgaaattgatagcagtttgaatggtgtacgccccaagttgggacgccggcatagtatggaaaatatggaacttatgaagttaacaccagaaaaggtacagaactggaacagtgaaattcttgctaagcaaaaacctcttattgccaaaccttctgcaaagctactctttgtcaacagactgaaggggaaaaaatacaaaacgaattcctccactaaagttctccaagatgccagtaattctattgaccaccgaattccaaattctcagaggaaaatcagtgcagatactattggagatgaagggttctttgacttattaagccgatttcaaagcaataggatggatgatcagagatgttgcttacaagaaaagaactgccatacagcttcaacaacaacttcttccactccccctaaaatgatgctaaaaacatcatctgttcctgtggtatcccccaacacggatgagtttttagatcttcttgccagctcacagagtcgccgtctggatgaccagagggctagtttcagtaatttgccagggcttcgtctaacacaaaacagccagtcggtacttagccacctgatgactaatgacaacaaagaggctgatgaagatttctttgacatccttgtaaaatgtcaaggatccagattagatgatcaaagatgtgctccaccacctgctaccacaaagggtccgacagtaccagatgaagactttttcagccttattttacggtcccagggaaagagaatggatgaacagagagttcttttacaaagagatcaaaacagagacactgactttgggctaaaggactttttgcaaaataatgctttgttggagtttaaaaattcagggaaaaaatcggcagaccattagttactatggatttattttttttcctttcaaacacggtaaggaaacaatctattacttttttccttaaaaggagaatttatagcactgtaatacagcttaaaatatttttagaatgatgtaaatagttaaccttcagtagtctattaaggcattaatacttctctggacatgcgcgtttgagggtggaggggtcctgtaaggtgcttcatcgtctgtgattactgcttgggatgtgttctttggcagcttgtgagattactttacctagtgtttataaagtaggaagttaagtgaatcatagattagaatttaatactcttatggaaataattttttaacatcttaattgacaatggcgtttttttatacataaccatggatgtagtgggaaacaatgttgtttggtaaaaataatgtacttgatcaatgtaaaaaagtatataaaatagtcttactaaaaatctaggtttttttttcctccatgaaaatctgtttttttaggccaaagtcagtataaaagaaactctacttcttgggctgggcatggtggctcattcctgtaatcccagcacattgggaggctgaggcaggaggatcgcttgaggctaggagttcaagaccaacctgggcaacatagacccccgtgtctatgaaaaataaatcagcagccaggcgcagtggctcacacctgtaatcccagcactttgggaggccgaagcgggcggatcacttgaggtcgggagtttgagaccagcctggccaacatagtgaaaccctgtctctactaaaaatacaaaaattagctgggcatggtggcatgcgcctgtagtttcagctacttgggaggctgaggcaggagaatcacttgaacccctgggaggcagagattgcagtgagctgagaccaagccactggactccagcctgagtgacagagcaagactctgtctcaaaaaaaaaaaaacagcaagcatgctggcacacacctgtagtcccaactgcttaagaggctgaggcaggaggaccacttgagcccaggaggtggaggctgcactgagctatgatcgtgccactgcactccagcctgggtgacagagcaagaccctgtctctagaaaacaagtatcttttgtgtgttttgggctgtttaaaaaaattatttaaaatggtctcttctgttccataatactgctgtaaaacaaacttttctaagttctaatataaaaacaaaaaacaaaacccatgtggttaggtcaagaacctaggacacataaacaaacagaaaacagatcctcggccgattcaccaccagcctcgcacctagcctacggtggctttctcctcccca

SEQ ID NO: 378042 - DNA, 3238 bp, Homo sapiens
agaagaggacaggaaagaaacttcagtctgagggttgaggacacgtcccggagcagaggaggaccaagctcccaagccccctgtcaccttgacacgcagacggttccccaggactgcgaagaggggggcaaccagcgccccgccccgccccgctgcgccgcccgccattggccggtccgaaagacgcggggcgttgtcggtttgaatgagagcgcctggagccggggcgcaggcgcagaggagggcggtgttgagaccggcggagcggcgggacccctaggtggcggagggacgctccgggaaagcgaggggcgctacgagctctggcccacgtgacctgccgggggcgggagcagggggcgcgccggcctcctgcggtgcccctgccttggggaggggccgtgaccacccgtctgtcgcccgaggcggccgccgctgcaccttcaccgcgtacccgggacccgcccgcccgcgggagaaatgttgctgaagtgctgctgaaagggccagagatgcaaggatttgggatacattttgaacctttaagctgtctgacattgacctcctttcattattaataaagaagaatcaggagcttaggatgtattaacaccaactcattaatatactaaccggacaatgttctacaaacaattctacattgtaaaggactggattggcacaaaataaaataattttattttattcagcttataatatgactcgatggaggaaaatttgataagcatgagagaagaccattcttttcatgttcgttacagaatggaagcttcttgcctagagctggccttggaaggggaacgtctatgtaaatcaggagactgccgcgctggcgtgtcattctttgaagctgcagttcaagttggaactgaagacctaaaaacacttagcgctatttacagccagttgggcaatgcttatttctatttgcatgattatgccaaagcattagaatatcaccatcatgatttaacccttgcaaggactattggagaccagctgggggaagcgaaagctagtggtaatctgggaaacaccttaaaagttcttgggaattttgacgaagccatagtttgttgtcagcgacacctagatatttccagagagcttaatgacaaggtgggagaagcaagagcactttacaatcttgggaatgtgtatcatgccaaagggaaaagttttggttgccctggtccccaggatgtaggagaatttccagaagaagtgagagatgctctgcaggcagccgtggatttttatgaggaaaacctatcattagtgactgctttgggtgaccgagcggcacaaggacgtgcctttggaaatcttggaaacacacattacctccttggcaacttcagggatgcagttatagctcatgagcagcgtctccttattgcaaaagaatttggagataaagcagctgaaagaagagcatatagcaaccttggaaatgcatatatatttcttggtgaatttgaaactgcctcggaatactacaagaagacactactgttggcccgacagcttaaagaccgagctgtagaagcacagtcttgttacagtcttggaaatacatatactttacttcaagactatgaaaaggccattgattatcatctgaagcacttagcaattgctcaagagctgaatgatagaattggtgaaggaagagcatgttggagcttaggaaatgcatacacagcactaggaaatcatgatcaagcaatgcattttgctgaaaagcacttggaaatttcaagagaggttggggataaaagtggtgaactaacagcacgacttaatctctcagaccttcaaatggttcttggtctgagctacagcacaaataactccataatgtctgaaaatactgaaattgatagcagtttgaatggtgtacgccccaagttgggacgccggcatagtatggaaaatatggaacttatgaagttaacaccagaaaaggtacagaactggaacagtgaaattcttgctaagcaaaaacctcttattgccaaaccttctgcaaagctactctttgtcaacagactgaaggggaaaaaatacaaaacgaattcctccactaaagttctccaagatgccagtaattctattgaccaccgaattccaaattctcagaggaaaatcagtgcagatactattggagatgaagggttctttgacttattaagccgatttcaaagcaataggatggatgatcagagatgttgcttacaagaaaagaactgccatacagcttcaacaacaacttcttccactccccctaaaatgatgctaaaaacatcatctgttcctgtggtatcccccaacacggatgagtttttagatcttcttgccagctcacagagtcgccgtctggatgaccagagggctagtttcagtaatttgccagggcttcgtctaacacaaaacagccagtcggtacttagccacctgatgactaatgacaacaaagaggctgatgaagatttctttgacatccttgtaaaatgtcaaggatccagattagatgatcaaagatgtgctccaccacctgctaccacaaagggtccgacagtaccagatgaagactttttcagccttattttacggtcccagggaaagagaatggatgaacagagagttcttttacaaagagatcaaaacagagacactgactttgggctaaaggactttttgcaaaataatgctttgttggagtttaaaaattcagggaaaaaatcggcagaccattagttactatggatttattttttttcctttcaaacacggtaaggaaacaatctattacttttttccttaaaaggagaatttatagcactgtaatacagcttaaaatatttttagaatgatgtaaatagttaaccttcagtagtctattaaggcattaatacttctctggacatgcgcgtttgagggtggaggggtcctgtaaggtgcttcatcgtctgtgattactgcttgggatgtgttctttggcagcttgtgagattactttacctagtgtttataaagtaggaagttaagtgaatcatagattagaatttaatactcttatggaaataattttttaacatcttaattgacaatggcgtttttttatacataaccatggatgtagtgggaaacaatgttgtttggtaaaaataatgtacttgatcaatgtaaaaaagtatataaaatagtcttacta

SEQ ID NO: 378043 - DNA, 3461 bp, Homo sapiens
agaagaggacaggaaagaaacttcagtctgagggttgaggacacgtcccggagcagaggaggaccaagctcccaagccccctgtcaccttgacacgcagacggttccccaggactgcgaagaggggggcaaccagcgccccgccccgccccgctgcgccgcccgccattggccggtccgaaagacgcggggcgttgtcggtttgaatgagagcgcctggagccggggcgcaggcgcagaggagggcggtgttgagaccggcggagcggcgggacccctaggtggcggagggacgctccgggaaagcgaggggcgctacgagctctggcccacgtgacctgccgggggcgggagcagggggcgcgccggcctcctgcggtgcccctgccttggggaggggccgtgaccacccgtctgtcgcccgaggcggccgccgctgcaccttcaccgcgtacccgggacccgcccgcccgcgggagaaatgttgctgaagtgctgctgaaagggccagagatgcaaggatttgggatacattttgaacctttaagctgtctgacattgacctcctttcattattaataaagaagaatcaggagcttaggatgtattaacaccaactcattaatatactaaccggacaatgttctacaaacaattctacattgtaaaggactggattggcacaaaataaaataattttattttattcagcttataatatgactcgatggaggaaaatttgataagcatgagagaagaccattcttttcatgttcgttacagaatggaagcttcttgcctagagctggccttggaaggggaacgtctatgtaaatcaggagactgccgcgctggcgtgtcattctttgaagctgcagttcaagttggaactgaagacctaaaaacacttagcgctatttacagccagttgggcaatgcttatttctatttgcatgattatgccaaagcattagaatatcaccatcatgatttaacccttgcaaggactattggagaccagctgggggaagcgaaagctagtggtaatctgggaaacaccttaaaagttcttgggaattttgacgaagccatagtttgttgtcagcgacacctagatatttccagagagcttaatgacaaggtgggagaagcaagagcactttacaatcttgggaatgtgtatcatgccaaagggaaaagttttggttgccctggtccccaggatgtaggagaatttccagaagaagtgagagatgctctgcaggcagccgtggatttttatgaggaaaacctatcattagtgactgctttgggtgaccgagcggcacaaggacgtgcctttggaaatcttggaaacacacattacctccttggcaacttcagggatgcagttatagctcatgagcagcgtctccttattgcaaaagaatttggagataaagcagctgaaagaagagcatatagcaaccttggaaatgcatatatatttcttggtgaatttgaaactgcctcggaatactacaagaagacactactgttggcccgacagcttaaagaccgagctgtagaagcacagtcttgttacagtcttggaaatacatatactttacttcaagactatgaaaaggccattgattatcatctgaagcacttagcaattgctcaagagctgaatgatagaattggtgaaggaagagcatgttggagcttaggaaatgcatacacagcactaggaaatcatgatcaagcaatgcattttgctgaaaagcacttggaaatttcaagagaggttggggataaaagtggtgaactaacagcacgacttaatctctcagaccttcaaatggttcttggtctgagctacagcacaaataactccataatgtctgaaaatactgaaattgatagcagtttgaatggtgtacgccccaagttgggacgccggcatagtatggaaaatatggaacttatgaagttaacaccagaaaaggtacagaactggaacagtgaaattcttgctaagcaaaaacctcttattgccaaaccttctgcaaagctactctttgtcaacagactgaaggggaaaaaatacaaaacgaattcctccactaaagttctccaagatgccagtaattctattgaccaccgaattccaaattctcagaggaaaatcagtgcagatactattggagatgaagggttctttgacttattaagccgatttcaaagcaataggatggatgatcagagatgttgcttacaagaaaagaactgccatacagcttcaacaacaacttcttccactccccctaaaatgatgctaaaaacatcatctgttcctgtggtatcccccaacacggatgagtttttagatcttcttgccagctcacagagtcgccgtctggatgaccagagggctagtttcagtaatttgccagggcttcgtctaacacaaaacagccagtcggtacttagccacctgatgactaatgacaacaaagaggctgatgaagatttctttgacatccttgtaaaatgtcaaggatccagattagatgatcaaagatgtgctccaccacctgctaccacaaagggtccgacagtaccagatgaagactttttcagccttattttacggtcccagggaaagagaatggatgaacagagagttcttttacaaagagatcaaaacagagacactgactttgggctaaaggactttttgcaaaataatgctttgttggagtttaaaaattcagggaaaaaatcggcagaccattagttactatggatttattttttttcctttcaaacacggtaaggaaacaatctattacttttttccttaaaaggagaatttatagcactgtaatacagcttaaaatatttttagaatgatgtaaatagttaaccttcagtagtctattaaggcattaatacttctctggacatgcgcgtttgagggtggaggggtcctgtaaggtgcttcatcgtctgtgattactgcttgggatgtgttctttggcagcttgtgagattactttacctcttatataaatacatccaattccatcccaaactgaacagaaagctgatgattaaaacacgtctcaactgagtgtaccaacgtacatatgtccacagctcagtagccactaaaaccacgatgcagagcagacaaagaagtaccttaaaacagagagaagcagaaatcagccaccaaaaacacttaagacagctaaaaagaactggactcaaaagcacaaaatcatttctacaattttgtggcttgttcatcaatacggtataagtgacctagtacaggttcttaacgtaattatggtggagtttggaaagtattttaaaaaggaaacttaatgacgttgcccttgccctcatcccatcttaccattaacacattatatggatccactccaaaggaatcttcgaatcgccacttcc

SEQ ID NO: 378044 - DNA, 5193 bp, Homo sapiens
agaagaggacaggaaagaaacttcagtctgagggttgaggacacgtcccggagcagaggaggaccaagctcccaagccccctgtcaccttgacacgcagacggttccccaggactgcgaagaggggggcaaccagcgccccgccccgccccgctgcgccgcccgccattggccggtccgaaagacgcggggcgttgtcggtttgaatgagagcgcctggagccggggcgcaggcgcagaggagggcggtgttgagaccggcggagcggcgggacccctaggtggcggagggacgctccgggaaagcgaggggcgctacgagctctggcccacgtgacctgccgggggcgggagcagggggcgcgccggcctcctgcggtgcccctgccttggggaggggccgtgaccacccgtctgtcgcccgaggcggccgccgctgcaccttcaccgcgtacccgggacccgcccgcccgcgggagaatggaagcttcttgcctagagctggccttggaaggggaacgtctatgtaaatcaggagactgccgcgctggcgtgtcattctttgaagctgcagttcaagttggaactgaagacctaaaaacacttagcgctatttacagccagttgggcaatgcttatttctatttgcatgattatgccaaagcattagaatatcaccatcatgatttaacccttgcaaggactattggagaccagctgggggaagcgaaagctagtggtaatctgggaaacaccttaaaagttcttgggaattttgacgaagccatagtttgttgtcagcgacacctagatatttccagagagcttaatgacaaggtgggagaagcaagagcactttacaatcttgggaatgtgtatcatgccaaagggaaaagttttggttgccctggtccccaggatgtaggagaatttccagaagaagtgagagatgctctgcaggcagccgtggatttttatgaggaaaacctatcattagtgactgctttgggtgaccgagcggcacaaggacgtgcctttggaaatcttggaaacacacattacctccttggcaacttcagggatgcagttatagctcatgagcagcgtctccttattgcaaaagaatttggagataaagcagctgaaagaagagcatatagcaaccttggaaatgcatatatatttcttggtgaatttgaaactgcctcggaatactacaagaagacactactgttggcccgacagcttaaagaccgagctgtagaagcacagtcttgttacagtcttggaaatacatatactttacttcaagactatgaaaaggccattgattatcatctgaagcacttagcaattgctcaagagctgaatgatagaattggtgaaggaagagcatgttggagcttaggaaatgcatacacagcactaggaaatcatgatcaagcaatgcattttgctgaaaagcacttggaaatttcaagagaggttggggataaaagtggtgaactaacagcacgacttaatctctcagaccttcaaatggttcttggtctgagctacagcacaaataactccataatgtctgaaaatactgaaattgatagcagtttgaatggtgtacgccccaagttgggacgccggcatagtatggaaaatatggaacttatgaagttaacaccagaaaaggtacagaactggaacagtgaaattcttgctaagcaaaaacctcttattgccaaaccttctgcaaagctactctttgtcaacagactgaaggggaaaaaatacaaaacgaattcctccactaaagttctccaagatgccagtaattctattgaccaccgaattccaaattctcagaggaaaatcagtgcagatactattggagatgaagggttctttgacttattaagccgatttcaaagcaataggatggatgatcagagatgttgcttacaagaaaagaactgccatacagcttcaacaacaacttcttccactccccctaaaatgatgctaaaaacatcatctgttcctgtggtatcccccaacacggatgagtttttagatcttcttgccagctcacagagtcgccgtctggatgaccagagggctagtttcagtaatttgccagggcttcgtctaacacaaaacagccagtcggtacttagccacctgatgactaatgacaacaaagaggctgatgaagatttctttgacatccttgtaaaatgtcaaggatccagattagatgatcaaagatgtgctccaccacctgctaccacaaagggtccgacagtaccagatgaagactttttcagccttattttacggtcccagggaaagagaatggatgaacagagagttcttttacaaagagatcaaaacagagacactgactttgggctaaaggactttttgcaaaataatgctttgttggagtttaaaaattcagggaaaaaatcggcagaccattagttactatggatttattttttttcctttcaaacacggtaaggaaacaatctattacttttttccttaaaaggagaatttatagcactgtaatacagcttaaaatatttttagaatgatgtaaatagttaaccttcagtagtctattaaggcattaatacttctctggacatgcgcgtttgagggtggaggggtcctgtaaggtgcttcatcgtctgtgattactgcttgggatgtgttctttggcagcttgtgagattactttacctagtgtttataaagtaggaagttaagtgaatcatagattagaatttaatactcttatggaaataattttttaacatcttaattgacaatggcgtttttttatacataaccatggatgtagtgggaaacaatgttgtttggtaaaaataatgtacttgatcaatgtaaaaaagtatataaaatagtcttactaaaaatctaggtttttttttcctccatgaaaatctgtttttttaggccaaagtcagtataaaagaaactctacttcttgggctgggcatggtggctcattcctgtaatcccagcacattgggaggctgaggcaggaggatcgcttgaggctaggagttcaagaccaacctgggcaacatagacccccgtgtctatgaaaaataaatcagcagccaggcgcagtggctcacacctgtaatcccagcactttgggaggccgaagcgggcggatcacttgaggtcgggagtttgagaccagcctggccaacatagtgaaaccctgtctctactaaaaatacaaaaattagctgggcatggtggcatgcgcctgtagtttcagctacttgggaggctgaggcaggagaatcacttgaacccctgggaggcagagattgcagtgagctgagaccaagccactggactccagcctgagtgacagagcaagactctgtctcaaaaaaaaaaaaacagcaagcatgctggcacacacctgtagtcccaactgcttaagaggctgaggcaggaggaccacttgagcccaggaggtggaggctgcactgagctatgatcgtgccactgcactccagcctgggtgacagagcaagaccctgtctctagaaaacaagtatcttttgtgtgttttgggctgtttaaaaaaattatttaaaatggtctcttctgttccataatactgctgtaaaacaaacttttctaagttctaatataaaaacaaaaaacaaaacccatgtggttaggtcaagaacctaggacacataaacaaacagaaaacagatgaaaactcacaaaaattaaatatgaaagaaagatgtcagctagaaccttagttgtcattaagctttgtcttccttatcccagatattgaaggcagtttacaaggggatgataacaaagtaactaactaactgtagcaaaagacaagtatgggacagactgggacctggagtaacactggatcacagactgcaaaggcccacgcttggaacaagttgccaacttgtttcactctgcttgcttcagactgtgcacagctgggatgggatctggggatgtggacccctattctttcaaaaagtcattcaggtgatttggatgggcaaatagaactatttctctaatggccaatgttttttaagagtcataacctggaattaattacattaagtgctcagctaaaaaaaaaaaaaaagttctaaattacaacctggattacattatgtttcatgtatactataaggtatgatgtcctggatagcattttaaaaactcaggtaagtttcatggggttcttataagaaaattcagttaagacaatataccaaaccacaacgtaaaaagtttgtgtatacaaactttttgtattatttgtacacaaagtacaaatttgtatttgtacacaaagtacaaactttgtgtattattttgtgtatacaatagttcttacagcctgtaaacattcaacattattccatttaaacattgtttttaacagctgtctaccctgttctgattttcctaaaagcttcacactatataggctgggcacaatggctcatgcctgtaatcccagcactttgggaggccgacaagggcgggtcacttgaggtcaggagttcgagaccagcctgaccaacatggtgaaaccccatcgacgcgtgggtcgacccacgcgtccgaaaggactttttgcaaaataatgcttagttggagtttaaaaattcaggcaaaaaatcggcagaccattagttactatggatttattttttttcctttcaaacacggtaaggaaacaatctattacttttttccttaaaaggagaatttatagcactgtaatacagcttaaaatatttttagaatgatgtaaatagttaaccttcagtagtctattaaggcattaatacttctctggacatgcgcgtttgagggtggaggggtcctgtaaggtgcttcatcgtctgtgattactgcttgggatgtgttctttggcagcttgtgagattactttacctagtgtttataaagtaggaagttaagtgaatcatagattagaatttaatactcttatggaaataattttttaacatcttaattgacaatggcgtttttttatacataaccatggatgtagtgggaaacaatgttgtttggtaaaaataatgtacttgatcaatgtcaacaaagtatataaaatagtcttatt

SEQ ID NO: 378045 - DNA, 3248 bp, Homo sapiens
  misc_feature (1)..(2): n is a, c, g, or t
  misc_feature (9)..(10): n is a, c, g, or t
  misc_feature (35)..(35): n is a, c, g, or t
  misc_feature (37)..(37): n is a, c, g, or t
  misc_feature (47)..(48): n is a, c, g, or t
nnaaaaaannaaaaaaaaaaaaaaaaaaaatgaananaaaagagaanngaaaatgaaataaaaaaaaaaaatttttacatcatctgttcctgtggtatcccccaacacggatgagtttttagatcttcttgccagctcacagagtcgccgtctggatgaccagagggctagtttcagtaatttgccagggcttcgtctaacacaaaacagccagtcggtacttagccacctgatgactaatgacaacaaagaggctgatgaagatttctttgacatccttgtaaaatgtcaaggatccagattagatgatcaaagatgtgctccaccacctgctaccacaaagggtccgacagtaccagatgaagactttttcagccttattttacggtcccagggaaagagaatggatgaacagagagttcttttacaaagagatcaaaacagagacactgactttgggctaaaggactttttgcaaaataatgctttgttggagtttaaaaattcagggaaaaaatcggcagaccattagttactatggatttattttttttcctttcaaacacggtaaggaaacaatctattacttttttccttaaaaggagaatttatagcactgtaatacagcttaaaatatttttagaatgatgtaaatagttaaccttcagtagtctattaaggcattaatacttctctggacatgcgcgtttgagggtggaggggtcctgtaaggtgcttcatcgtctgtgattactgcttgggatgtgttctttggcagcttgtgagattactttacctagtgtttataaagtaggaagttaagtgaatcatagattagaatttaatactcttatggaaataattttttaacatcttaattgacaatggcgtttttttatacataaccatggatgtagtgggaaacaatgttgtttggtaaaaataatgtacttgatcaatgtaaaaaagtatataaaatagtcttactaaaaatctaggtttttttttcctccatgaaaatctgtttttttaggccaaagtcagtataaaagaaactctacttcttgggctgggcatggtggctcattcctgtaatcccagcacattgggaggctgaggcaggaggatcgcttgaggctaggagttcaagaccaacctgggcaacatagacccccgtgtctatgaaaaataaatcagcagccaggcgcagtggctcacacctgtaatcccagcactttgggaggccgaagcgggcggatcacttgaggtcgggagtttgagaccagcctggccaacatagtgaaaccctgtctctactaaaaatacaaaaattagctgggcatggtggcatgcgcctgtagtttcagctacttgggaggctgaggcaggagaatcacttgaacccctgggaggcagagattgcagtgagctgagaccaagccactggactccagcctgagtgacagagcaagactctgtctcaaaaaaaaaaaaacagcaagcatgctggcacacacctgtagtcccaactgcttaagaggctgaggcaggaggaccacttgagcccaggaggtggaggctgcactgagctatgatcgtgccactgcactccagcctgggtgacagagcaagaccctgtctctagaaaacaagtatcttttgtgtgttttgggctgtttaaaaaaattatttaaaatggtctcttctgttccataatactgctgtaaaacaaacttttctaagttctaatataaaaacaaaaaacaaaacccatgtggttaggtcaagaacctaggacacataaacaaacagaaaacagatgaaaactcacaaaaattaaatatgaaagaaagatgtcagctagaaccttagttgtcattaagctttgtcttccttatcccagatattgaaggcagtttacaaggggatgataacaaagtaactaactaactgtagcaaaagacaagtatgggacagactgggacctggagtaacactggatcacagactgcaaaggcccacgcttggaacaagttgccaacttgtttcactctgcttgcttcagactgtgcacagctgggatgggatctggggatgtggacccctattctttcaaaaagtcattcaggtgatttggatgggcaaatagaactatttctctaatggccaatgttttttaagagtcataacctggaattaattacattaagtgctcagctaaaaaaaaaaaaaaagttctaaattacaacctggattacattatgtttcatgtatactataaggtatgatgtcctggatagcattttaaaaactcaggtaagtttcatggggttcttataagaaaattcagttaagacaatataccaaaccacaacgtaaaaagtttgtgtatacaaactttttgtattatttgtacacaaagtacaaatttgtatttgtacacaaagtacaaactttgtgtattattttgtgtatacaatagttcttacagcctgtaaacattcaacattattccatttaaacattgtttttaacagctgtctaccctgttctgattttcctaaaagcttcacactatataggctgggcacaatggctcatgcctgtaatcccagcactttgggaggccgacaagggcgggtcacttgaggtcaggagttcgagaccagcctgaccaacatggtgaaaccccatcgacgcgtgggtcgacccacgcgtccgaaaggactttttgcaaaataatgcttagttggagtttaaaaattcaggcaaaaaatcggcagaccattagttactatggatttattttttttcctttcaaacacggtaaggaaacaatctattacttttttccttaaaaggagaatttatagcactgtaatacagcttaaaatatttttagaatgatgtaaatagttaaccttcagtagtctattaaggcattaatacttctctggacatgcgcgtttgagggtggaggggtcctgtaaggtgcttcatcgtctgtgattactgcttgggatgtgttctttggcagcttgtgagattactttacctagtgtttataaagtaggaagttaagtgaatcatagattagaatttaatactcttatggaaataattttttaacatcttaattgacaatggcgtttttttatacataaccatggatgtagtgggaaacaatgttgtttggtaaaaataatgtacttgatcaatgtcaacaaagtatataaaatagtcttatt

SEQ ID NO: 378046 - DNA, 3010 bp, Homo sapiens
gagcgaggaggtgtgtagccgtcttctattctccttccgtcctcctccctctgaggatccagattagatgatcaaagatgtgctccaccacctgctaccacaaagggtccgacagtaccagatgaagactttttcagccttattttacggtcccagggaaagagaatggatgaacagagagttcttttacaaagagatcaaaacagagacactgactttgggctaaaggactttttgcaaaataatgctttgttggagtttaaaaattcagggaaaaaatcggcagaccattagttactatggatttattttttttcctttcaaacacggtaaggaaacaatctattacttttttccttaaaaggagaatttatagcactgtaatacagcttaaaatatttttagaatgatgtaaatagttaaccttcagtagtctattaaggcattaatacttctctggacatgcgcgtttgagggtggaggggtcctgtaaggtgcttcatcgtctgtgattactgcttgggatgtgttctttggcagcttgtgagattactttacctagtgtttataaagtaggaagttaagtgaatcatagattagaatttaatactcttatggaaataattttttaacatcttaattgacaatggcgtttttttatacataaccatggatgtagtgggaaacaatgttgtttggtaaaaataatgtacttgatcaatgtaaaaaagtatataaaatagtcttactaaaaatctaggtttttttttcctccatgaaaatctgtttttttaggccaaagtcagtataaaagaaactctacttcttgggctgggcatggtggctcattcctgtaatcccagcacattgggaggctgaggcaggaggatcgcttgaggctaggagttcaagaccaacctgggcaacatagacccccgtgtctatgaaaaataaatcagcagccaggcgcagtggctcacacctgtaatcccagcactttgggaggccgaagcgggcggatcacttgaggtcgggagtttgagaccagcctggccaacatagtgaaaccctgtctctactaaaaatacaaaaattagctgggcatggtggcatgcgcctgtagtttcagctacttgggaggctgaggcaggagaatcacttgaacccctgggaggcagagattgcagtgagctgagaccaagccactggactccagcctgagtgacagagcaagactctgtctcaaaaaaaaaaaaacagcaagcatgctggcacacacctgtagtcccaactgcttaagaggctgaggcaggaggaccacttgagcccaggaggtggaggctgcactgagctatgatcgtgccactgcactccagcctgggtgacagagcaagaccctgtctctagaaaacaagtatcttttgtgtgttttgggctgtttaaaaaaattatttaaaatggtctcttctgttccataatactgctgtaaaacaaacttttctaagttctaatataaaaacaaaaaacaaaacccatgtggttaggtcaagaacctaggacacataaacaaacagaaaacagatgaaaactcacaaaaattaaatatgaaagaaagatgtcagctagaaccttagttgtcattaagctttgtcttccttatcccagatattgaaggcagtttacaaggggatgataacaaagtaactaactaactgtagcaaaagacaagtatgggacagactgggacctggagtaacactggatcacagactgcaaaggcccacgcttggaacaagttgccaacttgtttcactctgcttgcttcagactgtgcacagctgggatgggatctggggatgtggacccctattctttcaaaaagtcattcaggtgatttggatgggcaaatagaactatttctctaatggccaatgttttttaagagtcataacctggaattaattacattaagtgctcagctaaaaaaaaaaaaaaagttctaaattacaacctggattacattatgtttcatgtatactataaggtatgatgtcctggatagcattttaaaaactcaggtaagtttcatggggttcttataagaaaattcagttaagacaatataccaaaccacaacgtaaaaagtttgtgtatacaaactttttgtattatttgtacacaaagtacaaatttgtatttgtacacaaagtacaaactttgtgtattattttgtgtatacaatagttcttacagcctgtaaacattcaacattattccatttaaacattgtttttaacagctgtctaccctgttctgattttcctaaaagcttcacactatataggctgggcacaatggctcatgcctgtaatcccagcactttgggaggccgacaagggcgggtcacttgaggtcaggagttcgagaccagcctgaccaacatggtgaaaccccatcgacgcgtgggtcgacccacgcgtccgaaaggactttttgcaaaataatgcttagttggagtttaaaaattcaggcaaaaaatcggcagaccattagttactatggatttattttttttcctttcaaacacggtaaggaaacaatctattacttttttccttaaaaggagaatttatagcactgtaatacagcttaaaatatttttagaatgatgtaaatagttaaccttcagtagtctattaaggcattaatacttctctggacatgcgcgtttgagggtggaggggtcctgtaaggtgcttcatcgtctgtgattactgcttgggatgtgttctttggcagcttgtgagattactttacctagtgtttataaagtaggaagttaagtgaatcatagattagaatttaatactcttatggaaataattttttaacatcttaattgacaatggcgtttttttatacataaccatggatgtagtgggaaacaatgttgtttggtaaaaataatgtacttgatcaatgtcaacaaagtatataaaatagtcttatt

SEQ ID NO: 378047 - DNA, 5443 bp, Homo sapiens
agaagaggacaggaaagaaacttcagtctgagggttgaggacacgtcccggagcagaggaggaccaagctcccaagccccctgtcaccttgacacgcagacggttccccaggactgcgaagaggggggcaaccagcgccccgccccgccccgctgcgccgcccgccattggccggtccgaaagacgcggggcgttgtcggtttgaatgagagcgcctggagccggggcgcaggcgcagaggagggcggtgttgagaccggcggagcggcgggacccctaggtggcggagggacgctccgggaaagcgaggggcgctacgagctctggcccacgtgacctgccgggggcgggagcagggggcgcgccggcctcctgcggtgcccctgccttggggaggggccgtgaccacccgtctgtcgcccgaggcggccgccgctgcaccttcaccgcgtacccgggacccgcccgcccgcgggagaaatgttgctgaagtgctgctgaaagggccagagatgcaaggatttgggatacattttgaacctttaagctgtctgacattgacctcctttcattattaataaagaagaatcaggagcttaggatgtattaacaccaactcattaatatactaaccggacaatgttctacaaacaattctacattgtaaaggactggattggcacaaaataaaataattttattttattcagcttataatatgactcgatggaggaaaatttgataagcatgagagaagaccattcttttcatgttcgttacagaatggaagcttcttgcctagagctggccttggaaggggaacgtctatgtaaatcaggagactgccgcgctggcgtgtcattctttgaagctgcagttcaagttggaactgaagacctaaaaacacttagcgctatttacagccagttgggcaatgcttatttctatttgcatgattatgccaaagcattagaatatcaccatcatgatttaacccttgcaaggactattggagaccagctgggggaagcgaaagctagtggtaatctgggaaacaccttaaaagttcttgggaattttgacgaagccatagtttgttgtcagcgacacctagatatttccagagagcttaatgacaaggtgggagaagcaagagcactttacaatcttgggaatgtgtatcatgccaaagggaaaagttttggttgccctggtccccaggatgtaggagaatttccagaagaagtgagagatgctctgcaggcagccgtggatttttatgaggaaaacctatcattagtgactgctttgggtgaccgagcggcacaaggacgtgcctttggaaatcttggaaacacacattacctccttggcaacttcagggatgcagttatagctcatgagcagcgtctccttattgcaaaagaatttggagataaagcagctgaaagaagagcatatagcaaccttggaaatgcatatatatttcttggtgaatttgaaactgcctcggaatactacaagaagacactactgttggcccgacagcttaaagaccgagctgtagaagcacagtcttgttacagtcttggaaatacatatactttacttcaagactatgaaaaggccattgattatcatctgaagcacttagcaattgctcaagagctgaatgatagaattggtgaaggaagagcatgttggagcttaggaaatgcatacacagcactaggaaatcatgatcaagcaatgcattttgctgaaaagcacttggaaatttcaagagaggttggggataaaagtggtgaactaacagcacgacttaatctctcagaccttcaaatggttcttggtctgagctacagcacaaataactccataatgtctgaaaatactgaaattgatagcagtttgaatggtgtacgccccaagttgggacgccggcatagtatggaaaatatggaacttatgaagttaacaccagaaaaggtacagaactggaacagtgaaattcttgctaagcaaaaacctcttattgccaaaccttctgcaaagctactctttgtcaacagactgaaggggaaaaaatacaaaacgaattcctccactaaagttctccaagatgccagtaattctattgaccaccgaattccaaattctcagaggaaaatcagtgcagatactattggagatgaagggttctttgacttattaagccgatttcaaagcaataggatggatgatcagagatgttgcttacaagaaaagaactgccatacagcttcaacaacaacttcttccactccccctaaaatgatgctaaaaacatcatctgttcctgtggtatcccccaacacggatgagtttttagatcttcttgccagctcacagagtcgccgtctggatgaccagagggctagtttcagtaatttgccagggcttcgtctaacacaaaacagccagtcggtacttagccacctgatgactaatgacaacaaagaggctgatgaagatttctttgacatccttgtaaaatgtcaaggatccagattagatgatcaaagatgtgctccaccacctgctaccacaaagggtccgacagtaccagatgaagactttttcagccttattttacggtcccagggaaagagaatggatgaacagagagttcttttacaaagagatcaaaacagagacactgactttgggctaaaggactttttgcaaaataatgctttgttggagtttaaaaattcagggaaaaaatcggcagaccattagttactatggatttattttttttcctttcaaacacggtaaggaaacaatctattacttttttccttaaaaggagaatttatagcactgtaatacagcattaatacttctctggacatgcgcgtttgagggtggaggggtcctgtaaggtgcttcatcgtctgtgattactgcttgggatgtgttctttggcagcttgtgagattactttacctagtgtttataaagtaggaagttaagtgaatcatagattagaatttaatactcttatggaaataattttttaacatcttaattgacaatggcgtttttttatacataaccatggatgtagtgggaaacaatgttgtttggtaaaaataatgtacttgatcaatgtaaaaaagtatataaaatagtcttactaaaaatctaggtttttttttcctccatgaaaatctgtttttttaggccaaagtcagtataaaagaaactctacttcttgggctgggcatggtggctcattcctgtaatcccagcacattgggaggctgaggcaggaggatcgcttgaggctaggagttcaagaccaacctgggcaacatagacccccgtgtctatgaaaaataaatcagcagccaggcgcagtggctcacacctgtaatcccagcactttgggaggccgaagcgggcggatcacttgaggtcgggagtttgagaccagcctggccaacatagtgaaaccctgtctctactaaaaatacaaaaattagctgggcatggtggcatgcgcctgtagtttcagctacttgggaggctgaggcaggagaatcacttgaacccctgggaggcagagattgcagtgagctgagaccaagccactggactccagcctgagtgacagagcaagactctgtctcaaaaaaaaaaaaacagcaagcatgctggcacacacctgtagtcccaactgcttaagaggctgaggcaggaggaccacttgagcccaggaggtggaggctgcactgagctatgatcgtgccactgcactccagcctgggtgacagagcaagaccctgtctctagaaaacaagtatcttttgtgtgttttgggctgtttaaaaaaattatttaaaatggtctcttctgttccataatactgctgtaaaacaaacttttctaagttctaatataaaaacaaaaaacaaaacccatgtggttaggtcaagaacctaggacacataaacaaacagaaaacagatgaaaactcacaaaaattaaatatgaaagaaagatgtcagctagaaccttagttgtcattaagctttgtcttccttatcccagatattgaaggcagtttacaaggggatgataacaaagtaactaactaactgtagcaaaagacaagtatgggacagactgggacctggagtaacactggatcacagactgcaaaggcccacgcttggaacaagttgccaacttgtttcactctgcttgcttcagactgtgcacagctgggatgggatctggggatgtggacccctattctttcaaaaagtcattcaggtgatttggatgggcaaatagaactatttctctaatggccaatgttttttaagagtcataacctggaattaattacattaagtgctcagctaaaaaaaaaaaaaaagttctaaattacaacctggattacattatgtttcatgtatactataaggtatgatgtcctggatagcattttaaaaactcaggtaagtttcatggggttcttataagaaaattcagttaagacaatataccaaaccacaacgtaaaaagtttgtgtatacaaactttttgtattatttgtacacaaagtacaaatttgtatttgtacacaaagtacaaactttgtgtattattttgtgtatacaatagttcttacagcctgtaaacattcaacattattccatttaaacattgtttttaacagctgtctaccctgttctgattttcctaaaagcttcacactatataggctgggcacaatggctcatgcctgtaatcccagcactttgggaggccgacaagggcgggtcacttgaggtcaggagttcgagaccagcctgaccaacatggtgaaaccccatcgacgcgtgggtcgacccacgcgtccgaaaggactttttgcaaaataatgcttagttggagtttaaaaattcaggcaaaaaatcggcagaccattagttactatggatttattttttttcctttcaaacacggtaaggaaacaatctattacttttttccttaaaaggagaatttatagcactgtaatacagcttaaaatatttttagaatgatgtaaatagttaaccttcagtagtctattaaggcattaatacttctctggacatgcgcgtttgagggtggaggggtcctgtaaggtgcttcatcgtctgtgattactgcttgggatgtgttctttggcagcttgtgagattactttacctagtgtttataaagtaggaagttaagtgaatcatagattagaatttaatactcttatggaaataattttttaacatcttaattgacaatggcgtttttttatacataaccatggatgtagtgggaaacaatgttgtttggtaaaaataatgtacttgatcaatgtcaacaaagtatataaaatagtcttatt

SEQ ID NO: 378048 - DNA, 2694 bp, Homo sapiens
agaagaggacaggaaagaaacttcagtctgagggttgaggacacgtcccggagcagaggaggaccaagctcccaagccccctgtcaccttgacacgcagacggttccccaggactgcgaagaggggggcaaccagcgccccgccccgccccgctgcgccgcccgccattggccggtccgaaagacgcggggcgttgtcggtttgaatgagagcgcctggagccggggcgcaggcgcagaggagggcggtgttgagaccggcggagcggcgggacccctaggtggcggagggacgctccgggaaagcgaggggcgctacgagctctggcccacgtgacctgccgggggcgggagcagggggcgcgccggcctcctgcggtgcccctgccttggggaggggccgtgaccacccgtctgtcgcccgaggcggccgccgctgcaccttcaccgcgtacccgggacccgcccgcccgcgggagaaatgttgctgaagtgctgctgaaagggccagagatgcaaggatttgggatacattttgaacctttaagctgtctgacattgacctcctttcattattaataaagaagaatcaggagcttaggatgtattaacaccaactcattaatatactaaccggacaatgttctacaaacaattctacattgtaaaggactggattggcacaaaataaaataattttattttattcagcttataatatgactcgatggaggaaaatttgataagcatgagagaagaccattcttttcatgttcgttacagaatggaagcttcttgcctagagctggccttggaaggggaacgtctatgtaaatcaggagactgccgcgctggcgtgtcattctttgaagctgcagttcaagttggaactgaagacctaaaaacacttagcgctatttacagccagttgggcaatgcttatttctatttgcatgattatgccaaagcattagaatatcaccatcatgatttaacccttgcaaggactattggagaccagctgggggaagcgaaagctagtggtaatctgggaaacaccttaaaagttcttgggaattttgacgaagccatagtttgttgtcagcgacacctagatatttccagagagcttaatgacaaggtgggagaagcaagagcactttacaatcttgggaatgtgtatcatgccaaagggaaaagttttggttgccctggtccccaggatgtaggagaatttccagaagaagtgagagatgctctgcaggcagccgtggatttttatgaggaaaacctatcattagtgactgctttgggtgaccgagcggcacaaggacgtgcctttggaaatcttggaaacacacattacctccttggcaacttcagggatgcagttatagctcatgagcagcgtctccttattgcaaaagaatttggagataaagcagctgaaagaagagcatatagcaaccttggaaatgcatatatatttcttggtgaatttgaaactgcctcggaatactacaagaagacactactgttggcccgacagcttaaagaccgagctgtagaagcacagtcttgttacagtcttggaaatacatatactttacttcaagactatgaaaaggccattgattatcatctgaagcacttagcaattgctcaagagctgaatgatagaattggtgaaggaagagcatgttggagcttaggaaatgcatacacagcactaggaaatcatgatcaagcaatgcattttgctgaaaagcacttggaaatttcaagagaggttggggataaaagtggtgaactaacagcacgacttaatctctcagaccttcaaatggttcttggtctgagctacagcacaaataactccataatgtctgaaaatactgaaattgatagcagtttgaatggtgtacgccccaagttgggacgccggcatagtatggaaaatatggaacttatgaagttaacaccagaaaaggtacagaactggaacagtgaaattcttgctaagcaaaaacctcttattgccaaaccttctgcaaagctactctttgtcaacagactgaaggggaaaaaatacaaaacgaattcctccactaaagttctccaagatgccagtaattctattgaccaccgaattccaaattctcagaggaaaatcagtgcagatactattggagatgaagggttctttgacttattaagccgatttcaaagcaataggatggatgatcagagatgttgcttacaagaaaagaactgccatacagcttcaacaacaacttcttccactccccctaaaatgatgctaaaaacatcatctgttcctgtggtatcccccaacacggatgagtttttagatcttcttgccagctcacagagtcgccgtctggatgaccagagggctagtttcagtaatttgccagggcttcgtctaacacaaaacagccagtcggtacttagccacctgatgactaatgacaacaaagaggctgatgaagatttctttgacatccttgtaaaatgtcaagtatgtctgtatatttttttcgttctgcatacagctcagataccactgaaaacattggtagtgttataattctcattcaggaagggcttattttgtattagagagttattattgtccatcattcagtaaaaaattattgaacaccgattatgt

SEQ ID NO: 378049 - DNA, 2644 bp, Homo sapiens
agaagaggacaggaaagaaacttcagtctgagggttgaggacacgtcccggagcagaggaggaccaagctcccaagccccctgtcaccttgacacgcagacggttccccaggactgcgaagaggggggcaaccagcgccccgccccgccccgctgcgccgcccgccattggccggtccgaaagacgcggggcgttgtcggtttgaatgagagcgcctggagccggggcgcaggcgcagaggagggcggtgttgagaccggcggagcggcgggacccctaggtggcggagggacgctccgggaaagcgaggggcgctacgagctctggcccacgtgacctgccgggggcgggagcagggggcgcgccggcctcctgcggtgcccctgccttggggaggggccgtgaccacccgtctgtcgcccgaggcggccgccgctgcaccttcaccgcgtacccgggacccgcccgcccgcgggagaaatgttgctgaagtgctgctgaaagggccagagatgcaaggatttgggatacattttgaacctttaagctgtctgacattgacctcctttcattattaataaagaagaatcaggagcttaggatgtattaacaccaactcattaatatactaaccggacaatgttctacaaacaattctacattgtaaaggactggattggcacaaaataaaataattttattttattcagcttataatatgactcgatggaggaaaatttgataagcatgagagaagaccattcttttcatgttcgttacagaatggaagcttcttgcctagagctggccttggaaggggaacgtctatgtaaatcaggagactgccgcgctggcgtgtcattctttgaagctgcagttcaagttggaactgaagacctaaaaacacttagcgctatttacagccagttgggcaatgcttatttctatttgcatgattatgccaaagcattagaatatcaccatcatgatttaacccttgcaaggactattggagaccagctgggggaagcgaaagctagtggtaatctgggaaacaccttaaaagttcttgggaattttgacgaagccatagtttgttgtcagcgacacctagatatttccagagagcttaatgacaaggtgggagaagcaagagcactttacaatcttgggaatgtgtatcatgccaaagggaaaagttttggttgccctggtccccaggatgtaggagaatttccagaagaagtgagagatgctctgcaggcagccgtggatttttatgaggaaaacctatcattagtgactgctttgggtgaccgagcggcacaaggacgtgcctttggaaatcttggaaacacacattacctccttggcaacttcagggatgcagttatagctcatgagcagcgtctccttattgcaaaagaatttggagataaagcagctgaaagaagagcatatagcaaccttggaaatgcatatatatttcttggtgaatttgaaactgcctcggaatactacaagaagacactactgttggcccgacagcttaaagaccgagctgtagaagcacagtcttgttacagtcttggaaatacatatactttacttcaagactatgaaaaggccattgattatcatctgaagcacttagcaattgctcaagagctgaatgatagaattggtgaaggaagagcatgttggagcttaggaaatgcatacacagcactaggaaatcatgatcaagcaatgcattttgctgaaaagcacttggaaatttcaagagaggttggggataaaagtggtgaactaacagcacgacttaatctctcagaccttcaaatggttcttggtctgagctacagcacaaataactccataatgtctgaaaatactgaaattgatagcagtttgaatggtgtacgccccaagttgggacgccggcatagtatggaaaatatggaacttatgaagttaacaccagaaaaggtacagaactggaacagtgaaattcttgctaagcaaaaacctcttattgccaaaccttctgcaaagctactctttgtcaacagactgaaggggaaaaaatacaaaacgaattcctccactaaagttctccaagatgccagtaattctattgaccaccgaattccaaattctcagaggaaaatcagtgcagatactattggagatgaagggttctttgacttattaagccgatttcaaagcaataggatggatgatcagagatgttgcttacaagaaaagaactgccatacagcttcaacaacaacttcttccactccccctaaaatgatgctaaaaacatcatctgttcctgtggtatcccccaacacggatgagtttttagatcttcttgccagctcacagagtcgccgtctggatgaccagagggctagtttcagtaatttgccagggcttcgtctaacacaaaacagccagtcggtacttagccacctgatgactaatgacaacaaagaggctgatgaagatttctttgacatccttgtaaaatgtcaaggatccagattagatgatcaaaggacaaataacagaaggtcagggttcatgcctttttctttttttcctgaaatgttaacacttatttattctctgtgtaggg

SEQ ID NO: 378050 - DNA, 1830 bp, Homo sapiens
tttttttttaaatagagacagggtcttgctatgttacccaggctggatctatgaaaaataaatcagcagccaggcgcagtggctcacacctgtaatcccagcactttgcaactgcttaagaggctgaggcaggaggaccacttgagcccaggaggtggaggctgcactgagctatgatcgtgccactgcactccagcctgggtgacagagcaagaccctgtctctagaaaacaagtatcttttgtgtgttttgggctgtttaaaaaaattatttaaaatggtctcttctgttccataatactgctgtaaaacaaacttttctaagttctaatataaaaacaaaaaacaaaacccatgtggttaggtcaagaacctaggacacataaacaaacagaaaacagatgaaaactcacaaaaattaaatatgaaagaaagatgtcagctagaaccttagttgtcattaagctttgtcttccttatcccagatattgaaggcagtttacaaggggatgataacaaagtaactaactaactgtagcaaaagacaagtatgggacagactgggacctggagtaacactggatcacagactgcaaaggcccacgcttggaacaagttgccaacttgtttcactctgcttgcttcagactgtgcacagctgggatgggatctggggatgtggacccctattctttcaaaaagtcattcaggtgatttggatgggcaaatagaactatttctctaatggccaatgttttttaagagtcataacctggaattaattacattaagtgctcagctaaaaaaaaaaaaaaagttctaaattacaacctggattacattatgtttcatgtatactataaggtatgatgtcctggatagcattttaaaaactcaggtaagtttcatggggttcttataagaaaattcagttaagacaatataccaaaccacaacgtaaaaagtttgtgtatacaaactttttgtattatttgtacacaaagtacaaatttgtatttgtacacaaagtacaaactttgtgtattattttgtgtatacaatagttcttacagcctgtaaacattcaacattattccatttaaacattgtttttaacagctgtctaccctgttctgattttcctaaaagcttcacactatataggctgggcacaatggctcatgcctgtaatcccagcactttgggaggccgacaagggcgggtcacttgaggtcaggagttcgagaccagcctgaccaacatggtgaaaccccatcgacgcgtgggtcgacccacgcgtccgaaaggactttttgcaaaataatgcttagttggagtttaaaaattcaggcaaaaaatcggcagaccattagttactatggatttattttttttcctttcaaacacggtaaggaaacaatctattacttttttccttaaaaggagaatttatagcactgtaatacagcttaaaatatttttagaatgatgtaaatagttaaccttcagtagtctattaaggcattaatacttctctggacatgcgcgtttgagggtggaggggtcctgtaaggtgcttcatcgtctgtgattactgcttgggatgtgttctttggcagcttgtgagattactttacctagtgtttataaagtaggaagttaagtgaatcatagattagaatttaatactcttatggaaataattttttaacatcttaattgacaatggcgtttttttatacataaccatggatgtagtgggaaacaatgttgtttggtaaaaataatgtacttgatcaatgtcaacaaagtatataaaatagtcttatt

SEQ ID NO: 378051 - DNA, 422 bp, Homo sapiens
gagcttaggatgtattaacaccaactcattaatatactaaccggacaatgttctacaaacaattctacattgtaaaggactggattggcacaaaataaaataattttattttattcagcttataatatgactcgatggaggaaaatttgataagcatgagagaagaccattcttttcatgttcgttacaggtaagactattgctgtcttaatggatgacttttaatccttattttaaagtgtttttaactctgatgaccatttcaagtttcagttgaaaatactcaaatataccagccatagtattgtctgtagacaatattttctttttgttgtaagttttcctttctgtaagaaaatgatagtagagaccaattatgtactatggtttgtttaatgttctctggaagagtttatgaataa

SEQ ID NO: 378052 - DNA, 5371 bp, Homo sapiens
agaagaggacaggaaagaaacttcagtctgagggttgaggacacgtcccggagcagaggaggaccaagctcccaagccccctgtcaccttgacacgcagacggttccccaggactgcgaagaggggggcaaccagcgccccgccccgccccgctgcgccgcccgccattggccggtccgaaagacgcggggcgttgtcggtttgaatgagagcgcctggagccggggcgcaggcgcagaggagggcggtgttgagaccggcggagcggcgggacccctaggtggcggagggacgctccgggaaagcgaggggcgctacgagctctggcccacgtgacctgccgggggcgggagcagggggcgcgccggcctcctgcggtgcccctgccttggggaggggccgtgaccacccgtctgtcgcccgaggcggccgccgctgcaccttcaccgcgtacccgggacccgcccgcccgcgggagaaatgttgctgaagtgctgctgaaagggccagagatgcaaggatttgggatacattttgaacctttaagctgtctgacattgacctcctttcattattaataaagaagaatcaggagcttaggatgtattaacaccaactcattaatatactaaccggacaatgttctacaaacaattctacattgtaaaggactggattggcacaaaataaaataattttattttattcagcttataatatgactcgatggaggaaaatttgataagcatgagagaagaccattcttttcatgttcgttacagaatggaagcttcttgcctagagctggccttggaaggggaacgtctatgtaaatcaggagactgccgcgctggcgtgtcattctttgaagctgcagttcaagttggaactgaagacctaaaaacacttagcgctatttacagccagttgggcaatgcttatttctatttgcatgattatgccaaagcattagaatatcaccatcatgatttaacccttgcaaggactattggagaccagctgggggaagcgaaagctagtggtaatctgggaaacaccttaaaagttcttgggaattttgacgaagccatagtttgttgtcagcgacacctagatatttccagagagcttaatgacaaggtgggagaagcaagagcactttacaatcttgggaatgtgtatcatgccaaagggaaaagttttggttgccctggtccccaggatgtaggagaatttccagaagaagtgagagatgctctgcaggcagccgtggatttttatgaggaaaacctatcattagtgactgctttgggtgaccgagcggcacaaggacgtgcctttggaaatcttggaaacacacattacctccttggcaacttcagggatgcagttatagctcatgagcagcgtctccttattgcaaaagaatttggagataaagcagctgaaagaagagcatatagcaaccttggaaatgcatatatatttcttggtgaatttgaaactgcctcggaatactacaagaagacactactgttggcccgacagcttaaagaccgagctgtagaagcacagtcttgttacagtcttggaaatacatatactttacttcaagactatgaaaaggccattgattatcatctgaagcacttagcaattgctcaagagctgaatgatagaattggtgaaggaagagcatgttggagcttaggaaatgcatacacagcactaggaaatcatgatcaagcaatgcattttgctgaaaagcacttggaaatttcaagagaggttggggataaaagtggtgaactaacagcacgacttaatctctcagaccttcaaatggttcttggtctgagctacagcacaaataactccataatgtctgaaaatactgaaattgatagcagtttgaatggtgtacgccccaagttgggacgccggcatagtatggaaaatatggaacttatgaagttaacaccagaaaaggtacagaactggaacagtgaaattcttgctaagcaaaaacctcttattgccaaaccttctgcaaagctactctttgtcaacagactgaaggggaaaaaatacaaaacgaattcctccactaaagttctccaagatgccagtaattctattgaccaccgaattccaaattctcagaggaaaatcagtgcagatactattggagatgaagggttctttgacttattaagccgatttcaaagcaataggatggatgatcagagatgttgcttacaagaaaagaactgccatacagcttcaacaacaacttcttccactccccctaaaatgatgctaaaaacatcatctgttcctgtggtatcccccaacacggatgagtttttagatcttcttgccagctcacagagtcgccgtctggatgaccagagggctagtttcagtaatttgccagggcttcgtctaacacaaaacagccagtcggtacttagccacctgatgactaatgacaacaaagaggctgatgaagatttctttgacatccttgtaaaatgtcaaggatccagattagatgatcaaagatgtgctccaccacctgctaccacaaagggtccgacagtaccagatgaagactttttcagccttattttacggtcccagggaaagagaatggatgaacagagagttcttttacaaagagatcaaaacagagacactgactttgggctaaaggactttttgcaaaataatgctttgttggagtttaaaaattcagggaaaaaatcggcagaccattagttactatggatttattttttttcctttcaaacacggtaaggaaacaatctattacttttttccttaaaaggagaatttatagcactgtaatacagcttaaaatatttttagaatgatgtaaatagttaaccttcagtagtctattaaggcattaatacttctctggacatgcgcgtttgagggtggaggggtcctgtaaggtgcttcatcgtctgtgattactgcttgggatgtgttctttggcagcttgtgagattactttacctagtgtttataaagtaggaagttaagtgaatcatagattagaatttaatactcttatggaaataattttttaacatcttaattgacaatggcgtttttttatacataaccatggatgtagtgggaaacaatgttgtttggtaaaaataatgtacttgatcaatgtaaaaaagtatataaaatagtcttactaaaaatctaggtttttttttcctccatgaaaatctgtttttttaggccaaagtcagtataaaagaaactctacttcttgggctgggcatggtggctcattcctgtaatcccagcacattgggaggggaggccgaagcgggcggatcacttgaggtcgggagtttgagaccagcctggccaacatagtgaaaccctgtctctactaaaaatacaaaaattagctgggcatggtggcatgcgcctgtagtttcagctacttgggaggctgaggcaggagaatcacttgaacccctgggaggcagagattgcagtgagctgagaccaagccactggactccagcctgagtgacagagcaagactctgtctcaaaaaaaaaaaaacagcaagcatgctggcacacacctgtagtcccaactgcttaagaggctgaggcaggaggaccacttgagcccaggaggtggaggctgcactgagctatgatcgtgccactgcactccagcctgggtgacagagcaagaccctgtctctagaaaacaagtatcttttgtgtgttttgggctgtttaaaaaaattatttaaaatggtctcttctgttccataatactgctgtaaaacaaacttttctaagttctaatataaaaacaaaaaacaaaacccatgtggttaggtcaagaacctaggacacataaacaaacagaaaacagatgaaaactcacaaaaattaaatatgaaagaaagatgtcagctagaaccttagttgtcattaagctttgtcttccttatcccagatattgaaggcagtttacaaggggatgataacaaagtaactaactaactgtagcaaaagacaagtatgggacagactgggacctggagtaacactggatcacagactgcaaaggcccacgcttggaacaagttgccaacttgtttcactctgcttgcttcagactgtgcacagctgggatgggatctggggatgtggacccctattctttcaaaaagtcattcaggtgatttggatgggcaaatagaactatttctctaatggccaatgttttttaagagtcataacctggaattaattacattaagtgctcagctaaaaaaaaaaaaaaagttctaaattacaacctggattacattatgtttcatgtatactataaggtatgatgtcctggatagcattttaaaaactcaggtaagtttcatggggttcttataagaaaattcagttaagacaatataccaaaccacaacgtaaaaagtttgtgtatacaaactttttgtattatttgtacacaaagtacaaatttgtatttgtacacaaagtacaaactttgtgtattattttgtgtatacaatagttcttacagcctgtaaacattcaacattattccatttaaacattgtttttaacagctgtctaccctgttctgattttcctaaaagcttcacactatataggctgggcacaatggctcatgcctgtaatcccagcactttgggaggccgacaagggcgggtcacttgaggtcaggagttcgagaccagcctgaccaacatggtgaaaccccatcgacgcgtgggtcgacccacgcgtccgaaaggactttttgcaaaataatgcttagttggagtttaaaaattcaggcaaaaaatcggcagaccattagttactatggatttattttttttcctttcaaacacggtaaggaaacaatctattacttttttccttaaaaggagaatttatagcactgtaatacagcttaaaatatttttagaatgatgtaaatagttaaccttcagtagtctattaaggcattaatacttctctggacatgcgcgtttgagggtggaggggtcctgtaaggtgcttcatcgtctgtgattactgcttgggatgtgttctttggcagcttgtgagattactttacctagtgtttataaagtaggaagttaagtgaatcatagattagaatttaatactcttatggaaataattttttaacatcttaattgacaatggcgtttttttatacataaccatggatgtagtgggaaacaatgttgtttggtaaaaataatgtacttgatcaatgtcaacaaagtatataaaatagtcttatt

SEQ ID NO: 378053 - DNA, 5157 bp, Homo sapiens
aatcacttggagtcgggcgcgtcctacctaaaccaggcagtttatggcaaatacctgccttgaccgtgcttaaattagtgaacttttgggcaccaactggtcgatttaccatagaaattggtagttgctgcaaaaagaaaatgttgctgaagtgctgctgaaagggccagagatgcaaggatttgggatacattttgaacctttaagctgtctgacattgacctcctttcattattaataaagaagaatcaggagcttaggatgtattaacaccaactcattaatatactaaccggacaatgttctacaaacaattctacattgtaaaggactggattggcacaaaataaaataattttattttattcagcttataatatgactcgatggaggaaaatttgataagcatgagagaagaccattcttttcatgttcgttacagaatggaagcttcttgcctagagctggccttggaaggggaacgtctatgtaaatcaggagactgccgcgctggcgtgtcattctttgaagctgcagttcaagttggaactgaagacctaaaaacacttagcgctatttacagccagttgggcaatgcttatttctatttgcatgattatgccaaagcattagaatatcaccatcatgatttaacccttgcaaggactattggagaccagctgggggaagcgaaagctagtggtaatctgggaaacaccttaaaagttcttgggaattttgacgaagccatagtttgttgtcagcgacacctagatatttccagagagcttaatgacaaggtgggagaagcaagagcactttacaatcttgggaatgtgtatcatgccaaagggaaaagttttggttgccctggtccccaggatgtaggagaatttccagaagaagtgagagatgctctgcaggcagccgtggatttttatgaggaaaacctatcattagtgactgctttgggtgaccgagcggcacaaggacgtgcctttggaaatcttggaaacacacattacctccttggcaacttcagggatgcagttatagctcatgagcagcgtctccttattgcaaaagaatttggagataaagcagctgaaagaagagcatatagcaaccttggaaatgcatatatatttcttggtgaatttgaaactgcctcggaatactacaagaagacactactgttggcccgacagcttaaagaccgagctgtagaagcacagtcttgttacagtcttggaaatacatatactttacttcaagactatgaaaaggccattgattatcatctgaagcacttagcaattgctcaagagctgaatgatagaattggtgaaggaagagcatgttggagcttaggaaatgcatacacagcactaggaaatcatgatcaagcaatgcattttgctgaaaagcacttggaaatttcaagagaggttggggataaaagtggtgaactaacagcacgacttaatctctcagaccttcaaatggttcttggtctgagctacagcacaaataactccataatgtctgaaaatactgaaattgatagcagtttgaatggtgtacgccccaagttgggacgccggcatagtatggaaaatatggaacttatgaagttaacaccagaaaaggtacagaactggaacagtgaaattcttgctaagcaaaaacctcttattgccaaaccttctgcaaagctactctttgtcaacagactgaaggggaaaaaatacaaaacgaattcctccactaaagttctccaagatgccagtaattctattgaccaccgaattccaaattctcagaggaaaatcagtgcagatactattggagatgaagggttctttgacttattaagccgatttcaaagcaataggatggatgatcagagatgttgcttacaagaaaagaactgccatacagcttcaacaacaacttcttccactccccctaaaatgatgctaaaaacatcatctgttcctgtggtatcccccaacacggatgagtttttagatcttcttgccagctcacagagtcgccgtctggatgaccagagggctagtttcagtaatttgccagggcttcgtctaacacaaaacagccagtcggtacttagccacctgatgactaatgacaacaaagaggctgatgaagatttctttgacatccttgtaaaatgtcaaggatccagattagatgatcaaagatgtgctccaccacctgctaccacaaagggtccgacagtaccagatgaagactttttcagccttattttacggtcccagggaaagagaatggatgaacagagagttcttttacaaagagatcaaaacagagacactgactttgggctaaaggactttttgcaaaataatgctttgttggagtttaaaaattcagggaaaaaatcggcagaccattagttactatggatttattttttttcctttcaaacacggtaaggaaacaatctattacttttttccttaaaaggagaatttatagcactgtaatacagcttaaaatatttttagaatgatgtaaatagttaaccttcagtagtctattaaggcattaatacttctctggacatgcgcgtttgagggtggaggggtcctgtaaggtgcttcatcgtctgtgattactgcttgggatgtgttctttggcagcttgtgagattactttacctagtgtttataaagtaggaagttaagtgaatcatagattagaatttaatactcttatggaaataattttttaacatcttaattgacaatggcgtttttttatacataaccatggatgtagtgggaaacaatgttgtttggtaaaaataatgtacttgatcaatgtaaaaaagtatataaaatagtcttactaaaaatctaggtttttttttcctccatgaaaatctgtttttttaggccaaagtcagtataaaagaaactctacttcttgggctgggcatggtggctcattcctgtaatcccagcacattgggaggctgaggcaggaggatcgcttgaggctaggagttcaagaccaacctgggcaacatagacccccgtgtctatgaaaaataaatcagcagccaggcgcagtggctcacacctgtaatcccagcactttgggaggccgaagcgggcggatcacttgaggtcgggagtttgagaccagcctggccaacatagtgaaaccctgtctctactaaaaatacaaaaattagctgggcatggtggcatgcgcctgtagtttcagctacttgggaggctgaggcaggagaatcacttgaacccctgggaggcagagattgcagtgagctgagaccaagccactggactccagcctgagtgacagagcaagactctgtctcaaaaaaaaaaaaacagcaagcatgctggcacacacctgtagtcccaactgcttaagaggctgaggcaggaggaccacttgagcccaggaggtggaggctgcactgagctatgatcgtgccactgcactccagcctgggtgacagagcaagaccctgtctctagaaaacaagtatcttttgtgtgttttgggctgtttaaaaaaattatttaaaatggtctcttctgttccataatactgctgtaaaacaaacttttctaagttctaatataaaaacaaaaaacaaaacccatgtggttaggtcaagaacctaggacacataaacaaacagaaaacagatgaaaactcacaaaaattaaatatgaaagaaagatgtcagctagaaccttagttgtcattaagctttgtcttccttatcccagatattgaaggcagtttacaaggggatgataacaaagtaactaactaactgtagcaaaagacaagtatgggacagactgggacctggagtaacactggatcacagactgcaaaggcccacgcttggaacaagttgccaacttgtttcactctgcttgcttcagactgtgcacagctgggatgggatctggggatgtggacccctattctttcaaaaagtcattcaggtgatttggatgggcaaatagaactatttctctaatggccaatgttttttaagagtcataacctggaattaattacattaagtgctcagctaaaaaaaaaaaaaaagttctaaattacaacctggattacattatgtttcatgtatactataaggtatgatgtcctggatagcattttaaaaactcaggtaagtttcatggggttcttataagaaaattcagttaagacaatataccaaaccacaacgtaaaaagtttgtgtatacaaactttttgtattatttgtacacaaagtacaaatttgtatttgtacacaaagtacaaactttgtgtattattttgtgtatacaatagttcttacagcctgtaaacattcaacattattccatttaaacattgtttttaacagctgtctaccctgttctgattttcctaaaagcttcacactatataggctgggcacaatggctcatgcctgtaatcccagcactttgggaggccgacaagggcgggtcacttgaggtcaggagttcgagaccagcctgaccaacatggtgaaaccccatcgacgcgtgggtcgacccacgcgtccgaaaggactttttgcaaaataatgcttagttggagtttaaaaattcaggcaaaaaatcggcagaccattagttactatggatttattttttttcctttcaaacacggtaaggaaacaatctattacttttttccttaaaaggagaatttatagcactgtaatacagcttaaaatatttttagaatgatgtaaatagttaaccttcagtagtctattaaggcattaatacttctctggacatgcgcgtttgagggtggaggggtcctgtaaggtgcttcatcgtctgtgattactgcttgggatgtgttctttggcagcttgtgagattactttacctagtgtttataaagtaggaagttaagtgaatcatagattagaatttaatactcttatggaaataattttttaacatcttaattgacaatggcgtttttttatacataaccatggatgtagtgggaaacaatgttgtttggtaaaaataatgtacttgatcaatgtcaacaaagtatataaaatagtcttatt

SEQ ID NO: 378054 - DNA, 5571 bp, Homo sapiens
cccaagtagctggggctatagtcacaggccaccacacctggctgatttttcaattttttgtagaaacggggtcttgtacgttgcctgggctggtcttgaactgttggtctcaagtgatccttccaccttggtctcccaaagcactgggattacagatgtcagccaccgggcctacctaagaaaaatatttaaatttaatatcagtatctgtggggaattggttccaggaccccctgaggataccaaaatccatggatgctcaagttccttatataacatggtatagtatttgcatataacctatacgcatcttcccacaaacttttaatcctctctagattatttatgatacctaatacgatgtaaatgctatgtaaatagttgttatatggtattgtttagggaacaatgccaaggaaaaaagtctacatgttcagtagagacacaacttttcattttctttcctgaatatttttgatacgcggttggttgaatccactatgcagaacccacagatctggaggacctactataatttaatttaattctaagaaatgttgctgaagtgctgctgaaagggccagagatgcaaggatttgggatacattttgaacctttaagctgtctgacattgacctcctttcattattaataaagaagaatcaggagcttaggatgtattaacaccaactcattaatatactaaccggacaatgttctacaaacaattctacattgtaaaggactggattggcacaaaataaaataattttattttattcagcttataatatgactcgatggaggaaaatttgataagcatgagagaagaccattcttttcatgttcgttacagaatggaagcttcttgcctagagctggccttggaaggggaacgtctatgtaaatcaggagactgccgcgctggcgtgtcattctttgaagctgcagttcaagttggaactgaagacctaaaaacacttagcgctatttacagccagttgggcaatgcttatttctatttgcatgattatgccaaagcattagaatatcaccatcatgatttaacccttgcaaggactattggagaccagctgggggaagcgaaagctagtggtaatctgggaaacaccttaaaagttcttgggaattttgacgaagccatagtttgttgtcagcgacacctagatatttccagagagcttaatgacaaggtgggagaagcaagagcactttacaatcttgggaatgtgtatcatgccaaagggaaaagttttggttgccctggtccccaggatgtaggagaatttccagaagaagtgagagatgctctgcaggcagccgtggatttttatgaggaaaacctatcattagtgactgctttgggtgaccgagcggcacaaggacgtgcctttggaaatcttggaaacacacattacctccttggcaacttcagggatgcagttatagctcatgagcagcgtctccttattgcaaaagaatttggagataaagcagctgaaagaagagcatatagcaaccttggaaatgcatatatatttcttggtgaatttgaaactgcctcggaatactacaagaagacactactgttggcccgacagcttaaagaccgagctgtagaagcacagtcttgttacagtcttggaaatacatatactttacttcaagactatgaaaaggccattgattatcatctgaagcacttagcaattgctcaagagctgaatgatagaattggtgaaggaagagcatgttggagcttaggaaatgcatacacagcactaggaaatcatgatcaagcaatgcattttgctgaaaagcacttggaaatttcaagagaggttggggataaaagtggtgaactaacagcacgacttaatctctcagaccttcaaatggttcttggtctgagctacagcacaaataactccataatgtctgaaaatactgaaattgatagcagtttgaatggtgtacgccccaagttgggacgccggcatagtatggaaaatatggaacttatgaagttaacaccagaaaaggtacagaactggaacagtgaaattcttgctaagcaaaaacctcttattgccaaaccttctgcaaagctactctttgtcaacagactgaaggggaaaaaatacaaaacgaattcctccactaaagttctccaagatgccagtaattctattgaccaccgaattccaaattctcagaggaaaatcagtgcagatactattggagatgaagggttctttgacttattaagccgatttcaaagcaataggatggatgatcagagatgttgcttacaagaaaagaactgccatacagcttcaacaacaacttcttccactccccctaaaatgatgctaaaaacatcatctgttcctgtggtatcccccaacacggatgagtttttagatcttcttgccagctcacagagtcgccgtctggatgaccagagggctagtttcagtaatttgccagggcttcgtctaacacaaaacagccagtcggtacttagccacctgatgactaatgacaacaaagaggctgatgaagatttctttgacatccttgtaaaatgtcaaggatccagattagatgatcaaagatgtgctccaccacctgctaccacaaagggtccgacagtaccagatgaagactttttcagccttattttacggtcccagggaaagagaatggatgaacagagagttcttttacaaagagatcaaaacagagacactgactttgggctaaaggactttttgcaaaataatgctttgttggagtttaaaaattcagggaaaaaatcggcagaccattagttactatggatttattttttttcctttcaaacacggtaaggaaacaatctattacttttttccttaaaaggagaatttatagcactgtaatacagcttaaaatatttttagaatgatgtaaatagttaaccttcagtagtctattaaggcattaatacttctctggacatgcgcgtttgagggtggaggggtcctgtaaggtgcttcatcgtctgtgattactgcttgggatgtgttctttggcagcttgtgagattactttacctagtgtttataaagtaggaagttaagtgaatcatagattagaatttaatactcttatggaaataattttttaacatcttaattgacaatggcgtttttttatacataaccatggatgtagtgggaaacaatgttgtttggtaaaaataatgtacttgatcaatgtaaaaaagtatataaaatagtcttactaaaaatctaggtttttttttcctccatgaaaatctgtttttttaggccaaagtcagtataaaagaaactctacttcttgggctgggcatggtggctcattcctgtaatcccagcacattgggaggctgaggcaggaggatcgcttgaggctaggagttcaagaccaacctgggcaacatagacccccgtgtctatgaaaaataaatcagcagccaggcgcagtggctcacacctgtaatcccagcactttgggaggccgaagcgggcggatcacttgaggtcgggagtttgagaccagcctggccaacatagtgaaaccctgtctctactaaaaatacaaaaattagctgggcatggtggcatgcgcctgtagtttcagctacttgggaggctgaggcaggagaatcacttgaacccctgggaggcagagattgcagtgagctgagaccaagccactggactccagcctgagtgacagagcaagactctgtctcaaaaaaaaaaaaacagcaagcatgctggcacacacctgtagtcccaactgcttaagaggctgaggcaggaggaccacttgagcccaggaggtggaggctgcactgagctatgatcgtgccactgcactccagcctgggtgacagagcaagaccctgtctctagaaaacaagtatcttttgtgtgttttgggctgtttaaaaaaattatttaaaatggtctcttctgttccataatactgctgtaaaacaaacttttctaagttctaatataaaaacaaaaaacaaaacccatgtggttaggtcaagaacctaggacacataaacaaacagaaaacagatgaaaactcacaaaaattaaatatgaaagaaagatgtcagctagaaccttagttgtcattaagctttgtcttccttatcccagatattgaaggcagtttacaaggggatgataacaaagtaactaactaactgtagcaaaagacaagtatgggacagactgggacctggagtaacactggatcacagactgcaaaggcccacgcttggaacaagttgccaacttgtttcactctgcttgcttcagactgtgcacagctgggatgggatctggggatgtggacccctattctttcaaaaagtcattcaggtgatttggatgggcaaatagaactatttctctaatggccaatgttttttaagagtcataacctggaattaattacattaagtgctcagctaaaaaaaaaaaaaaagttctaaattacaacctggattacattatgtttcatgtatactataaggtatgatgtcctggatagcattttaaaaactcaggtaagtttcatggggttcttataagaaaattcagttaagacaatataccaaaccacaacgtaaaaagtttgtgtatacaaactttttgtattatttgtacacaaagtacaaatttgtatttgtacacaaagtacaaactttgtgtattattttgtgtatacaatagttcttacagcctgtaaacattcaacattattccatttaaacattgtttttaacagctgtctaccctgttctgattttcctaaaagcttcacactatataggctgggcacaatggctcatgcctgtaatcccagcactttgggaggccgacaagggcgggtcacttgaggtcaggagttcgagaccagcctgaccaacatggtgaaaccccatcgacgcgtgggtcgacccacgcgtccgaaaggactttttgcaaaataatgcttagttggagtttaaaaattcaggcaaaaaatcggcagaccattagttactatggatttattttttttcctttcaaacacggtaaggaaacaatctattacttttttccttaaaaggagaatttatagcactgtaatacagcttaaaatatttttagaatgatgtaaatagttaaccttcagtagtctattaaggcattaatacttctctggacatgcgcgtttgagggtggaggggtcctgtaaggtgcttcatcgtctgtgattactgcttgggatgtgttctttggcagcttgtgagattactttacctagtgtttataaagtaggaagttaagtgaatcatagattagaatttaatactcttatggaaataattttttaacatcttaattgacaatggcgtttttttatacataaccatggatgtagtgggaaacaatgttgtttggtaaaaataatgtacttgatcaatgtcaacaaagtatataaaatagtcttatt

SEQ ID NO: 378055 - DNA, 5341 bp, Homo sapiens
agaagaggacaggaaagaaacttcagtctgagggttgaggacacgtcccggagcagaggaggaccaagctcccaagccccctgtcaccttgacacgcagacggttccccaggactgcgaagaggggggcaaccagcgccccgccccgccccgctgcgccgcccgccattggccggtccgaaagacgcggggcgttgtcggtttgaatgagagcgcctggagccggggcgcaggcgcagaggagggcggtgttgagaccggcggagcggcgggacccctaggtggcggagggacgctccgggaaagcgaggggcgctacgagctctggcccacgtgacctgccgggggcgggagcagggggcgcgccggcctcctgcggtgcccctgccttggggaggggccgtgaccacccgtctgtcgcccgaggcggccgccgctgcaccttcaccgcgtacccgggacccgcccgcccgcgggagaaatgttgctgaagtgctgctgaaagggccagagatgcaaggatttgggatacattttgaacctttaagctgtctgacattgacctcctttcattattaataaagaagaatcaggagcttaggatgtattaacaccaactcattaatatactaaccggacaatgttctacaaacaattctacattgtaaaggactggattggcacaaaataaaataattttattttattcagcttataatatgactcgatggaggaaaatttgataagcatgagagaagaccattcttttcatgttcgttacagaatggaagcttcttgcctagagctggccttggaaggggaacgtctatgtaaatcaggagactgccgcgctggcgtgtcattctttgaagctgcagttcaagttggaactgaagacctaaaaacacttagcgctatttacagccagttgggcaatgcttatttctatttgcatgattatgccaaagcattagaatatcaccatcatgatttaacccttgcaaggactattggagaccagctgggggaagcgaaagctagtggtaatctgggaaacaccttaaaagttcttgggaattttgacgaagccatagtttgttgtcagcgacacctagatatttccagagagcttaatgacaaggtgggagaagcaagagcactttacaatcttgggaatgtgtatcatgccaaagggaaaagttttggttgccctggtccccaggatgtaggagaatttccagaagaagtgagagatgctctgcaggcagccgtggatttttatgaggaaaacctatcattagtgactgctttgggtgaccgagcggcacaaggacgtgcctttggaaatcttggaaacacacattacctccttggcaacttcagggatgcagttatagctcatgagcagcgtctccttattgcaaaagaatttggagataaagcagctgaaagaagagcatatagcaaccttggaaatgcatatatatttcttggtgaatttgaaactgcctcggaatactacaaaattggtgaaggaagagcatgttggagcttaggaaatgcatacacagcactaggaaatcatgatcaagcaatgcattttgctgaaaagcacttggaaatttcaagagaggttggggataaaagtggtgaactaacagcacgacttaatctctcagaccttcaaatggttcttggtctgagctacagcacaaataactccataatgtctgaaaatactgaaattgatagcagtttgaatggtgtacgccccaagttgggacgccggcatagtatggaaaatatggaacttatgaagttaacaccagaaaaggtacagaactggaacagtgaaattcttgctaagcaaaaacctcttattgccaaaccttctgcaaagctactctttgtcaacagactgaaggggaaaaaatacaaaacgaattcctccactaaagttctccaagatgccagtaattctattgaccaccgaattccaaattctcagaggaaaatcagtgcagatactattggagatgaagggttctttgacttattaagccgatttcaaagcaataggatggatgatcagagatgttgcttacaagaaaagaactgccatacagcttcaacaacaacttcttccactccccctaaaatgatgctaaaaacatcatctgttcctgtggtatcccccaacacggatgagtttttagatcttcttgccagctcacagagtcgccgtctggatgaccagagggctagtttcagtaatttgccagggcttcgtctaacacaaaacagccagtcggtacttagccacctgatgactaatgacaacaaagaggctgatgaagatttctttgacatccttgtaaaatgtcaaggatccagattagatgatcaaagatgtgctccaccacctgctaccacaaagggtccgacagtaccagatgaagactttttcagccttattttacggtcccagggaaagagaatggatgaacagagagttcttttacaaagagatcaaaacagagacactgactttgggctaaaggactttttgcaaaataatgctttgttggagtttaaaaattcagggaaaaaatcggcagaccattagttactatggatttattttttttcctttcaaacacggtaaggaaacaatctattacttttttccttaaaaggagaatttatagcactgtaatacagcttaaaatatttttagaatgatgtaaatagttaaccttcagtagtctattaaggcattaatacttctctggacatgcgcgtttgagggtggaggggtcctgtaaggtgcttcatcgtctgtgattactgcttgggatgtgttctttggcagcttgtgagattactttacctagtgtttataaagtaggaagttaagtgaatcatagattagaatttaatactcttatggaaataattttttaacatcttaattgacaatggcgtttttttatacataaccatggatgtagtgggaaacaatgttgtttggtaaaaataatgtacttgatcaatgtaaaaaagtatataaaatagtcttactaaaaatctaggtttttttttcctccatgaaaatctgtttttttaggccaaagtcagtataaaagaaactctacttcttgggctgggcatggtggctcattcctgtaatcccagcacattgggaggctgaggcaggaggatcgcttgaggctaggagttcaagaccaacctgggcaacatagacccccgtgtctatgaaaaataaatcagcagccaggcgcagtggctcacacctgtaatcccagcactttgggaggccgaagcgggcggatcacttgaggtcgggagtttgagaccagcctggccaacatagtgaaaccctgtctctactaaaaatacaaaaattagctgggcatggtggcatgcgcctgtagtttcagctacttgggaggctgaggcaggagaatcacttgaacccctgggaggcagagattgcagtgagctgagaccaagccactggactccagcctgagtgacagagcaagactctgtctcaaaaaaaaaaaaacagcaagcatgctggcacacacctgtagtcccaactgcttaagaggctgaggcaggaggaccacttgagcccaggaggtggaggctgcactgagctatgatcgtgccactgcactccagcctgggtgacagagcaagaccctgtctctagaaaacaagtatcttttgtgtgttttgggctgtttaaaaaaattatttaaaatggtctcttctgttccataatactgctgtaaaacaaacttttctaagttctaatataaaaacaaaaaacaaaacccatgtggttaggtcaagaacctaggacacataaacaaacagaaaacagatgaaaactcacaaaaattaaatatgaaagaaagatgtcagctagaaccttagttgtcattaagctttgtcttccttatcccagatattgaaggcagtttacaaggggatgataacaaagtaactaactaactgtagcaaaagacaagtatgggacagactgggacctggagtaacactggatcacagactgcaaaggcccacgcttggaacaagttgccaacttgtttcactctgcttgcttcagactgtgcacagctgggatgggatctggggatgtggacccctattctttcaaaaagtcattcaggtgatttggatgggcaaatagaactatttctctaatggccaatgttttttaagagtcataacctggaattaattacattaagtgctcagctaaaaaaaaaaaaaaagttctaaattacaacctggattacattatgtttcatgtatactataaggtatgatgtcctggatagcattttaaaaactcaggtaagtttcatggggttcttataagaaaattcagttaagacaatataccaaaccacaacgtaaaaagtttgtgtatacaaactttttgtattatttgtacacaaagtacaaatttgtatttgtacacaaagtacaaactttgtgtattattttgtgtatacaatagttcttacagcctgtaaacattcaacattattccatttaaacattgtttttaacagctgtctaccctgttctgattttcctaaaagcttcacactatataggctgggcacaatggctcatgcctgtaatcccagcactttgggaggccgacaagggcgggtcacttgaggtcaggagttcgagaccagcctgaccaacatggtgaaaccccatcgacgcgtgggtcgacccacgcgtccgaaaggactttttgcaaaataatgcttagttggagtttaaaaattcaggcaaaaaatcggcagaccattagttactatggatttattttttttcctttcaaacacggtaaggaaacaatctattacttttttccttaaaaggagaatttatagcactgtaatacagcttaaaatatttttagaatgatgtaaatagttaaccttcagtagtctattaaggcattaatacttctctggacatgcgcgtttgagggtggaggggtcctgtaaggtgcttcatcgtctgtgattactgcttgggatgtgttctttggcagcttgtgagattactttacctagtgtttataaagtaggaagttaagtgaatcatagattagaatttaatactcttatggaaataattttttaacatcttaattgacaatggcgtttttttatacataaccatggatgtagtgggaaacaatgttgtttggtaaaaataatgtacttgatcaatgtcaacaaagtatataaaatagtcttatt

SEQ ID NO: 378056 - DNA, 3164 bp, Homo sapiens
agaagaggacaggaaagaaacttcagtctgagggttgaggacacgtcccggagcagaggaggaccaagctcccaagccccctgtcaccttgacacgcagacggttccccaggactgcgaagaggggggcaaccagcgccccgccccgccccgctgcgccgcccgccattggccggtccgaaagacgcggggcgttgtcggtttgaatgagagcgcctggagccggggcgcaggcgcagaggagggcggtgttgagaccggcggagcggcgggacccctaggtggcggagggacgctccgggaaagcgaggggcgctacgagctctggcccacgtgacctgccgggggcgggagcagggggcgcgccggcctcctgcggtgcccctgccttggggaggggccgtgaccacccgtctgtcgcccgaggcggccgccgctgcaccttcaccgcgtacccgggacccgcccgcccgcgggagaaatgttgctgaagtgctgctgaaagggccagagatgcaaggatttgggatacattttgaacctttaagctgtctgacattgacctcctttcattattaataaagaagaatcaggagcttaggatgtattaacaccaactcattaatatactaaccggacaatgttctacaaacaattctacattgtaaaggactggattggcacaaaataaaataattttattttattcagcttataatatgactcgatggaggaaaatttgataagcatgagagaagaccattcttttcatgttcgttacagaatggaagcttcttgcctagagctggccttggaaggggaacgtctatgtaaatcaggagactgccgcgctggcgtgtcattctttgaagctgcagttcaagttggaactgaagacctaaaaacacttagcgctatttacagccagttgggcaatgcttatttctatttgcatgattatgccaaagcattagaatatcaccatcatgatttaacccttgcaaggactattggagaccagctgggggaagcgaaagctagtggtaatctgggaaacaccttaaaagttcttgggaattttgacgaagccatagtttgttgtcagcgacacctagatatttccagagagcttaatgacaaggtgggagaagcaagagcactttacaatcttgggaatgtgtatcatgccaaagggaaaagttttggttgccctggtccccaggatgtaggagaatttccagaagaagtgagagatgctctgcaggcagccgtggatttttatgaggaaaacctatcattagtgactgctttgggtgaccgagcggcacaaggacgtgcctttggaaatcttggaaacacacattacctccttggcaacttcagggatgcagttatagctcatgagcagcgtctccttattgcaaaagaatttggagataaagcagctgaaagaagagcatatagcaaccttggaaatgcatatatatttcttggtgaatttgaaactgcctcggaatactacaagaagacactactgttggcccgacagcttaaagaccgagctgtagaagcacagtcttgttacagtcttggaaatacatatactttacttcaagactatgaaaaggccattgattatcatctgaagcacttagcaattgctcaagagctgaatgatagaattggtgaaggaagagcatgttggagcttaggaaatgcatacacagcactaggaaatcatgatcaagcaatgcattttgctgaaaagcacttggaaatttcaagagaggttggggataaaagtggtgaactaacagcacgacttaatctctcagaccttcaaatggttcttggtctgagctacagcacaaataactccataatgtctgaaaatactgaaattgatagcagtttgaatggtgtacgccccaagttgggacgccggcatagtatggaaaatatggaacttatgaagttaacaccagaaaaggtacagaactggaacagtgaaattcttgctaagcaaaaacctcttattgccaaaccttctgcaaagctactctttgtcaacagactgaaggggaaaaaatacaaaacgaattcctccactaaagttctccaagatgccagtaattctattgaccaccgaattccaaattctcagaggaaaatcagtgcagatactattggagatgaagggttctttgacttattaagccgatttcaaagcaataggatggatgatcagagatgttgcttacaagaaaagaactgccatacagcttcaacaacaacttcttccactccccctaaaatgatgctaaaaacatcatctgttcctgtggtatcccccaacacggatgagtttttagatcttcttgccagctcacagagtcgccgtctggatgaccagagggctagtttcagtaatttgccagggcttcgtctaacacaaaacagccagtcggtacttagccacctgatgactaatgacaacaaagaggctgatgaagatttctttgacatccttgtaaaatgtcaaggatccagattagatgatcaaagatgtgctccaccacctgctaccacaaagggtccgacagtaccagatgaagactttttcagccttattttacggtcccagggaaagagaatggatgaacagagagttcttttacaaagagatcaaaacagagacactgactttgggctaaaggactttttgcaaaataatgctttgttggagtttaaaaattcagggaaaaaatcggcagaccattagttactatggatttattttttttcctttcaaacacggtaaggaaacaatctattacttttttccttaaaaggagaatttatagcactgtaatacagcttaaaatatttttagaatgatgtaaatagttaaccttcagtagtctattaaggcattaatacttctctggacatgcgcgtttgagggtggaggggtcctgtaaggtgcttcatcgtctgtgattactgcttgggatgtgttctttggcagcttgtgagattactttacctaaagctcgaaggagacttgaggctgtcgtttgtgctggtgttcctctagccacaggggctgctgaccggatcctgtccacgtggtccagccacacctcttgcggggctgtatgtgct

SEQ ID NO: 378057 - DNA, 316 bp, Homo sapiens
tattgggggtggggaggggaggggagtgaaatgatatacatttggaggcaccctcaggtaatcacactatagaaataatgctgctagttaagaggtttgttgcaaagatgtaaagcagcatgtacagaatttgttggacgtctgctttaggtataatttaatatctccacgtatcttttaatagactaataaaaaaccatagttaactacagttttcaaatagcaaataacatataatttagaggtgaggaatacagaagaaggtttttatctatacagtgtgacttacctaggtacgcaatctttaaacaaaatg

SEQ ID NO: 378058 - DNA, 308 bp, Homo sapiens
gattcttgaatatgctgcttgatatttccacgctaatatgaaatgatttactaatgaactcctgcccaggatgattgcaaacgttaactaatatctgattatttagtaccctataagtaaaaacagccatgagtaatgctagctgtataatagaagattagtaaatgttccttttttttttaaagaaattatttaaaattccttttaccccaatgggaaatacacagaggtgatactgtgggtttttaaaggattgtaataaatagcagattaagcacatagctatgataaataatagctgtcaatgg

SEQ ID NO: 378059 - DNA, 2097 bp, Homo sapiens
gagaaacctcatcctcgcactgtggtatactaactgcaaagaagctcttactcctcagaaatgtattcctcacatcatcgtccggggtctcgtgcgtattcgatgcgttcaggaagtggagagaatactgtattttatgaccagaaaaggtctcatcaacactggagttctcagcgtgggagccgaccagtatcttctccctaaggactaccacaataaatcagtcatcattatcggggctggtccagcaggattagcagctgctaggcaactgcataactttggaattaaggtgactgtcctggaagccaaagacagaattggaggccgagtctgggatgataaatcttttaaaggcgtcacagtgggaagaggagctcagattgtcaatgggtgtattaacaacccagtagcattaatgtgtgaacaacttggcatcagcatgcataaatttggagaaagatgtgacttaattcaggaaggtggaagaataactgaccccactattgacaagcgcatggattttcattttaatgctctcttggatgttgtctctgagtggagaaaggataagactcagctccaagatgtccctttaggagaaaagatagaagaaatctacaaggcatttattaaggaatctggtatccaattcagtgagctggagggacaggtgcttcagttccatctcagtaacctggagtacgcctgtggcagcaaccttcaccaggtgcgcttgggttttgtgaaaggtgtgctttgaaaatacttggtttaggccgggcgcagtggctcagcctcccaaagtgctggtattacagatgtgagccaccgcacccagcctgagtttctctttctctctttttaactttattttttgaaaaacccggtagactttgtggggagcatttttgttgataattttactgatctaaagctgagtgattttttaaaagaatttgaatttggcttcctcaccagtaatatgtctccttgcttctttgatgtgatagttttgagatgggtgagaatctaatagatctgtggttgaatttgctgtgttgttatgaagtccaccctgtgggcacaataacataactgttggtaggagttgtttgagctattctggagattatttggtaaagtatactaaaagccttaaaaccatgtatgtgcgctgtttgaaccagtaagccacttctttgacattagaagacattagaagaaataatcagccttgcataaaacttatggatgaaagtattcatcacaatattatttataataaaaaattgcaaatgttataaatgaacaattgggaaatggttaaagaagtgatggtgcattgtgtggtagaatattatgcatatgtttaaagaatcatattttctaagattatttggaagcatgtttggtaatgtcaagtggagtaccccagatacattttagacatttatcgtcatcatctgctctgagtggaaggccgttcagagaggctagaggttcttattctggctataaattatgtgagtaaaattgtgctaaccagttaaaagtactgtacacccatgctcaatatatagtcctggaaatagcaattgaaacatgtcttctcacaagagaaaatgacagttttaatgatgtatttgatgaatttaaactttaagtcaggtgctgcaaattggaaagaagacttgtggtgttttaagttgctgtggacacttttaagaaacttagaacccatggaacccttgtttatcgccatgcaaattacaatcttgaatgagtgttttttaaaaataaagtattagaaaaatgtgtagtaaagatgtaaaattaaaaaatggaattctccattaactgtggattttactaaatagaattactggtgaagcagatttatccatcgagactatctggtatgcgttatgtatgtagtctgttgctgctgaaagatgtctgtgtgcctgtatcaacatgtgacttcatgtaaagtttctttgtgttcacagttcttagcaaatgcagttacaatccatagatagccagcagtggatgttactccaggaaaatgcaggattaaaattgtccttgtgt

SEQ ID NO: 378060 - DNA, 240 bp, Homo sapiens
tgctgtttgtttgttaactgttaattattttccacaggtattagtcactgtaccactggctttactacagaaaggtgccattcagtttaatccaccgttgtcagagaagaagatgaaggctatcaacagcttaggcgcaggcatcattgaaaagattgtcttgctaatttccgtattagattttgggtacagtaaggtacaagggtctgacttttctgctcacgttcctctcctgtatct

SEQ ID NO: 378061 - DNA, 2983 bp, Homo sapiens
  misc_feature (2891)..(2891): n is a, c, g, or t
gagaaacctcatcctcgcactgtggtatactaactgcaaagaagctcttactcctcagaaatgtattcctcacatcatcgtccggggtctcgtgcgtattcgatgcgttcaggaagtggagagaatactgtattttatgaccagaaaaggtctcatcaacactggagttctcagcgtgggagccgaccagtatcttctccctaaggactaccacaataaatcagtcatcattatcggggctggtccagcaggattagcagctgctaggcaactgcataactttggaattaaggtgactgtcctggaagccaaagacagaattggaggccgagtctgggatgataaatcttttaaaggcgtcacagtgggaagaggagctcagattgtcaatgggtgtattaacaacccagtagcattaatgtgtgaacaacttggcatcagcatgcataaatttggagaaagatgtgacttaattcaggaaggtggaagaataactgaccccactattgacaagcgcatggattttcattttaatgctctcttggatgttgtctctgagtggagaaaggataagactcagctccaagatgtccctttaggagaaaagatagaagaaatctacaaggcatttattaaggaatctggtatccaattcagtgagctggagggacaggtgcttcagttccatctcagtaacctggagtacgcctgtggcagcaaccttcaccaggtatctgctcgctcgtgggaccacaatgaattctttgcccagtttgctggtgaccacactctgctaactcccgggtactcggtgataattgaaaaactggcagaagggcttgacattcaactcaaatctccacaggtgcagtgtattgattattctggagatgaagtgcaggttaccactacagatggcacagggtattctgcacaaaaggtattagtcactgtaccactggctttactacagaaaggtgccattcagtttaatccaccgttgtcagagaagaagatgaaggctatcaacagcttaggcgcaggcatcattgaaaagattgccttgcaatttccgtatagattttgggacagtaaagtacaaggggctgacttttttggtcacgttcctcccagtgccagcaagcgagggctttttgccgtgttctatgacatggatccccagaagaagcacagcgtgctgatgtctgtgattgccggggaggctgtcgcatccgtgaggaccctggacgacaaacaggtgctgcagcagtgcatggccacgctccgggagctgttcaaggagcaggaggtcccagatcccacaaagtattttgtcactcggtggagcacagacccatggatccagatggcatacagttttgtgaagacaggtggaagtggggaggcctacgatatcattgctgaagacattcaaggaaccgtctttttcgctggtgaggcaacaaacaggcatttcccacaaactgttacaggggcatatttgagtggcgttcgagaagcaagcaagattgcagcattttaagaattcggtggacccagctttcttctgtaccccagatggggaaatttgaatcacatgttaaacctcagttttataagagggggaaaaaaccgtctctacatagtaaaactgaaatgtttctaaggcgatatgataatgcaaacctatttcatcactctaaaagcactgacctcaaaaaaccttataagcacttagatttaattgcattttccataggttcaactactgctgaaagtctggatttcagaataaagcagaatgtaagtttcagttgaggccatggatttgattgttccatggctggaagttccctttagatttcacattttatatggctgatcaattttcatacattgagaaaccaagtcaatcaagcaggaatcatttaaaaaccagataaagccatgtttttcttctgtgacaatttatcagtatctttaccaatgagccttaatttttatataggtccaatattgagcttttacttaaaatttagatagaacttttttttggatacagcacaaactccagttgacagtaaaatgaagcttctaggtattttgtattgtacatatttcctcctactgggtgttcaaaagaaatttaaattcaagtaccttttgtgataaaatgttttagatttgtgcacccattggcaaaacaggaaagtttccagataggtattgtatcattgagaatgcagcacagatagtgtgggcttcacactatagacacagaatatagctttttcttaaagccaaatttgggtgataggacactttaaatatccttaattttggcaaccactagcaaaaaaacttgtcagaataatttaaccaagcccctctccacttcttttatttaaaagcactgattcaattgctaggaatatttttgcagatttttctttacagtattccataggcaggtccactggaaaactgcagaaaaatgtgagctctcctggtaaatagtatacattttataagctatattttaaaggcctaagaacatggcaagtatttacttttatcttttttttaaaaacactcatgacagaaaacagtttaataatatctcattctaaaataaaacactggttgcagggtcttcaggatgcctattttgccaagaaacttcagtatacaggttagaaatatgcttttgtttttgaacaataatatactggtttgctttaaagaagggactaaatatgactttaaagagacttcaaaatattgagtattttaaaaatttaaaagtaggtcagtttataacgagtaaatacctaacacaccaagaatgtgcagtgaacctcaggcatttaagacacctcccccaccgccgngcgtggatttgtaataaagttggttcctaaatagaccaatttttgtatgtttaagttacctcccaactctggttttgttattttttcagacc

SEQ ID NO: 378062 - DNA, 2431 bp, Homo sapiens
gagaaacctcatcctcgcactgtggtatactaactgcaaagaagctcttactcctcagaaatgtattcctcacatcatcgtccggggtctcgtgcgtattcgatgcgttcaggaagtggagagaatactgtattttatgaccagaaaaggtctcatcaacactggagttctcagcgtgggagccgaccagtatcttctccctaaggactaccacaataaatcagtcatcattatcggggctggtccagcaggattagcagctgctaggcaactgcataactttggaattaaggtgactgtcctggaagccaaagacagaattggaggccgagtctgggatgataaatcttttaaaggcgtcacagtgggaagaggagctcagattgtcaatgggtgtattaacaacccagtagcattaatgtgtgaacaacttggcatcagcatgcataaatttggagaaagatgtgacttaattcaggaaggtggaagaataactgaccccactattgacaagcgcatggattttcattttaatgctctcttggatgttgtctctgagtggagaaaggataagactcagctccaagatgtccctttaggagaaaagatagaagaaatctacaaggcatttattaaggaatctggtatccaattcagtgagctggagggacaggtgcttcagttccatctcagtaacctggagtacgcctgtggcagcaaccttcaccaggtatctgctcgctcgtgggaccacaatgaattctttgcccagtttgctggtgaccacactctgctaactcccgggtactcggtgataattgaaaaactggcagaagggcttgacattcaactcaaatctccacaggtgcagtgtattgattattctggagatgaagtgcaggttaccactacagatggcacagggtattctgcacaaaaggtattagtcactgtaccactggctttactacagaaaggtgccattcagtttaatccaccgttgtcagagaagaagatgaaggctatcaacagcttaggcgcaggcatcattgaaaagattgccttgcaatttccgtatagattttgggacagtaaagtacaaggggctgacttttttggtcacgttcctcccagtgccagcaagcgagggctttttgccgtgttctatgacatggatccccagaagaagcacagcgtgctgatgtctgtgattgccggggaggctgtcgcatccgtgaggaccctggacgacaaacaggtgctgcagcagtgcatggccacgctccgggagctgttcaaggagcaggaggtcccagatcccacaaagtattttgtcactcggtggagcacagacccatggatccagatggcatacagttttgtgaagacaggtggaagtggggaggcctacgatatcattgctgaagacattcaaggaaccgtctttttcgctggtgaggcaacaaacaggcatttcccacaaactgttacaggggcatatttgagtggcgttcgagaagcaagcaagattgcagcattttaagaattcggtggacccagctttcttctgtaccccagatggggaaatttgaatcacatgttaaacctcagttttataagagggggaaaaaaccgtctctacatagtaaaactgaaatgtttctaaggcgatatgataatgcaaacctatttcatcactctaaaagcactgacctcaaaaaaccttataagcacttagatttaattgcattttccataggttcaactactgctgaaagtctggatttcagaataaagcagaatgtaagtttcagttgaggccatggatttgattgttccatggctggaagttccctttagatttcacattttatatggctgatcaattttcatacattgagaaaccaagtcaatcaagcaggaatcatttaaaaaccagataaagccatgtttttcttctgtgacaatttatcagtatctttaccaatgagccttaatttttatataggtccaatattgagcttttacttaaaatttagatagaacttttttttggatacagcacaaactccagttgacagtaaaatgggcggcgccctttttttttttttttttttttttttttttgtttgttttttttttttttttttttttttttttatgttatattatgtttttttactttgttgtctactctctatttgtttttttttgtactagtacaccacacatcggctctggcttcttgatgaatgccagccagagatagttttttgctaccactatagatcaaagaattatcgctttgccaataaagaccacatttagcgctgataggcaactaacacatcccttacataggagaggcggaacgcacaaaaatgcagacgtattctgcgtgacaaaacaaaaacgtgggcggccgcatgat

SEQ ID NO: 378063 - DNA, 1405 bp, Homo sapiens
gagaaacctcatcctcgcactgtggtatactaactgcaaagaagctcttactcctcagaaatgtattcctcacatcatcgtccggggtctcgtgcgtattcgatgcgttcaggaagtggagagaatactgtattttatgaccagaaaaggtctcatcaacactggagttctcagcgtgggagccgaccagtatcttctccctaaggactaccacaataaatcagtcatcattatcggggctggtccagcaggattagcagctgctaggcaactgcataactttggaattaaggtgactgtcctggaagccaaagacagaattggaggccgagtctgggatgataaatcttttaaaggcgtcacagtgggaagaggagctcagattgtcaatgggtgtattaacaacccagtagcattaatgtgtgaacaacttggcatcagcatgcataaatttggagaaagatgtgacttaattcaggaaggtggaagaataactgaccccactattgacaagcgcatggattttcattttaatgctctcttggatgttgtctctgagtggagaaaggataagactcagctccaagatgtccctttaggagaaaagatagaagaaatctacaaggcatttattaaggaatctggtatccaattcagtgagctggagggacaggtgcttcagttccatctcagtaacctggagtacgcctgtggcagcaaccttcaccaggtatctgctcgctcgtgggaccacaatgaattctttgcccagtttgctggtgaccacactctgctaactcccgggtactcggtgataattgaaaaactggcagaagggcttgacattcaactcaaatctccacaggtgcagtgtattgattattctggagatgaagtgcaggttaccactacagatggcacagggtattctgcacaaaaggtattagtcactgtaccactggtttaaagtatggtaaatgtgtgttttaaacttcctatcaagtgacatacttcatttgattttttgtttaagaagccatggtacttttttcttgagttactttggatatgttttttcaatgccatctgaagattttgtaattgagtagcagtaaatatacagatttacaatgttttaactacagttcatgaatagctggttgtgtaaaactaataaaaaactagactttcaaaaaaaaaaaaaaaaaaaaattcggagggccacctaactgtcggggtgggggaagaagacgagggtccatgcgaagggggcacaatgggtcaaaacgcgggatcctgagacccaaggtttcctgggtcccaaacggggaacaactctgccgggtcctccccaataagagaagccgaataaatttcagaaaagccagtgtaaacccgggctgag

SEQ ID NO: 378064 - DNA, 3399 bp, Homo sapiens
gagaaacctcatcctcgcactgtggtatactaactgcaaagaagctcttactcctcagaaatgtattcctcacatcatcgtccggggtctcgtgcgtattcgatgcgttcaggaagtggagagaatactgtattttatgaccagaaaaggtctcatcaacactggagttctcagcgtgggagccgaccagtatcttctccctaaggactaccacaataaatcagtcatcattatcggggctggtccagcaggattagcagctgctaggcaactgcataactttggaattaaggtgactgtcctggaagccaaagacagaattggaggccgagtctgggatgataaatcttttaaaggcgtcacagtgggaagaggagctcagattgtcaatgggtgtattaacaacccagtagcattaatgtgtgaacaacttggcatcagcatgcataaatttggagaaagatgtgacttaattcaggaaggtggaagaataactgaccccactattgacaagcgcatggattttcattttaatgctctcttggatgttgtctctgagtggagaaaggataagactcagctccaagatgtccctttaggagaaaagatagaagaaatctacaaggcatttattaaggaatctggtatccaattcagtgagctggagggacaggtgcttcagttccatctcagtaacctggagtacgcctgtggcagcaaccttcaccaggtatctgctcgctcgtgggaccacaatgaattctttgcccagtttgctggtgaccacactctgctaactcccgggtactcggtgataattgaaaaactggcagaagggcttgacattcaactcaaatctccacaggtgcagtgtattgattattctggagatgaagtgcaggttaccactacagatggcacagggtattctgcacaaaaggtattagtcactgtaccactggctttactacagaaaggtgccattcagtttaatccaccgttgtcagagaagaagatgaaggctatcaacagcttaggcgcaggcatcattgaaaagattgccttgcaatttccgtatagattttgggacagtaaagtacaaggggctgacttttttggtcacgttcctcccagtgccagcaagcgagggctttttgccgtgttctatgacatggatccccagaagaagcacagcgtgctgatgtctgtgattgccggggaggctgtcgcatccgtgaggaccctggacgacaaacaggtgctgcagcagtgcatggccacgctccgggagctgttcaaggagcaggaggtcccagatcccacaaagtattttgtcactcggtggagcacagacccatggatccagatggcatacagttttgtgaagacaggtggaagtggggaggcctacgatatcattgctgaagacattcaaggaaccgtctttttcgctggtgaggcaacaaacaggcatttcccacaaactgttacaggggcatatttgagtggcgttcgagaagcaagcaagattgcagcattttaagaattcggtggacccagctttcttctgtaccccagatggggaaatttgaatcacatgttaaacctcagttttataagagggggaaaaaaccgtctctacatagtaaaactgaaatgtttctaaggcgatatgataatgcaaacctatttcatcactctaaaagcactgacctcaaaaaaccttataagcacttagatttaattgcattttccataggttcaactactgctgaaagtctggatttcagaataaagcagaatgtaagtttcagttgaggccatggatttgattgttccatggctggaagttccctttagatttcacattttatatggctgatcaattttcatacattgagaaaccaagtcaatcaagcaggaatcatttaaaaaccagataaagccatgtttttcttctgtgacaatttatcagtatctttaccaatgagccttaatttttatataggtccaatattgagcttttacttaaaatttagatagaacttttttttggatacagcacaaactccagttgacagtaaaatgaagcttctaggtattttgtattgtacatatttcctcctactgggtgttcaaaagaaatttaaattcaagtaccttttgtgataaaatgttttagatttgtgcacccattggcaaaacaggaaagtttccagataggtattgtatcattgagaatgcagcacagatagtgtgggcttcacactatagacacagaatatagctttttcttaaagccaaatttgggtgataggacactttaaatatccttaattttggcaaccactagcaaaaaaacttgtcagaataatttaaccaagcccctctccacttcttttatttaaaagcactgattcaattgctaggaatatttttgcagatttttctttacagtattccataggcaggtccactggaaaactgcagaaaaatgtgagctctcctggtaaatagtatacattttataagctatattttaaaggcctaagaacatggcaagtatttacttttatcttttttttaaaaacactcatgacagaaaacagtttaataatatctcattctaaaataaaacactggttgcagggtcttcaggatgcctattttgccaagaaacttcagtatacaggttagaaatatgcttttgtttttgaacaataatatactggtttgctttaaagaagggactaaatatgactttaaagagacttcaaaatattgagtattttaaaaatttaaaagtaggtcagtttataacgagtaaatacctaacacaccaagaatgtgcagtgaacctcaggcatttaagacacctcccccaccgcccgccccccgccccccccaatcaaagtgtggtcccaaaacaagccaacagctgtatatctcaaaagttaacccaagacaactctgatatttaggttatttgttgagactcattggtactgactggcaagtattctgctttaaagtatcatgtattaaaatgtttagacagcatgtgttttaaagtgataaatgcaaaatgttaagtttgaaatggttaacagtaaattattatgttagtttccaggcacttgaactgtgctacaagtaggggaaaacctactttaaagtatggtaaatgtgtgttttaaacttcctatcaagtgacatacttcatttgattttttgtttaagaagccatggtacttttttcttgagttactttggatatgttttttcaatgccatctgaagattttgtaattgagtagcagtaaatatacagatttacaatgttttaactacagttcatgaatagctggttgtgtaaaactaataaaaaactagactttca

SEQ ID NO: 378065 - DNA, 1192 bp, Homo sapiens
gagaaacctcatcctcgcactgtggtatactaactgcaaagaagctcttactcctcagaaatgtattcctcacatcatcgtccggggtctcgtgcgtattcgatgcgttcaggaagtggagagaatactgtattttatgaccagaaaaggtctcatcaacactggagttctcagcgtgggagccgaccagtatcttctccctaaggactaccacaataaatcagtcatcattatcggggctggtccagcaggattagcagctgctaggcaactgcataactttggaattaaggtgactgtcctggaagccaaagacagaattggaggccgagtctgggatgataaatcttttaaaggcgtcacagtgggaagaggagctcagattgtcaatgggtgtattaacaacccagtagcattaatgtgtgaacaacttggcatcagcatgcataaatttggagaaagatgtgacttaattcaggaaggtggaagaataactgaccccactattgacaagcgcatggattttcattttaatgctctcttggatgttgtctctgagtggagaaaggataagactcagctccaagatgtccctttaggagaaaagatagaagaaatctacaaggcatttattaaggaatctggtatccaattcagtgagctggagggacaggtgcttcagttccatctcagtaacctggagtacgcctgtggcagcaaccttcaccaggtatctgctcgctcgtgggaccacaatgaattctttgcccagtttgctggtgaccacactctgctaactcccgggtactcggtgataattgaaaaactggcagaagggcttgacattcaactcaaatctccacaggtgcagtgtattgattattctggagatgaagtgcaggttaccactacagatggcacagggtattctgcacaaaaggtattagtcactgtaccactggtttaaagtatggtaaatgtgtgttttaaacttcctatcaagtgacatacttcatttgattttttgtttaagaagccatggtacttttttcttgagttactttggatatgttttttcaatgccatctgaagattttgtaattgagtagcagtaaatatacagatttacaatgttttaactacagttcatgaatagctggttgtgtaaaactaataaaaaactagactttca

SEQ ID NO: 378066 - DNA, 2545 bp, Homo sapiens
cgcggagacttgtccgtcacgtgcggccgcccggcctctcggccttgccgcgcgcctggcggggttgggggggcggggaccaagatctgctgcgcctgcgttgtgggcgttctcgggaagctgctgccgtagctgccgccgccgctaccaccgcgttcgggtgtagaatttggaatccctgcgccgcgttaacaatgaagcagagttcgaacgtgccggctttcctcagcaagctgtggacgcttgtggaggaaacccacactaacgagttcatcacctggagccagaatggccaaagttttctggtcttggatgagcaacgatttgcaaaagaaattcttcccaaatatttcaagcacaataatatggcaagctttgtgaggcaactgaatatgtatggtttccgtaaagtagtacatatcgactctggaattgtaaagcaagaaagagatggtcctgtagaatttcagcatccttacttcaaacaaggacaggatgacttgttggagaacattaaaaggaaggtttcatcttcaaaaccagaagaaaataaaattcgtcaggaagatttaacaaaaattataagtagtgctcagaaggttcagataaaacaggaaactattgagtccaggctttctgaattaaaaagtgagaatgagtccctttggaaggaggtgtcagaattacgagcaaagcatgcacaacagcaacaagttattcgaaagattgtccagtttattgttacattggttcaaaataaccaacttgtgagtttaaaacgtaaaaggcctctacttctaaacactaatggagcccaaaagaagaacctgtttcagcacatagtcaaagaaccaactgataatcatcatcataaagttccacacagtaggactgaaggtttaaagccaagggagaggatttcagatgacatcattatttatgatgttactgatgataatgcagatgaagaaaatatcccagttattccagaaactaatgaggatgttatatctgatccctccaactgtagccagtaccctgatattgtcatcgttgaagatgacaatgaagatgagtatgcacctgtcattcagagtggagagcagaatgaaccagccagagaatccctaagttcaggcagtgatggcagcagccctctcatgtctagtgctgtccagctaaatggctcatccagtctgacctcagaagatccagtgaccatgatggattccattttgaatgataacatcaatcttttgggaaaggttgagctgttggattatcttgacagtattgactgcagtttagaggacttccaggccatgctatcaggaagacaatttagcatagacccagatctcctggttgatcttttcactagttctgtgcagatgaatcccacagattacatcaataatacaaaatctgagaataaaggattagaaactaccaagaacaatgtagttcagccagtttcggaagagggaagaaaatctaaatccaaaccagataagcagcttatccagtataccgcctttccacttcttgcattcctcgatgggaaccctgcttcttctgttgaacaggcgagtacaacagcatcatcagaagttttgtcctctgtagataaacccatagaagttgatgagcttctggatagcagcctagacccagaaccaacccaaagtaagcttgttcgcctggagccattgactgaagctgaagctagtgaagctacactgttttatttatgtgaacttgctcctgcacctctggatagtgatatgccacttttagatagctaaatccccaggaagtggactttacatgtatatattcatcaaaatgatgaactatttattttaaagtatcatttggtactttttttgtaaattgctttgttttgtttaatcagatactgtggaataaaagcaccttttgcttttctcactaaccacacactcttgcagagctttcaggtgttactcagctgcatagttacgcagatgtaatgcacattattggcgtatctttaagttggattcaaatggccatttttctccaattttggtaaattggatatcttttttttacaaatacgaccattaacctcagttaaatttttgtttgttttcctgtttgatgctgtctatttgcattgagtgtaagtcatttgaactaatggtataactcctaaagctttctctgctccagttatttttattaaatatttttcacttggcttatttttaaaactgggaacataaagtgcctgtatcttgtaaaacttcatttgtttcttttggttcagagaagttcatttatgttcaaagacgtttattcatgttcaacaggaaagacaaagtgtacgtgaatgctcgctgtctgatagggttccagctccatatatatagaaagatcgggggtgggatgggatggagtgagccccatccagttagttggactagttttaaataaaggttttccggtttgtgtttttttgaaccatactgtttagtaaaataaatacaatgaatgttgagta

SEQ ID NO: 378067 - DNA, 358 bp, Homo sapiens
tgtaattgaaccaaagttttcttggtctcataaatacatatagtaaaaacaagtgtagttcagttgtctggtattcttaattaaagatactatggtctggttttttgattgattttttttttgttttgttgcttaataaattataacatagtgagaatgagtccctttggaaggaggtgtcagaattacgagcaaagcatgcacaacagcaacaagttattcgaaaggtaagaagctcttttccccaggaccataatttgcatttgtttaatgagtactgtttgtgacccaaaaaggtctttattgagtgtctgtgattgatcttagtttcttacatattggatgcacagatagaagt

SEQ ID NO: 378068 - DNA, 2491 bp, Homo sapiens
cgcggagacttgtccgtcacgtgcggccgcccggcctctcggccttgccgcgcgcctggcggggttgggggggcggggaccaagatctgctgcgcctgcgttgtgggcgttctcgggaagctgctgccgtagctgccgccgccgctaccaccgcgttcgggtgtagaatttggaatccctgcgccgcgttaacaatgaagcagagttcgaacgtgccggctttcctcagcaagctgtggacgcttgtggaggaaacccacactaacgagttcatcacctggagccagaatggccaaagttttctggtcttggatgagcaacgatttgcaaaagaaattcttcccaaatatttcaagcacaataatatggcaagctttgtgaggcaactgaatatgtatggtttccgtaaagtagtacatatcgactctggaattgtaaagcaagaaagagatggtcctgtagaatttcagcatccttacttcaaacaaggacaggatgacttgttggagaacattaaaaggaaggtttcatcttcaaaaccagaagaaaataaaattcgtcaggaagatttaacaaaaattataagtagtgctcagaaggttcagataaaacaggaaactattgagtccaggctttctgaattaaaaagtgagaatgagtccctttggaaggaggtgtcagaattacgagcaaagcatgcacaacagcaacaagttattcgaaagattgtccagtttattgttacattggttcaaaataaccaacttgtgagtttaaaacgtaaaaggcctctacttctaaacactaatggagcccaaaagaagaacctgtttcagcacatagtcaaagaaccaactgataatcatcatcataaagttccacacagtaggactgaaggtttaaagccaagggagaggatttcagatgacatcattatttatgatgttactgatgataatgcagatgaagaaaatatcccagttattccagaaactaatgaggatgttatatctgatccctccaactgtagccagtaccctgatattgtcatcgttgaagatgacaatgaagatgagtatgcacctgtcattcagagtggagagcagaatgaaccagccagagaatccctaagttcaggcagtgatggcagcagccctctcatgtctagtgctgtccagctaaatggctcatccagtctgacctcagaagatccagtgaccatgatggattccattttgaatgataacatcaatcttttgggaaaggttgagctgttggattatcttgacagtattgactgcagtttagaggacttccaggccatgctatcaggaagacaatttagcatagacccagatctcctggttgattctgagaataaaggattagaaactaccaagaacaatgtagttcagccagtttcggaagagggaagaaaatctaaatccaaaccagataagcagcttatccagtataccgcctttccacttcttgcattcctcgatgggaaccctgcttcttctgttgaacaggcgagtacaacagcatcatcagaagttttgtcctctgtagataaacccatagaagttgatgagcttctggatagcagcctagacccagaaccaacccaaagtaagcttgttcgcctggagccattgactgaagctgaagctagtgaagctacactgttttatttatgtgaacttgctcctgcacctctggatagtgatatgccacttttagatagctaaatccccaggaagtggactttacatgtatatattcatcaaaatgatgaactatttattttaaagtatcatttggtactttttttgtaaattgctttgttttgtttaatcagatactgtggaataaaagcaccttttgcttttctcactaaccacacactcttgcagagctttcaggtgttactcagctgcatagttacgcagatgtaatgcacattattggcgtatctttaagttggattcaaatggccatttttctccaattttggtaaattggatatcttttttttacaaatacgaccattaacctcagttaaatttttgtttgttttcctgtttgatgctgtctatttgcattgagtgtaagtcatttgaactaatggtataactcctaaagctttctctgctccagttatttttattaaatatttttcacttggcttatttttaaaactgggaacataaagtgcctgtatcttgtaaaacttcatttgtttcttttggttcagagaagttcatttatgttcaaagacgtttattcatgttcaacaggaaagacaaagtgtacgtgaatgctcgctgtctgatagggttccagctccatatatatagaaagatcgggggtgggatgggatggagtgagccccatccagttagttggactagttttaaataaaggttttccggtttgtgtttttttgaaccatactgtttagtaaaataaatacaatgaatgttgagta

SEQ ID NO: 378069 - DNA, 2510 bp, Homo sapiens
ccggcccggcgtcgcgaggggaatcggcgagccgagggcgcgggagcctctttactgcacactcatcctccgtcctcccgcccggctcaggggttacaaatcgcggaggggacagggagcccagggccaggatcatcaacgtggggctttataggaggcgatctttacctcagcgaccgatcacccccagttcccccaacattgctttgcatctggcatctttatgtggagagcagtcagggcaatagacatacgttcaaacgcagacctttatgccttccgtttttcttttggcagtaactaagaaatggccaaagttttctggtcttggatgagcaacgatttgcaaaagaaattcttcccaaatatttcaagcacaataatatggcaagctttgtgaggcaactgaatatgtatggtttccgtaaagtagtacatatcgactctggaattgtaaagcaagaaagagatggtcctgtagaatttcagcatccttacttcaaacaaggacaggatgacttgttggagaacattaaaaggaaggtttcatcttcaaaaccagaagaaaataaaattcgtcaggaagatttaacaaaaattataagtagtgctcagaaggttcagataaaacaggaaactattgagtccaggctttctgaattaaaaagtgagaatgagtccctttggaaggaggtgtcagaattacgagcaaagcatgcacaacagcaacaagttattcgaaagattgtccagtttattgttacattggttcaaaataaccaacttgtgagtttaaaacgtaaaaggcctctacttctaaacactaatggagcccaaaagaagaacctgtttcagcacatagtcaaagaaccaactgataatcatcatcataaagttccacacagtaggactgaaggtttaaagccaagggagaggatttcagatgacatcattatttatgatgttactgatgataatgcagatgaagaaaatatcccagttattccagaaactaatgaggatgttatatctgatccctccaactgtagccagtaccctgatattgtcatcgttgaagatgacaatgaagatgagtatgcacctgtcattcagagtggagagcagaatgaaccagccagagaatccctaagttcaggcagtgatggcagcagccctctcatgtctagtgctgtccagctaaatggctcatccagtctgacctcagaagatccagtgaccatgatggattccattttgaatgataacatcaatcttttgggaaaggttgagctgttggattatcttgacagtattgactgcagtttagaggacttccaggccatgctatcaggaagacaatttagcatagacccagatctcctggttgattctgagaataaaggattagaaactaccaagaacaatgtagttcagccagtttcggaagagggaagaaaatctaaatccaaaccagataagcagcttatccagtataccgcctttccacttcttgcattcctcgatgggaaccctgcttcttctgttgaacaggcgagtacaacagcatcatcagaagttttgtcctctgtagataaacccatagaagttgatgagcttctggatagcagcctagacccagaaccaacccaaagtaagcttgttcgcctggagccattgactgaagctgaagctagtgaagctacactgttttatttatgtgaacttgctcctgcacctctggatagtgatatgccacttttagatagctaaatccccaggaagtggactttacatgtatatattcatcaaaatgatgaactatttattttaaagtatcatttggtactttttttgtaaattgctttgttttgtttaatcagatactgtggaataaaagcaccttttgcttttctcactaaccacacactcttgcagagctttcaggtgttactcagctgcatagttacgcagatgtaatgcacattattggcgtatctttaagttggattcaaatggccatttttctccaattttggtaaattggatatcttttttttacaaatacgaccattaacctcagttaaatttttgtttgttttcctgtttgatgctgtctatttgcattgagtgtaagtcatttgaactaatggtataactcctaaagctttctctgctccagttatttttattaaatatttttcacttggcttatttttaaaactgggaacataaagtgcctgtatcttgtaaaacttcatttgtttcttttggttcagagaagttcatttatgttcaaagacgtttattcatgttcaacaggaaagacaaagtgtacgtgaatgctcgctgtctgatagggttccagctccatatatatagaaagatcgggggtgggatgggatggagtgagccccatccagttagttggactagttttaaataaaggttttccggtttgtgtttttttgaaccatactgtttagtaaaataaatacaatgaatgttgagta

SEQ ID NO: 378070 - DNA, 1993 bp, Homo sapiens
tgtaattgaaccaaagttttcttggtctcataaatacatatagtaaaaacaagtgtagttcagttgtctggtattcttaattaaagatactatggtctggttttttgattgattttttttttgttttgttgcttaataaattataacatagtgagaatgagtccctttggaaggaggtgtcagaattacgagcaaagcatgcacaacagcaacaagttattcgaaagattgtccagtttattgttacattggttcaaaataaccaacttgtgagtttaaaacgtaaaaggcctctacttctaaacactaatggagcccaaaagaagaacctgtttcagcacatagtcaaagaaccaactgataatcatcatcataaagttccacacagtaggactgaaggtttaaagccaagggagaggatttcagatgacatcattatttatgatgttactgatgataatgcagatgaagaaaatatcccagttattccagaaactaatgaggatgttatatctgatccctccaactgtagccagtaccctgatattgtcatcgttgaagatgacaatgaagatgagtatgcacctgtcattcagagtggagagcagaatgaaccagccagagaatccctaagttcaggcagtgatggcagcagccctctcatgtctagtgctgtccagctaaatggctcatccagtctgacctcagaagatccagtgaccatgatggattccattttgaatgataacatcaatcttttgggaaaggttgagctgttggattatcttgacagtattgactgcagtttagaggacttccaggccatgctatcaggaagacaatttagcatagacccagatctcctggttgattctgagaataaaggattagaaactaccaagaacaatgtagttcagccagtttcggaagagggaagaaaatctaaatccaaaccagataagcagcttatccagtataccgcctttccacttcttgcattcctcgatgggaaccctgcttcttctgttgaacaggcgagtacaacagcatcatcagaagttttgtcctctgtagataaacccatagaagttgatgagcttctggatagcagcctagacccagaaccaacccaaagtaagcttgttcgcctggagccattgactgaagctgaagctagtgaagctacactgttttatttatgtgaacttgctcctgcacctctggatagtgatatgccacttttagatagctaaatccccaggaagtggactttacatgtatatattcatcaaaatgatgaactatttattttaaagtatcatttggtactttttttgtaaattgctttgttttgtttaatcagatactgtggaataaaagcaccttttgcttttctcactaaccacacactcttgcagagctttcaggtgttactcagctgcatagttacgcagatgtaatgcacattattggcgtatctttaagttggattcaaatggccatttttctccaattttggtaaattggatatcttttttttacaaatacgaccattaacctcagttaaatttttgtttgttttcctgtttgatgctgtctatttgcattgagtgtaagtcatttgaactaatggtataactcctaaagctttctctgctccagttatttttattaaatatttttcacttggcttatttttaaaactgggaacataaagtgcctgtatcttgtaaaacttcatttgtttcttttggttcagagaagttcatttatgttcaaagacgtttattcatgttcaacaggaaagacaaagtgtacgtgaatgctcgctgtctgatagggttccagctccatatatatagaaagatcgggggtgggatgggatggagtgagccccatccagttagttggactagttttaaataaaggttttccggtttgtgtttttttgaaccatactgtttagtaaaataaatacaatgaatgttgagta

SEQ ID NO: 378071 - DNA, 1341 bp, Homo sapiens
ctgctgcctccctctacagctcatggaggtttgtgagaacaagaggtttgtcaagaggtttgtcctcccagggtcagtattccatttagatgataacatcaatcttttgggaaaggttgagctgttggattatcttgacagtattgactgcagtttagaggacttccaggccatgctatcaggaagacaatttagcatagacccagatctcctggttgattctgagaataaaggattagaaactaccaagaacaatgtagttcagccagtttcggaagagggaagaaaatctaaatccaaaccagataagcagcttatccagtataccgcctttccacttcttgcattcctcgatgggaaccctgcttcttctgttgaacaggcgagtacaacagcatcatcagaagttttgtcctctgtagataaacccatagaagttgatgagcttctggatagcagcctagacccagaaccaacccaaagtaagcttgttcgcctggagccattgactgaagctgaagctagtgaagctacactgttttatttatgtgaacttgctcctgcacctctggatagtgatatgccacttttagatagctaaatccccaggaagtggactttacatgtatatattcatcaaaatgatgaactatttattttaaagtatcatttggtactttttttgtaaattgctttgttttgtttaatcagatactgtggaataaaagcaccttttgcttttctcactaaccacacactcttgcagagctttcaggtgttactcagctgcatagttacgcagatgtaatgcacattattggcgtatctttaagttggattcaaatggccatttttctccaattttggtaaattggatatcttttttttacaaatacgaccattaacctcagttaaatttttgtttgttttcctgtttgatgctgtctatttgcattgagtgtaagtcatttgaactaatggtataactcctaaagctttctctgctccagttatttttattaaatatttttcacttggcttatttttaaaactgggaacataaagtgcctgtatcttgtaaaacttcatttgtttcttttggttcagagaagttcatttatgttcaaagacgtttattcatgttcaacaggaaagacaaagtgtacgtgaatgctcgctgtctgatagggttccagctccatatatatagaaagatcgggggtgggatgggatggagtgagccccatccagttagttggactagttttaaataaaggttttccggtttgtgtttttttgaaccatactgtttagtaaaataaatacaatgaatgttgagta

SEQ ID NO: 378072 - DNA, 2760 bp, Homo sapiens
cgcggagacttgtccgtcacgtgcggccgcccggcctctcggccttgccgcgcgcctggcggggttgggggggcggggaccaagatctgctgcgcctgcgttgtgggcgttctcgggaagctgctgccgtagctgccgccgccgctaccaccgcgttcgggtgtagaatttggaatccctgcgccgcgttaacaatgaagcagagttcgaacgtgccggctttcctcagcaagctgtggacgcttgtggaggaaacccacactaacgagttcatcacctggagccagaatggccaaagttttctggtcttggatgagcaacgatttgcaaaagaaattcttcccaaatatttcaagcacaataatatggcaagctttgtgaggcaactgaatatgtatggtttccgtaaagtagtacatatcgactctggaattgtaaagcaagaaagagatggtcctgtagaatttcagcatccttacttcaaacaaggacaggatgacttgttggagaacattaaaaggaaggtttcatcttcaaaaccagaagaaaataaaattcgtcaggaagatttaacaaaaattataagtagtgctcagaaggttcagataaaacaggaaactattgagtccaggctttctgaattaaaaagtgagaatgagtccctttggaaggaggtgtcagaattacgagcaaagcatgcacaacagcaacaagttattcgaaagattgtccagtttattgttacattggttcaaaataaccaacttgtgagtttaaaacgtaaaaggcctctacttctaaacactaatggagcccaaaagaagaacctgtttcagcacatagtcaaagaaccaactgataatcatcatcataaagttccacacagtaggactgaaggtttaaagccaagggagaggatttcagatgacatcattatttatgatgttactgatgataatgcagatgaagaaaatatcccagttattccagaaactaatgaggatgttatatctgatccctccaactgtagccagtaccctgatattgtcatcgttgaagatgacaatgaagatgagtatgcacctgtcattcagagtggagagcagaatgaaccagccagagaatccctaagttcaggcagtgatggcagcagccctctcatgtctagtgctgtccagctaaatggctcatccagtctgacctcagaagatccagtgaccatgatggattccattttgaatgataacatcaatcttttgggaaaggttgagctgttggattatcttgacagtattgactgcagtttagaggacttccaggccatgctatcaggaagacaatttagcatagacccagatctcctggttgattctgagaataaaggattagaaactaccaagaacaatgtagttcagccagtttcggaagagggaagaaaatctaaatccaaaccagataagcagcttatccagtataccgcctttccacttcttgcattcctcgatgggaaccctgcttcttctgttgaacaggcgagtacaacagcatcatcagaagttttgtcctctgtagataaacccatagaagttgatgagcttctggatagcagcctagacccagaaccaacccaaagtaagcttgttcgcctggagccattgactgaagctgaagctagtgaagctacactgttttatttatgtgaacttgctcctgcacctctggatagtgatatgccacttttagatagctaaatccccaggaagtggactttacatgtatatattcatcaaaatgatgaactatttattttaaagtatcatttggtactttttttgtaaattgctttgttttgtttaatcagatactgtggaataaaagcaccttttgcttttctcactaaccacacactcttgcagagctttcaggtgttactcagctgcatagttacgcagatgtaatgcacattattggcgtatctttaagttggattcaaatggccatttttctccaattttggtaaattggatatcttttttttacaaatacgaccattaacctcagttaaatttttgtttgttttcctgtttgatgctgtctatttgcattgagtgtaagtcatttgaactaatggtataactcctaaagctttctctgctccagttatttttattaaatatttttcacttggcttatttttaaaactgggaacataaagtgcctgtatcttgtaaaacttcatttgtttcttttggttcagagaagttcatttatgttcaaagacgtttattcatgttcaacaggaaagacaaagtgtacgtgaatgctcgctgtctgatagggttccagctccatatatatagaaagatcgggggtgggatgggatggagtgagccccatccagttagttggactagttttaaataaaggttttccggtttgtgtttttttgaaccatactgtttagtaaaataaatacaatgaatgttgagtagttgagtactagtgtctgttatgtgtcttctttagaggtgacactcacatgaaacaattttttcttctcataggaagcagtagctttaaactgtctgtggttcattattctcaatatgaatcataccaagatatttgtgcctcatctcgaaaatatattgtatattgcaacaagggagaaatataatctctaaatttaatgtattttaaagttctttgtttaaaaattatactgggttgctttctatgtttctaataaaaaagtgagag

SEQ ID NO: 378073 - DNA, 2273 bp, Homo sapiens
cgcggagacttgtccgtcacgtgcggccgcccggcctctcggccttgccgcgcgcctggcggggttgggggggcggggaccaagatctgctgcgcctgcgttgtgggcgttctcgggaagctgctgccgtagctgccgccgccgctaccaccgcgttcgggtgtagaatttggaatccctgcgccgcgttaacaatgaagcagagttcgaacgtgccggctttcctcagcaagctgtggacgcttgtggaggaaacccacactaacgagttcatcacctggagccagaatggccaaagttttctggtcttggatgagcaacgatttgcaaaagaaattcttcccaaatatttcaagcacaataatatggcaagctttgtgaggcaactgaatatgtatggtttccgtaaagtagtacatatcgactctggaattgtaaagcaagaaagagatggtcctgtagaatttcagcatccttacttcaaacaaggacaggatgacttgttggagaacattaaaaggaaggtttcatcttcaaaaccagaagaaaataaaattcgtcaggaagatttaacaaaaattataagtagtgctcagaaggttcagataaaacaggaaactattgagtccaggctttctgaattaaaaagtgagaatgagtccctttggaaggaggtgtcagaattacgagcaaagcatgcacaacagcaacaagttattcgaaagattgtccagtttattgttacattggttcaaaataaccaacttgtgagtttaaaacgtaaaaggcctctacttctaaacactaatggagcccaaaagaagaacctgtttcagcacatagtcaaagaaccaactgataatcatcatcataaagttccacacagtaggactgaaggtttaaagccaagggagaggatttcagatgacatcattatttatgatgttactgatgataatgcagatgaagaaaatatcccagttattccagaaactaatgaggatgttatatctgatccctccaactgtagccagtaccctgatattgtcatcgttgaagatgacaatgaagatgagtatgcacctgtcattcagagtggagagcagaatgaaccagccagagaatccctaagttcaggcagtgatggcagcagccctctcatgtctagtgctgtccagctaaatggctcatccagtctgacctcagaagatccagtgaccatgatggattccattttgaatgataacatcaatcttttgggaaaggttgagctgttggattatcttgacagtattgactgcagtttagaggacttccaggccatgctatcaggaagacaatttagcatagacccagatctcctggttgattctgagaataaaggattagaaactaccaagaacaatgtagttcagccagtttcggaagagggaagaaaatctaaatccaaaccagataagcagcttatccagtataccgcctttccacttcttgcattcctcgatgggaaccctgcttcttctgttgaacaggcgagtacaacagcatcatcagaagttttgtcctctgtagataaacccatagaagttgatgagcttctggatagcagcctagacccagaaccaacccaaagtaagcttgttcgcctggagccattgactgaagctgaagctagtgaagctacactgttttatttatgtgaacttgctcctgcacctctggatagtgatatgccacttttagatagctaaatccccaggaagtggactttacatgtatatattcatcaaaatgatgaactatttattttaaagtatcatttggtactttttttgtaaattgctttaatttttgtttgttttcctgtttgatgctgtctatttgcattgagtgtaagtcatttgaactaatggtataactcctaaagctttctctgctccagttatttttattaaatatttttcacttggcttatttttaaaactgggaacataaagtgcctgtatcttgtaaaacttcatttgtttcttttggttcagagaagttcatttatgttcaaagacgtttattcatgttcaacaggaaagacaaagtgtacgtgaatgctcgctgtctgatagggttccagctccatatatatagaaagatcgggggtgggatgggatggagtgagccccatccagttagttggactagttttaaataaaggttttccggtttgtgtttttttgaaccatactgtttagtaaaataaatacaatgaatgttgagta

SEQ ID NO: 378074 - DNA, 286 bp, Homo sapiens
ggttgagctgttggattatcttgacagtattgactgcagtttagaggacttccaggccatgctatcaggaagacaatttagcatagacccagatctcctggttgatgtaggtactttgggtaatctttgctatactggtagtttgtgtgtttatgtatattatttaaaaaccagtacgtcattttgttttgtattctacaggttgtttttgcatttcttttttaaattaataattttgtttatcagaaagaatgaaaaaataggtttgggacattgaaggagtatg

SEQ ID NO: 378075 - DNA, 1062 bp, Homo sapiens
  misc_feature (1062)..(1062): n is a, c, g, or t
cgcggagacttgtccgtcacgtgcggccgcccggcctctcggccttgccgcgcgcctggcggggttgggggggcggggaccaagatctgctgcgcctgcgttgtgggcgttctcgggaagctgctgccgtagctgccgccgccgctaccaccgcgttcgggtgtagaatttggaatccctgcgccgcgttaacaatgaagcagagttcgaacgtgccggctttcctcagcaagctgtggacgcttgtggaggaaacccacactaacgagttcatcacctggagccagaatggccaaagttttctggtcttggatgagcaacgatttgcaaaagaaattcttcccaaatatttcaagcacaataatatggcaagctttgtgaggcaactgaatatgtatggtttccgtaaagtagtacatatcgactctggaattgtaaagcaagaaagagatggtcctgtagaatttcagcatccttacttcaaacaaggacaggatgacttgttggagaacattaaaaggaaggtttcatcttcaaaaccagaagaaaataaaattcgtcaggaagatttaacaaaaattataagtagtgctcagaaggttcagataaaacaggaaactattgagtccaggctttctgaattaaaaagtgagaatgagtccctttggaaggaggtgtcagaattacgagcaaagcatgcacaacagcaacaagttattcgaaagattgtccagtttattgttacattggttcaaaataaccaacttgtgagtttaaaacgtaaaaggcctctacttctaaacactaatggagcccaaaagaagaacctgtttcagcacatagtcaaagaaccaactgataatcatcatcataaagtaattttttagttagggtctattttatatttattgtctcagactaaattttattatggcagtgtttcatgcattcaaagaagtgtggtgaataacaattcaagtgttcatcccacagctttgttaaattgtgacattttttattatttgctttagattattgtaagaaataaatcatcacaaatcn

SEQ ID NO: 378076 - DNA, 2467 bp, Homo sapiens
  misc_feature (12)..(12): n is a, c, g, or t
  misc_feature (16)..(16): n is a, c, g, or t
  misc_feature (27)..(27): n is a, c, g, or t
  misc_feature (32)..(32): n is a, c, g, or t
  misc_feature (35)..(35): n is a, c, g, or t
gggaccttgtantacngaactccactnattanggngcggaattccgcgagcttgcattctgtcgggtggcgctgtatctatcatcatactgtagacagcaacgcgatccatctcgaacggtcggctacgcgttcgggtgtagaatttggaatccctgcgccgcgttaacaatgaagcagagttcgaacgtgccggctttcctcagcaagctgtggacgcttgtggaggaaacccacactaacgagttcatcacctggagccagaatggccaaagttttctggtcttggatgagcaacgatttgcaaaagaaattcttcccaaatatttcaagcacaataatatggcaagctttgtgaggcaactgaatatgtatggtttccgtaaagtagtacatatcgactctggaattgtaaagcaagaaagagatggtcctgtagaatttcagcatccttacttcaaacaaggacaggatgacttgttggagaacattaaaaggaaggtttcatcttcaaaaccagaagaaaataaaattcgtcaggaagatttaacaaaaattataagtagtgctcagaaggttcagataaaacaggaaactattgagtccaggctttctgaattaaaaagtgagaatgagtccctttggaaggaggtgtcagaattacgagcaaagcatgcacaacagcaacaagttattcgaaagattgtccagtttattgttacattggttcaaaataaccaacttgtgagtttaaaacgtaaaaggcctctacttctaaacactaatggagcccaaaagaagaacctgtttcagcacatagtcaaagaaccaactgataatcatcatcataaagttccacacagtaggactgaaggtttaaagccaagggagaggatttcagatgacatcattatttatgatgttactgatgataatgcagatgaagaaaatatcccagttattccagaaactaatgaggatgttatatctgatccctccaactgtagccagtaccctgatattgtcatcgttgaagatgacaatgaagatgagtatgcacctgtcattcagagtggagagcagaatgaaccagccagagaatccctaagttcaggcagtgatggcagcagccctctcatgtctagtgctgtccagctaaatggctcatccagtctgacctcagaagatccagtgaccatgatggattccattttgaatgataacatcaatcttttgggaaaggttgagctgttggattatcttgacagtattgactgcagtttagaggacttccaggccatgctatcaggaagacaatttagcatagacccagatctcctggttgattctgagaataaaggattagaaactaccaagaacaatgtagttcagccagtttcggaagagggaagaaaatctaaatccaaaccagataagcagcttatccagtataccgcctttccacttcttgcattcctcgatgggaaccctgcttcttctgttgaacaggcgagtacaacagcatcatcagaagttttgtcctctgtagataaacccatagaagttgatgagcttctggatagcagcctagacccagaaccaacccaaagtaagcttgttcgcctggagccattgactgaagctgaagctagtgaagctacactgttttatttatgtgaacttgctcctgcacctctggatagtgatatgccacttttagatagctaaatccccaggaagtggactttacatgtatatattcatcaaaatgatgaactatttattttaaagtatcatttggtactttttttgtaaattgctttgttttgtttaatcagatactgtggaataaaagcaccttttgcttttctcactaaccacacactcttgcagagctttcaggtgttactcagctgcatagttacgcagatgtaatgcacattattggcgtatctttaagttggattcaaatggccatttttctccaattttggtaaattggatatcttttttttacaaatacgaccattaacctcagttaaatttttgtttgttttcctgtttgatgctgtctatttgcattgagtgtaagtcatttgaactaatggtataactcctaaagctttctctgctccagttatttttattaaatatttttcacttggcttatttttaaaactgggaacataaagtgcctgtatcttgtaaaacttcatttgtttcttttggttcagagaagttcatttatgttcaaagacgtttattcatgttcaacaggaaagacaaagtgtacgtgaatgctcgctgtctgatagggttccagctccatatatatagaaagatcgggggtgggatgggatggagtgagccccatccagttagttggactagttttaaataaaggttttccggtttgtgtttttttgaaccatactgtttagtaaaataaatacaatgaatgttgagta

SEQ ID NO: 378077 - DNA, 2103 bp, Homo sapiens
ttgcctctgttacctggtataagataaatgttgcctatcaaacaccagttttctcttttgcaccgtagtgtaatcttcaaagtacttgaagtaaaaaagttgggatctatagccaggcaagtttggtacttatcaccaaaacaaataaactgcctggaagctggtatgtttctttagacggtggttctacggtgcgtctggatttcaagtgttaatatgtgagaaattatgagacttagaggacaaattattatatgaatttgttttataagacttggtaatagagacaaaagaattaacagtataatgaaataatttttgtttatatttttttcagattgtccagtttattgttacattggttcaaaataaccaacttgtgagtttaaaacgtaaaaggcctctacttctaaacactaatggagcccaaaagaagaacctgtttcagcacatagtcaaagaaccaactgataatcatcatcataaagttccacacagtaggactgaaggtttaaagccaagggagaggatttcagatgacatcattatttatgatgttactgatgataatgcagatgaagaaaatatcccagttattccagaaactaatgaggatgttatatctgatccctccaactgtagccagtaccctgatattgtcatcgttgaagatgacaatgaagatgagtatgcacctgtcattcagagtggagagcagaatgaaccagccagagaatccctaagttcaggcagtgatggcagcagccctctcatgtctagtgctgtccagctaaatggctcatccagtctgacctcagaagatccagtgaccatgatggattccattttgaatgataacatcaatcttttgggaaaggttgagctgttggattatcttgacagtattgactgcagtttagaggacttccaggccatgctatcaggaagacaatttagcatagacccagatctcctggttgattctgagaataaaggattagaaactaccaagaacaatgtagttcagccagtttcggaagagggaagaaaatctaaatccaaaccagataagcagcttatccagtataccgcctttccacttcttgcattcctcgatgggaaccctgcttcttctgttgaacaggcgagtacaacagcatcatcagaagttttgtcctctgtagataaacccatagaagttgatgagcttctggatagcagcctagacccagaaccaacccaaagtaagcttgttcgcctggagccattgactgaagctgaagctagtgaagctacactgttttatttatgtgaacttgctcctgcacctctggatagtgatatgccacttttagatagctaaatccccaggaagtggactttacatgtatatattcatcaaaatgatgaactatttattttaaagtatcatttggtactttttttgtaaattgctttgttttgtttaatcagatactgtggaataaaagcaccttttgcttttctcactaaccacacactcttgcagagctttcaggtgttactcagctgcatagttacgcagatgtaatgcacattattggcgtatctttaagttggattcaaatggccatttttctccaattttggtaaattggatatcttttttttacaaatacgaccattaacctcagttaaatttttgtttgttttcctgtttgatgctgtctatttgcattgagtgtaagtcatttgaactaatggtataactcctaaagctttctctgctccagttatttttattaaatatttttcacttggcttatttttaaaactgggaacataaagtgcctgtatcttgtaaaacttcatttgtttcttttggttcagagaagttcatttatgttcaaagacgtttattcatgttcaacaggaaagacaaagtgtacgtgaatgctcgctgtctgatagggttccagctccatatatatagaaagatcgggggtgggatgggatggagtgagccccatccagttagttggactagttttaaataaaggttttccggtttgtgtttttttgaaccatactgtttagtaaaataaatacaatgaatgttgagta

SEQ ID NO: 378078 - DNA, 2907 bp, Homo sapiens
cgcggagacttgtccgtcacgtgcggccgcccggcctctcggccttgccgcgcgcctggcggggttgggggggcggggaccaagatctgctgcgcctgcgttgtgggcgttctcgggaagctgctgccgtagctgccgccgccgctaccaccgcgttcgggtgtagaatttggaatccctgcgccgcgttaacaatgaagcagagttcgaacgtgccggctttcctcagcaagctgtggacgcttgtggaggaaacccacactaacgagttcatcacctggagccagaatggccaaagttttctggtcttggatgagcaacgatttgcaaaagaaattcttcccaaatatttcaagcacaataatatggcaagctttgtgaggcaactgaatatgtatggtttccgtaaagtagtacatatcgactctggaattgtaaagcaagaaagagatggtcctgtagaatttcagcatccttacttcaaacaaggacaggatgacttgttggagaacattaaaaggaaggtttcatcttcaaaaccagaagaaaataaaattcgtcaggaagatttaacaaaaattataagtagtgctcagaaggttcagataaaacaggaaactattgagtccaggctttctgaattaaaaagtgagaatgagtccctttggaaggaggtgtcagaattacgagcaaagcatgcacaacagcaacaagttattcgaaagattgtccagtttattgttacattggttcaaaataaccaacttgtgagtttaaaacgtaaaaggcctctacttctaaacactaatggagcccaaaagaagaacctgtttcagcacatagtcaaagaaccaactgataatcatcatcataaagttccacacagtaggactgaaggtttaaagccaagggagaggatttcagatgacatcattatttatgatgttactgatgataatgcagatgaagaaaatatcccagttattccagaaactaatgaggatgttatatctgatccctccaactgtagccagtaccctgatattgtcatcgttgaagatgacaatgaagatgagtatgcacctgtcattcagagtggagagcagaatgaaccagccagagaatccctaagttcaggcagtgatggcagcagccctctcatgtctagtgctgtccagctaaatggctcatccagtctgacctcagaagatccagtgaccatgatggattccattttgaatgataacatcaatcttttgggaaaggttgagctgttggattatcttgacagtattgactgcagtttagaggacttccaggccatgctatcaggaagacaatttagcatagacccagatctcctggttgattctgagaataaaggattagaaactaccaagaacaatgtagttcagccagtttcggaagagggaagaaaatctaaatccaaaccagataagcagcttatccagtataccgcctttccacttcttgcattcctcgatgggaaccctgcttcttctgttgaacaggcgagtacaacagcatcatcagaagttttgtcctctgtagataaacccatagaagttgatgagcttctggatagcagcctagacccagaaccaacccaaagtaagcttgttcgcctggagccattgactgaagctgaagctagtgaagctacactgttttatttatgtgaacttgctcctgcacctctggatagtgatatgccacttttagatagctaaatccccaggaagtggactttacatgtatatattcatcaaaatgatgaactatttattttaaagtatcatttggtactttttttgtaaattgctttgttttgtttaatcagatactgtggaataaaagcaccttttgcttttctcactaaccacacactcttgcagagctttcaggtgttactcagctgcatagttacgcagatgtaatgcacattattggcgtatctttaagttggattcaaatggccatttttctccaattttggtaaattggatatcttttttttacaaatacgaccattaacctcagttaaatttttgtttgttttcctgtttgatgctgtctatttgcattgagtgtaagtcatttgaactaatggtataactcctaaagctttctctgctccagttatttttattaaatatttttcacttggcttatttttaaaactgggaacataaagtgcctgtatcttgtaaaacttcatttgtttcttttggttcagagaagttcatttatgttcaaagacgtttattcatgttcaacaggaaagacaaagtgtacgtgaatgctcgctgtctgatagggttccagctccatatatatagaaagatcgggggtgggatgggatggagtgagccccatccagttagttggactagttttaaataaaggttttccggtttgtgtttttttgaaccatactgtttagtaaaataaatacaatgaatgttgagtaaaaacacaacaacaaaaaataataaaaaaaaaaaaaaaaaaaaaaaggggggggggccctcaaaatttccccgggggggccccattataggatgtatccccagtgttgtgttgaccacaagggggcccccaaagagagaacagataataaaacagaagagcacgagacgcgcatttatacacacggttctgtgcgtgggaacacaatgtatacgtagagaacactttagggagaaaaaccctattacttgggggggcgagcacaatgttgggcacaccattccccacaaaaaaatttatacgaccctgagggacaattataacactttcgcggtattatgtggttaaccagcagcgataatttctcgtgttgtaataaaaatttggcacacgagtattattttgaacatttttcag

SEQ ID NO: 378079 - DNA, 2547 bp, Homo sapiens
cgcggagacttgtccgtcacgtgcggccgcccggcctctcggccttgccgcgcgcctggcggggttgggggggcggggaccaagatctgctgcgcctgcgttgtgggcgttctcgggaagctgctgccgtagctgccgccgccgctaccaccgcgttcgggtgtagaatttggaatccctgcgccgcgttaacaatgaagcagagttcgaacgtgccggctttcctcagcaagctgtggacgcttgtggaggaaacccacactaacgagttcatcacctggagccagaatggccaaagttttctggtcttggatgagcaacgatttgcaaaagaaattcttcccaaatatttcaagcacaataatatggcaagctttgtgaggcaactgaatatgtatggtttccgtaaagtagtacatatcgactctggaattgtaaagcaagaaagagatggtcctgtagaatttcagcatccttacttcaaacaaggacaggatgacttgttggagaacattaaaaggaaggtttcatcttcaaaaccagaagaaaataaaattcgtcaggaagatttaacaaaaattataagtagtgctcagaaggttcagataaaacaggaaactattgagtccaggctttctgaattaaaaagtgagaatgagtccctttggaaggaggtgtcagaattacgagcaaagcatgcacaacagcaacaagttattcgaaagattgtccagtttattgttacattggttcaaaataaccaacttgtgagtttaaaacgtaaaaggcctctacttctaaacactaatggagcccaaaagaagaacctgtttcagcacatagtcaaagaaccaactgataatcatcatcataaagttccacacagtaggactgaaggtttaaagccaagggagaggatttcagatgacatcattatttatgatgttactgatgataatgcagatgaagaaaatatcccagttattccagaaactaatgaggatgttatatctgatccctccaactgtagccagtaccctgatattgtcatcgttgaagatgacaatgaagatgagtatgcacctgtcattcagagtggagagcagaatgaaccagccagagaatccctaagttcaggcagtgatggcagcagccctctcatgtctagtgctgtccagctaaatggctcatccagtctgacctcagaagatccagtgaccatgatggattccattttgaatgataacatcaatcttttgggaaaggttgagctgttggattatcttgacagtattgactgcagtttagaggacttccaggccatgctatcaggaagacaatttagcatagacccagatctcctggttgattctgagaataaaggattagaaactaccaagaacaatgtagttcagccagtttcggaagagggaagaaaatctaaatccaaaccagataagcagcttatccagtataccgcctttccacttcttgcattcctcgatgggaaccctgcttcttctgttgaacaggcgagtacaacagcatcatcagaagttttgtcctctgtagataaacccatagaagttgatgagcttctggatagcagcctagacccagaaccaacccaaagtaagcttgttcgcctggagccattgactgaagctgaagctagtgaagctacactgttttatttatgtgaacttgctcctgcacctctggatagtgatatgccacttttagatagctaaatccccaggaagtggactttacatgtatatattcatcaaaatgatgaactatttattttaaagtatcatttggtactttttttgtaaattgctttgttttgtttaatcagatactgtggaataaaagcaccttttgcttttctcactaaccacacactcttgcagagctttcaggtgttactcagctgcatagttacgcagatgtaatgcacattattggcgtatctttaagttggattcaaatggccatttttctccaattttggtaaattggatatcttttttttacaaatacgaccattaacctcagttaaatttttgtttgttttcctgtttgatgctgtctatttgcattgagtgtaagtcatttgaactaatggtataactcctaaagctttctctgctccagttatttttattaaatatttttcacttggcttatttttaaaactgggaacataaagtgcctgtatcttgtaaaacttcatttgtttcttttggttcagagaagttcatttatgttcaaagacgtttattcatgttcaacaggaaagacaaagtgtacgtgaatgctcgctgtctgatagggttccagctccatatatatagaaagatcgggggtgggatgggatggagtgagccccatccagttagttggactagttttaaataaaggttttccggtttgtgtttttttgaaccatactgtttagtaaaataaatacaatgaatgttgagtatgatgcggccggtccttttgttcgtatattttctatcattcaaatattgttaggtt

SEQ ID NO: 378080 - DNA, 716 bp, Homo sapiens
tgaggcagtctcattctgtcatccaagctggagtacagtggctcgatcatagttcactgcagccttgatctcctgggctcaagcaatcccccaacctcggcctcccgagtagctgggactacaggcgtgcaccaccccctgcttggttaactggtagcagttgagtcatatttccttcttgtcttttttcttaagtgtggtttctatttgttggcgattttgctgtgtggtagagtcgtgctcaccctgcacccacgtgggcctttcttagcttaaaatggagaacatgccaccacctgcctgactgggctgatgtgagtatgaaaccaggtagggcatggaaagcccttgctttggtgttaaatacacaggggtgctgtgtatttaatatattcctcctacaagaaaaggaggggctgggtgaagtggcccacacctgaaatcccagcactttgggaggcacaggcaagagtattgcttgagtccaggagtttgagaccagcctgggcaacatagcgggactccatctctacacaaaaatacaaatattagccaggcatggtggcatgcacctgtagtcctggatacctgggaggctgagatgggaggatctgggaggatcgcttgagctcgaggaagtcaaggctgcagtgaacgaagatcatgccactgcactccagcctgggctggacagagtgagaccccatctcaacaaa

SEQ ID NO: 378081 - DNA, 434 bp, Homo sapiens
taggttatgttgattttattcctttgagaactgattacccctcaggagtgatcaagatgggcttgtgtggggtggggccaaagggagaatggcaggcaaccattcagagaaagtggttttaccatctcgaggtgagtaatgtttaaagttttagctgctgtgaagtgggatgctataaaattcgggggagttttccttctacccggtttcattccccgctcccctagccccatgcaactgcatttcccctcttctgtgctgagggaaagaaaagctgcctctcctttcttggttttgtagcatggcttccagtacctgttagtcatctccttgctccttttttattttttttgagacagagtcttgctctgttgccaggctgcattccagactgggtgacaaagggagaccctgtctgaaaaggaaaaaaaaaa

SEQ ID NO: 378082 - DNA, 1230 bp, Homo sapiens
taggttatgttgattttattcctttgagaactgattacccctcaggagtgatcaagatgggcttgtgtggggtggggccaaagggagaatggcaggcaaccattcagagaaagtggttttaccatctcgaggtgagtaatgtttaaagttttagctgctgtgaagtgggatgctataaaattcgggggagttttccttctacccggtttcattccccgctcccctagccccatgcaactgcatttcccctcttctgtgctgagggaaagaaaagctgcctctcctttcttggttttgtagcatggcttccagtacctgttagtcatctccttgctccttttttattttttttgagacagagtcttgctctgttgccaggctggagtgcagtgcagtggcaccatctcggctcactgcaatctccgcctcctgaattcaagctatctcctgcctcagcctcctgagtagctgggactacaggctcacaccaccatgcccagctaatttttgtatttttagtagagacagggtttcaccatgttggacaggatggtctcgatctcttgacctcgtgatccgcctgcctcggcctcccgaagtgttgggattacaggcgtgagccaccgcatccagccctccttgctcccattttaagtgccggtggatttggaaagatggatatgtagtctctgggatcattgtctttgatgtatttagagcttagcagctgtcctgtcagcccgagccctgtgtcactcggcatctctgccaatgttactacgtcccaagaagcttttcaggtggcttccaggtctgtattggaagcaatgacctacctgtgttgtgagatatcccaggagccagcctctgtcactcacaggcttccagattgctctgccctggcctggggtctctgtctgaagtagagcatgaaagcagccggccccaaccctgcagggtacacctgagcctttgactccgaggaaggaaatggcgatggggggatgcagggatgatgaggaaaggcctcactctttgagtgtgtgatgaaagggaaaggatgtcaggaaggcactgagcaaaaggctgttacagctgaccttgagaggtcagccaatccattagctgcatggggcccagagagggtgaagttctttcatgagatcatgcagcaagttagtgtcaagtctagaattagaacttgggtgtctttgaccctgacagcgggag

SEQ ID NO: 378083 - DNA, 438 bp, Homo sapiens
cctgggcgacagagcgagactccgtctcaaaaaaaaaaaaagaatgttatcatgtttccggaaaggaaatatttaaagctttgctataataggtggttgaatgcaaagaaaaagacatcatagtcagtctccttgtgctaaaaactaaaatctctccctgttcctttagagctgatctctccatctcagccgctcttgacactggggctgcgttgtctttgtcctggggctgtcctgttgggttgtaggctgtttggtgccattgctgtcctctctcatgagaagccagcagcactggtgtgcagtaggcaataaaaaatgtctggaaggacatggcagtggtccctgaaaggcaacatgggcctaggatgagaacccctgacatgagattttaaccataagcagccagcttcaggctgtaagcatgagatccctccc

SEQ ID NO: 378084 - DNA, 254 bp, Homo sapiens
ttaaaaaaaaaaaaaaacaaaacaaaaaactgacagtgtcaccggacgtcttcagtggcttctcacccgtcattcccacctgagcctgccagagggcgctctttggtcttctaccctcaattttgtgtcaccgtgaattaaaccagctcatttgaaaggaggaaaaaaaaagtgtcttctttttaaaatcattgcttttggccagttgtggtggctcacgcctctaacccagcgctttggagtccaaaaccggc

SEQ ID NO: 378085 - DNA, 700 bp, Homo sapiens
aaccctgctgaaatattgtcctactgggtagaagtctgaatcataaaaattccaaaagttgcccctaacccttcccttcggctcccctctcacttgttagagcaacccagtacactgctttcctaatggatctagactggaaatctgactaaccatcaccttcacagtgaatatccttcaacagggccctcctgtcctcaagaaaaactcaagcctctgtgaccagactctgccagctactgcagcctcctctctctctctgccaccagctcaattgtgtcaggctctaagaagatggagtatagcttataaagagccaggcacatcatactgtttctgtatgctatccctttgctcctgtggttttccctgtgtggaatactctctcctattattctcaccctttaagactcaggacagtcattctcttgtacacagagccttccgtgaccacgagcttgctattgcaccagacccaaactatcaaaataccccaaccgctgctatcataccagaaccaaagtaccaagtcacaggacttcaccctgtcaggttaaatgactgccaacttacatagcactcaccaggtgccaggcagttttttaagcacttttcatatatcaactcatttagtcctcataacaacctacaagcagatattattactattttttcttttgtggataaggacacagaggca

SEQ ID NO: 378086 - DNA, 1071 bp, Homo sapiens
atgaatggggtctcggaggggaccagaggctgcagtgacaggcaacctggggtcctgacacgtgatcgctcttgttccaggaagatgaactcttccggatgcctgtctgaggaggtggggtccctccgcccactgactgtggttatcctgtctgcgtccattgtcgtcggagtgctgggcaatgggctggtgctgtggatgactgtcttccgtatggcacgcacggtctccaccgtctgcttcttccacctggcccttgccgatttcatgctctcactgtctctgcccattgccatgtactatattgtctccaggcagtggctcctcggagagtgggcctgcaaactctacatcacctttgtgttcctcagctactttgccagtaactgcctccttgtcttcatctctgtggaccgttgcatctctgtcctctaccccgtctgggccctgaaccaccgcactgtgcagcgggcgagctggctggcctttggggtgtggctcctggccgccgccttgtgctctgcgcacctgaaattccggacaaccagaaaatggaatggctgtacgcactgctacttggcgttcaactctgacaatgagactgcccagatttggattgaaggggtcgtggagggacacattatagggaccattggccacttcctgctgggcttcctggggcccttagcaatcataggcacctgcgcccacctcatccgggccaagctcttgcgggagggctgggtccatgccaaccggcccaagaggctgctgctggtgctggtgagcgctttctttatcttctggtccccgtttaacgtggtgctgttggtccatctgtggcgacgggtgatgctcaaggaaatctaccacccccggatgctgctcatcctccaggctagctttgccttgggctgtgtcaacagcagcctcaaccccttcctctacgtcttcgttggcagagatttccaagaaaagtttttccagtctttgacttctgccctggcgagggcgtttggagaggaggagtttctgtcatcctgtccccgtggcaacgccccccgggaatga

SEQ ID NO: 378087 - DNA, 575 bp, Homo sapiens
gagctactgtgcctggcctataacaacttttatatcactattttggcaagaatagtatgcaaattctgtctttccaccattgtgaggggttaatattattagccaatatttatagttactgatagtttagaaaactttcagcttcaaactccattattgataatgccatatgtatttttagaatcttcatcaaatctaaaaaaaactctagttccttttttatatataagctgtaagatttctggcatttcaagttttcttgtctattgacttattttaaatgctaacgcccactaaccagtgtgacgctgatgttttttatggtgaattaggagtgtatgttatctttgctaatgtcagatttcgtgccatgtcagcaagaaagttaataaacgcctaagcaagagcaaagagcatggcccagcaaaggaagaagtgccctttggctggagcatggtgtaaagggagatctagaggggacataacctagaaaggtgtgttaaagccaggtcggacacgagttgtagtgccaaatgctgttggtggttgaggatagactatcatgcctctcagtt

SEQ ID NO: 378088 - DNA, 362 bp, Homo sapiens
ttaaaggagaggttcatgacagtattactaactcaagattctcactccgttttccttaaagtaagttctggttgggtgtggtagcccacacctctaatcccagcactttgggaagctgagggtgggaaaatagttttgggccaggagtttgagaccagcctggtgaacatagcaagactctgtctctacaaaaataaaaacattagtccagtgtagtggtacatgccagtcagtattcatagctactcaggaagctgagggaggaggaagtcttgagcccaagagtttgaggttacagtaagctatgattgcaccagtgcactccggcctaggcgagaaagcaaaactctctttaaataaat

SEQ ID NO: 378089 - DNA, 391 bp, Homo sapiens
agtagacatttattaggaggtggagaatctggttgatggcttttgtttttgatttggagatagggtctcactctgttgctcaggctggagtgcagtggtgcaatcctagctcactgcagcctcaaactccttggctcaagtaatcctcccacctcagccttcctagtgtctgggtggcatgcaccagcctggtgaacatagcaagactctgtctctacaaaaataaaaacattagtccagtgtagtggtacatgccagtcagtattcatagctactcaggaagctgagggaggaggaagtcttgagcccaagagtttgaggttacagtaagctatgattgcaccagtgcactccggcctaggcgagaaagcaaaactctctttaaataaat

SEQ ID NO: 378090 - DNA, 446 bp, Homo sapiens
ggcttggcctctctagcctcagtctccccatctgtcagacagagctaaaaccaccacctctcacatgggcagactcagcaaggatcagcttgcaagggaggtgtgaactctgcagagatcttcaatgtcattctcacctccaacctcatctcagccctggacgggtaacagcgaaggaggcccagagagggggattggctcatctagggtcacccagccagtgggggcagagtatccacctggccagggttttttccacttgcccctgtaacagacagggcggggagccagctggcagcctgggcctgggggacctgcgggggtggggaagatccgccctgtcccctgaggggtcagtgtccagtgcgttggaacacagctgtggagcagaggaaccacactcagagtttccaccccacgtggtgggtgggaggacagtgatagct

SEQ ID NO: 378091 - DNA, 367 bp, Homo sapiens
cccactgtccattttgtgagggttgatacagacagaacaaggtgcctgggctactcgtcggtgctggtcaggtctaaagataccgcatggaaatccggtgcccctgggatgagcaccccaccatggagggcaccgctctgggcctgcgtgcctgtggaggcccccttttccggaaggaggagccaaagggaaagttcgttctgatcagttgggctgctctgttctccagtgattatgtccatttaaggtgtttccctgttggcctctacagtaacttcacagctcagaagctctgccacatggacattttccacactttccagcagtttatatcttgatttcagagcatactcagaaatgtgcctgt

SEQ ID NO: 378092 - DNA, 426 bp, Homo sapiens
catgtctgtctagactctgcagccccgctcctgctacccgaaataatgcccacctcccagggtagctataaagcttttgagacaccgtctgcagcgtggccccaaaatgcctggagtgtaagaactcagtgtgcagtaacttctttctttccctttctctgagcaaaaaagaaatcttaaaagaaagtgaaaatctgttgccttggagaagtttgagaaggaaccagaaagtgtgtgggaaggaattcgctcagcctgggctgccatgccggttctggtgggttccacctccgagcgtcccctggctgatgggggcatttaaccacctcctccaggttttgtttcccccacttcacccacatggaacagcagttctcacaggcagacgggctggtgagttagcatctttccatgatgaactgtgct

SEQ ID NO: 378093 - DNA, 855 bp, Homo sapiens
gctagctataacttaggaaaatagatttttcaatggaaagcaatagataaaatatgtagaaggtaccatttaatgttctgtgctatcttatgttattaacctcaacaaagcacctaaaaacagtattttcttatgtaagaaggattgtaatataagcatttctatttatgtctagcaatctgagtgtttttgtaccattttaatgttttatatttaagagactatgacaaaatatagaatatcatgctgaagcactagttaccaagctacagaaacacatcggattcaatgaagtccctttgtttatatgtagatatatacagattcatgtagtataggatttagcaatgtgcctaagtcaagaaagcaaaaggcagtgggggattagaggatagggaaacaattattctagatctgagatagtatcccaggcaattaatggcttcagatatgtcagaggataatgtgtccttcagcaatactatttcatctaatcagccagaatcctaaactatctcttgagactacttgaagtagtcttgagttattaatatgttaaccaaaatggtggcagagtagaaaatctcttggtgatgaaatcaaatggccctacttgacgttcattattgaatcataatggtccttctgaaaaatccctgaaggaggaaggactttaaaactttgcacatgagcctcttatttaataatattgtgccctccaaatttcaatactttcctgacagaattccagcattattggcctcggatgagatgggggttaaggttaagcaattggtagaaattgatgtggagctgtcagaaccagaactcaaactcaggtctatcaagcacagg

SEQ ID NO: 378094 - DNA, 111 bp, Homo sapiens
gtacaaccacccctaaagctcagttttgaagtgagtgtatttatagcttctctgctggtgctgccttctagagggatgatagatcatttgaacccaatgacaatttttaac

SEQ ID NO: 378095 - DNA, 761 bp, Homo sapiens
aactaatatgaagaagtctgtaaacttttcagaaagcaccaattgtaaagtcttgtgaaagcaccaatatgaagacctaaaccaatgaagactcatacaacatttctgggtgaagtgacttcagtaataacaataatgtcaaatatctccaaatagttaactcattttcagccagaatgctattttttttagaggggagtcaggtaaaattaaagttcatgtggtggaacatattccaaaagagccaagaaaacaaagaacaaagagcagaatgagacatgcttaatagatactcaaactttctatataccctgtataatcaaagcagtatgatatgacgtttttatcctaattgcctcactttacaaaattgtaatattaccaatatactgtatatctgcttgtgtatttttttgtctatatatctgcttatgtactttatacataagctgataagcaacttcagcaaagtcttaggatactgaacatctgtgatttatacctgaaaagaataaatcgcaataaatcattggatttcttgatccacccagaactcgtttttgacccttggagggcaatgtggcccctgttgagaatgcatgatttaggggaaaaagaataattgattctacaaatgctactgatataatttgatatctgtcaagaaggaaaaaaagtgaaacctctgttcacaccataaacaaaatggattaaatatttaattgaagagaaatagaaaataaaaattataaaaaaaaaaa

SEQ ID NO: 378096 - DNA, 471 bp, Homo sapiens
ttaaaaatgagccaggcatagaggcatgcacctgtagtcttggcactcaggaggctgaggtggaaggataacatgagcccaagagtttgaagttacagtaactatgatcatgctgctgtattccagcctgggtgacagaacaagacactgacttaaaaaaaaaaaaaaaaaagacatttacaagaatgctatggcaacgttgtttataaggacaaatacaagagaaagatataataaatacttattgacaggggaatgaataaagatggcacagttatacaaaacatatacaatattgagtaaatacacaagacatataaggatgccatgacatacacaagacatacacagccagccatggtggctcacacctgtaatcccagcactttggaaggctgaggcaagaggatcacttgagctcaggagttcaagaccagcctgagcaacatcacaagaccttgtctctactta

SEQ ID NO: 378097 - DNA, 391 bp, Homo sapiens
tgtcgttatcacctaaagaccatggtttacgttaggattcactcttggtgtggtaccttttatgggtttgtacaaatatataatgacatgcattcatcatgataggatcatactagataatcttttagaatttctttttgttagctaagtcttctgatttttctaaaatgaacatgtggccaggagtgatggctcacgtctgtgatcctagcactttgggaggccgaggtgggtggatcacctgaggtcaggagttcgagaccagcctggccaacatggcagaaccccttctctactaaaagtacaaaataattagccgggcatggtggtatgggcctataatcccagctactcaggaggctgaggcaggagaatcgcttgaaccctagag

SEQ ID NO: 378098 - DNA, 506 bp, Homo sapiens
gccctactacatgtcatatgctgttctagttgctggaaacacaaatgtgaatatggtaggcctgcccttaaacaatgaattacagtgtaaaatgaaccttttataaagctggtcctatatcaatctaattattttgtttttcttcatttcaggcctaagacagctttattttctttccactccaaatgatgaagaatccccttagggcaaagaaggaatttctgagcatgttataaaaaaatagaaaataggataagttgcgtgaagatttaatatttctatacatcaaaacctaccataaacaaaattaaaaggcaaatagtaaacttggaagaacatttgtaacataaaagacaaaagtttaatatcataataaaataagcacatagtagcttttagtaaatcattgctgaatgaatgaatacatatatgaattcaaagcaatgaaaaaatcaccccaggaaaagatgtaaacatttgacataggacaagtcaccaaaaaaaaa

SEQ ID NO: 378099 - DNA, 717 bp, Homo sapiens
agtatacgacgagaactaagcttgacgtgaatcggcagactctaatcccagccagcattgcgaggggcctgatagctgcgcgcttgcggagggtcagtcgggcgtcgggagaaataacatctgctttgctgccgagctcagaggagaccccagacccctcccgcagccagagggctggagcctgctcagaggtgctttgaagatgccggaggccccgcctctgctgttggcagctgtgttgctgggcctggtgctgctggtggtgctgctgctgcttctgaggcactggggctggggcctgtgccttatcggctggaacgagttcatcctgcagcccatccacaacctgctcatgggtgacaccaaggagcagcgcatcctgaaccacgtgctgcagcatgcggagcccgggaacgcacagagcgtgctggaggccattgacacctactgcgagcagaaggagtgggccatgaacgtgggcgacaagaaagcaagatcgtgttttcttaaaaaacaagacaaacaaataaataaataaataaaagtgtataaatttgtttcattactgcagttgcactagttacatttctagcactcggtagctctaccggctgccatactgaacaatctgcattggcagattaagaagtttcatcatcacagaaagttcaactgggcagtgctgtttcggaaggtcccttgggcactgggcctctg

SEQ ID NO: 378100 - DNA, 2584 bp, Homo sapiens
ccccagctacccaggaggctgaggcaggagaatcgcttgaacccgggaggcggaggttgccactgcactccagcctgggcgacagagcgagactccatctcaaaaaaaaaaaaaaaaagaaaagaaacataccaagacttaaacctggaaggtgacaagtaggatttatgtgctgaaaccttaataagcaattgctcaagggccagggaaggcgaggatgattgcctagttgatcctcgatgaggacacctggctgatgccgtctcagtctcttctctggttttttccagcatgtcccacggtggtggggagacacgcagagatgcaaggtgctatggcccacaggacggtgtcaaaggtgcccgtgtcctccttgccggtggtgctgtcctcccaggtgacctgcagctggccatcagggagcctcctgacccgcgaggggcacagcccctcaggaaccgggtgccatgagatgccatgtgctctatgaccatggaggacatttgctggtcgaagccgcggagggggatgctgcgcatcatgatggtggtgtccagcccaatcccggtgaggaagccagcacactccagggccacatagctggccccgaccaccaacgtttttccaggggattccttcagccagaagatgtcatcacttgtgattccatattccaaggcaccttcgatgtgcgtggggtatctcggccgccctccagtagcaatgatgatgtgatcggctgacagcagaatctctttcccacctttggcaacgccgcaaaccgtgtgctcgtcaacaaagctggctttgatgttaaagtacttgacttttctgtcctgaagctggacacggtggccccagttcaaggatttcacgtgattttgaacagcttctgccatcttcctccagtcatgcggcacgggctgggccacctcccagccatagttgggggcatcttggatcaggcctcccagcagtgccgcctggtgcatcagcttcttggggatgcagcccacgttgacgcaggtgccgccgaggccccaccgggtgccttggggagaaggttccacgtagtccaccacggacaccttccttcccagctgagcggcctccttggcacaagccaggccaccagatcccccgccgaccaccaggagatcatagtcccgctgacctgctgctgcgccccgcgccgcgccccgcaccccgcccgccacggcctgcgtccgccaccggaagcgccctcctaatccccgcagcgccaccgccattgccgccatcgtcgtggggcttctggggcagctagggctgcccgccgcgctgcctgcgccggaccggggcgggtccagtcccgggcgggccgtcgcgggagagaaataacatctgctttgctgccgagctcagaggagaccccagacccctcccgcagccagagggctggagcctgctcagaggtgctttgaagatgccggaggccccgcctctgctgttggcagctgtgttgctgggcctggtgctgctggtggtgctgctgctgcttctgaggcactggggctggggcctgtgccttatcggctggaacgagttcatcctgcagcccatccacaacctgctcatgggtgacaccaaggagcagcgcatcctgaaccacgtgctgcagcatgcggagcccgggaacgcacagagcgtgctggaggccattgacacctactgcgagcagaaggagtgggccatgaacgtgggcgacaagaaaggcaagatcgtggacgccgtgattcaggagcaccagccctccgtgctgctggagctgggggcctactgtggctactcagctgtgcgcatggcccgcctgctgtcaccaggggcgaggctcatcaccatcgagatcaaccccgactgtgccgccatcacccagcggatggtggatttcgctggcgtgaaggacaaggtcacccttgtggttggagcgtcccaggacatcatcccccagctgaagaagaagtatgatgtggacacactggacatggtcttcctcgaccactggaaggaccggtacctgccggacacgcttctcttggaggaatgtggcctgctgcggaaggggacagtgctactggctgacaacgtgatctgcccaggtgcgccagacttcctagcacacgtgcgcgggagcagctgctttgagtgcacacactaccaatcgttcctggaatacagggaggtggtggacggcctggagaaggccatctacaagggcccaggcagcgaagcagggccctgactgccccccccggcccccctctcgggctctctcacccagcctggtactgaaggtgccagacgtgctcctgctgaccttctgcggctccgggctgtgtcctaaatgcaaagcacacctcggccgaggcctgcgccctgacatgctaacctctctgaactgcaacactggattgttcttttttaagactcaatcatgacttctttactaacactggctagctatattatcttatatactaatatcatgttttaaaaatataaaatagaaattaagaatctaaatatttagatataaaaaaaaaaa

SEQ ID NO: 378101 - DNA, 1339 bp, Homo sapiens
gcccgcatgagcaggcagagtggagataacacggatcgctgtgtacactgtgtgctccggttgttgcatccgagggttgatcggatggtggttcccatccagatccaagtcctggcccctgatcacagagaaacacagctggacattaaagtgaaataacatctgctttgctgccgagctcagaggagaccccagacccctcccgcagccagagggctggagcctgctcagaggtgctttgaagatgccggaggccccgcctctgctgttggcagctgtgttgctgggcctggtgctgctggtggtgctgctgctgcttctgaggcactggggctggggcctgtgccttatcggctggaacgagttcatcctgcagcccatccacaacctgctcatgggtgacaccaaggagcagcgcatcctgaaccacgtgctgcagcatgcggagcccgggaacgcacagagcgtgctggaggccattgacacctactgcgagcagaaggagtgggccatgaacgtgggcgacaagaaaggcaagatcgtggacgccgtgattcaggagcaccagccctccgtgctgctggagctgggggcctactgtggctactcagctgtgcgcatggcccgcctgctgtcaccaggggcgaggctcatcaccatcgagatcaaccccgactgtgccgccatcacccagcggatggtggatttcgctggcgtgaaggacaaggtcacccttgtggttggagcgtcccaggacatcatcccccagctgaagaagaagtatgatgtggacacactggacatggtcttcctcgaccactggaaggaccggtacctgccggacacgcttctcttggaggaatgtggcctgctgcggaaggggacagtgctactggctgacaacgtgatctgcccaggtgcgccagacttcctagcacacgtgcgcgggagcagctgctttgagtgcacacactaccaatcgttcctggaatacagggaggtggtggacggcctggagaaggccatctacaagggcccaggcagcgaagcagggccctgactgccccccccggcccccctctcgggctctctcacccagcctggtactgaaggtgccagacgtgctcctgctgaccttctgcggctccgggctgtgtcctaaatgcaaagcacacctcggccgaggcctgcgccctgacatgctaacctctctgaactgcaacactggattgttcttttttaagactcaatcatgacttctttactaacactggctagctatattatcttatatactaatatcatgttttaaaaatataaaatagaaattaagaatcta

SEQ ID NO: 378102 - DNA, 2628 bp, Homo sapiens
ccccagctacccaggaggctgaggcaggagaatcgcttgaacccgggaggcggaggttgccactgcactccagcctgggcgacagagcgagactccatctcaaaaaaaaaaaaaaaaagaaaagaaacataccaagacttaaacctggaaggtgacaagtaggatttatgtgctgaaaccttaataagcaattgctcaagggccagggaaggcgaggatgattgcctagttgatcctcgatgaggacacctggctgatgccgtctcagtctcttctctggttttttccagcatgtcccacggtggtggggagacacgcagagatgcaaggtgctatggcccacaggacggtgtcaaaggtgcccgtgtcctccttgccggtggtgctgtcctcccaggtgacctgcagctggccatcagggagcctcctgacccgcgaggggcacagcccctcaggaaccgggtgccatgagatgccatgtgctctatgaccatggaggacatttgctggtcgaagccgcggagggggatgctgcgcatcatgatggtggtgtccagcccaatcccggtgaggaagccagcacactccagggccacatagctggccccgaccaccaacgtttttccaggggattccttcagccagaagatgtcatcacttgtgattccatattccaaggcaccttcgatgtgcgtggggtatctcggccgccctccagtagcaatgatgatgtgatcggctgacagcagaatctctttcccacctttggcaacgccgcaaaccgtgtgctcgtcaacaaagctggctttgatgttaaagtacttgacttttctgtcctgaagctggacacggtggccccagttcaaggatttcacgtgattttgaacagcttctgccatcttcctccagtcatgcggcacgggctgggccacctcccagccatagttgggggcatcttggatcaggcctcccagcagtgccgcctggtgcatcagcttcttggggatgcagcccacgttgacgcaggtgccgccgaggccccaccgggtgccttggggagaaggttccacgtagtccaccacggacaccttccttcccagctgagcggcctccttggcacaagccaggccaccagatcccccgccgaccaccaggagatcatagtcccgctgacctgctgctgcgccccgcgccgcgccccgcaccccgcccgccacggcctgcgtccgccaccggaagcgccctcctaatccccgcagcgccaccgccattgccgccatcgtcgtggggcttctggggcagctagggctgcccgccgcgctgcctgcgccggaccggggcgggtccagtcccgggcgggccgtcgcgggagaggtgctaacggatggaagggttgtttctacctgttggccattgtggatgatgttgctatgcatattgggaaataacatctgctttgctgccgagctcagaggagaccccagacccctcccgcagccagagggctggagcctgctcagaggtgctttgaagatgccggaggccccgcctctgctgttggcagctgtgttgctgggcctggtgctgctggtggtgctgctgctgcttctgaggcactggggctggggcctgtgccttatcggctggaacgagttcatcctgcagcccatccacaacctgctcatgggtgacaccaaggagcagcgcatcctgaaccacgtgctgcagcatgcggagcccgggaacgcacagagcgtgctggaggccattgacacctactgcgagcagaaggagtgggccatgaacgtgggcgacaagaaaggcaagatcgtggacgccgtgattcaggagcaccagccctccgtgctgctggagctgggggcctactgtggctactcagctgtgcgcatggcccgcctgctgtcaccaggggcgaggctcatcaccatcgagatcaaccccgactgtgccgccatcacccagcggatggtggatttcgctggcgtgaaggacaaggtcacccttgtggttggagcgtcccaggacatcatcccccagctgaagaagaagtatgatgtggacacactggacatggtcttcctcgaccactggaaggaccggtacctgccggacacgcttctcttggaggaatgtggcctgctgcggaaggggacagtgctactggctgacaacgtgatctgcccaggtgcgccagacttcctagcacacgtgcgcgggagcagctgctttgagtgcacacactaccaatcgttcctggaatacagggaggtggtggacggcctggagaaggccatctacaagggcccaggcagcgaagcagggccctgactgccccccccggcccccctctcgggctctctcacccagcctggtactgaaggtgccagacgtgctcctgctgaccttctgcggctccgggctgtgtcctaaatgcaaagcacacctcggccgaggcctgcgccctgacatgctaacctctctgaactgcaacactggattgttcttttttaagactcaatcatgacttctttactaacactggctagctatattatcttatatactaatatcatgttttaaaaatataaaatagaaattaagaatcta

SEQ ID NO: 378103 - DNA, 1553 bp, Homo sapiens
ttgaagggggtgtctccttcaagagaaagtagggaagtatggaggtgataggaagggagaggcctgagaggagctagtttggggagatctcaagtatcccaaaggagccactgatgttccaaattatccttggtaacgtcacatcaacaaggaaggaagcagacagaggcgcacttgttccttgcagttttgttttgatgtgctgattaaagtagcgcagagggcatgatcagcagggctccagtaagacgctcccacgggaggagcaagaacacagaacagagggggcaagacagctccaccaggagtcaggagtgaatcccctctgggaacgaggcactaggaagaagaacttccagcccaggagaaataacatctgctttgctgccgagctcagaggagaccccagacccctcccgcagccagagggctggagcctgctcagaggtgctttgaagatgccggaggccccgcctctgctgttggcagctgtgttgctgggcctggtgctgctggtggtgctgctgctgcttctgaggcactggggctggggcctgtgccttatcggctggaacgagttcatcctgcagcccatccacaacctgctcatgggtgacaccaaggagcagcgcatcctgaaccacgtgctgcagcatgcggagcccgggaacgcacagagcgtgctggaggccattgacacctactgcgagcagaaggagtgggccatgaacgtgggcgacaagaaaggcaagatcgtggacgccgtgattcaggagcaccagccctccgtgctgctggagctgggggcctactgtggctactcagctgtgcgcatggcccgcctgctgtcaccaggggcgaggctcatcaccatcgagatcaaccccgactgtgccgccatcacccagcggatggtggatttcgctggcgtgaaggacaaggtcacccttgtggttggagcgtcccaggacatcatcccccagctgaagaagaagtatgatgtggacacactggacatggtcttcctcgaccactggaaggaccggtacctgccggacacgcttctcttggaggaatgtggcctgctgcggaaggggacagtgctactggctgacaacgtgatctgcccaggtgcgccagacttcctagcacacgtgcgcgggagcagctgctttgagtgcacacactaccaatcgttcctggaatacagggaggtggtggacggcctggagaaggccatctacaagggcccaggcagcgaagcagggccctgactgccccccccggcccccctctcgggctctctcacccagcctggtactgaaggtgccagacgtgctcctgctgaccttctgcggctccgggctgtgtcctaaatgcaaagcacacctcggccgaggcctgcgccctgacatgctaacctctctgaactgcaacactggattgttcttttttaagactcaatcatgacttctttactaacactggctagctatattatcttatatactaatatcatgttttaaaaatataaaatagaaattaagaatcta

SEQ ID NO: 378104 - DNA, 2854 bp, Homo sapiens
ccccagctacccaggaggctgaggcaggagaatcgcttgaacccgggaggcggaggttgccactgcactccagcctgggcgacagagcgagactccatctcaaaaaaaaaaaaaaaaagaaaagaaacataccaagacttaaacctggaaggtgacaagtaggatttatgtgctgaaaccttaataagcaattgctcaagggccagggaaggcgaggatgattgcctagttgatcctcgatgaggacacctggctgatgccgtctcagtctcttctctggttttttccagcatgtcccacggtggtggggagacacgcagagatgcaaggtgctatggcccacaggacggtgtcaaaggtgcccgtgtcctccttgccggtggtgctgtcctcccaggtgacctgcagctggccatcagggagcctcctgacccgcgaggggcacagcccctcaggaaccgggtgccatgagatgccatgtgctctatgaccatggaggacatttgctggtcgaagccgcggagggggatgctgcgcatcatgatggtggtgtccagcccaatcccggtgaggaagccagcacactccagggccacatagctggccccgaccaccaacgtttttccaggggattccttcagccagaagatgtcatcacttgtgattccatattccaaggcaccttcgatgtgcgtggggtatctcggccgccctccagtagcaatgatgatgtgatcggctgacagcagaatctctttcccacctttggcaacgccgcaaaccgtgtgctcgtcaacaaagctggctttgatgttaaagtacttgacttttctgtcctgaagctggacacggtggccccagttcaaggatttcacgtgattttgaacagcttctgccatcttcctccagtcatgcggcacgggctgggccacctcccagccatagttgggggcatcttggatcaggcctcccagcagtgccgcctggtgcatcagcttcttggggatgcagcccacgttgacgcaggtgccgccgaggccccaccgggtgccttggggagaaggttccacgtagtccaccacggacaccttccttcccagctgagcggcctccttggcacaagccaggccaccagatcccccgccgaccaccaggagatcatagtcccgctgacctgctgctgcgccccgcgccgcgccccgcaccccgcccgccacggcctgcgtccgccaccggaagcgccctcctaatccccgcagcgccaccgccattgccgccatcgtcgtggggcttctggggcagctagggctgcccgccgcgctgcctgcgccggaccggggcgggtccagtcccgggcgggccgtcgcgggagagaaataacatctgctttgctgccgagctcagaggagaccccagacccctcccgcagccagagggctggagcctgctcagaggtgctttgaagaggatccctgggctgcctggggaagcacccagggccagggagtgtgaccctgcaggctccacacaggactgccagaggcacacacctgctctgtctacccgagggcaccagagggcacgagaaggctggctccctggcgctgacacgtcaggcaactgaggcacaaggctggcatttctgaaccttgcccctctgcaaacacaagggggcgatggtggcactccaagcaaaggggcgtgtgggtgctgcaggaggagcacagagcactggcgcccctcccctcccgccctgcagatgccggaggccccgcctctgctgttggcagctgtgttgctgggcctggtgctgctggtggtgctgctgctgcttctgaggcactggggctggggcctgtgccttatcggctggaacgagttcatcctgcagcccatccacaacctgctcatgggtgacaccaaggagcagcgcatcctgaaccacgtgctgcagcatgcggagcccgggaacgcacagagcgtgctggaggccattgacacctactgcgagcagaaggagtgggccatgaacgtgggcgacaagaaaggcaagatcgtggacgccgtgattcaggagcaccagccctccgtgctgctggagctgggggcctactgtggctactcagctgtgcgcatggcccgcctgctgtcaccaggggcgaggctcatcaccatcgagatcaaccccgactgtgccgccatcacccagcggatggtggatttcgctggcgtgaaggacaaggtcacccttgtggttggagcgtcccaggacatcatcccccagctgaagaagaagtatgatgtggacacactggacatggtcttcctcgaccactggaaggaccggtacctgccggacacgcttctcttggaggaatgtggcctgctgcggaaggggacagtgctactggctgacaacgtgatctgcccaggtgcgccagacttcctagcacacgtgcgcgggagcagctgctttgagtgcacacactaccaatcgttcctggaatacagggaggtggtggacggcctggagaaggccatctacaagggcccaggcagcgaagcagggccctgactgccccccccggcccccctctcgggctctctcacccagcctggtactgaaggtgccagacgtgctcctgctgaccttctgcggctccgggctgtgtcctaaatgcaaagcacacctcggccgaggcctgcgccctgacatgctaacctctctgaactgcaacactggattgttcttttttaagactcaatcatgacttctttactaacactggctagctatattatcttatatactaatatcatgttttaaaaatataaaatagaaattaagaatcta

SEQ ID NO: 378105 - DNA, 2636 bp, Homo sapiens
  misc_feature (1492)..(1492): n is a, c, g, or t
  misc_feature (1509)..(1509): n is a, c, g, or t
  misc_feature (1512)..(1512): n is a, c, g, or t
ccccagctacccaggaggctgaggcaggagaatcgcttgaacccgggaggcggaggttgccactgcactccagcctgggcgacagagcgagactccatctcaaaaaaaaaaaaaaaaagaaaagaaacataccaagacttaaacctggaaggtgacaagtaggatttatgtgctgaaaccttaataagcaattgctcaagggccagggaaggcgaggatgattgcctagttgatcctcgatgaggacacctggctgatgccgtctcagtctcttctctggttttttccagcatgtcccacggtggtggggagacacgcagagatgcaaggtgctatggcccacaggacggtgtcaaaggtgcccgtgtcctccttgccggtggtgctgtcctcccaggtgacctgcagctggccatcagggagcctcctgacccgcgaggggcacagcccctcaggaaccgggtgccatgagatgccatgtgctctatgaccatggaggacatttgctggtcgaagccgcggagggggatgctgcgcatcatgatggtggtgtccagcccaatcccggtgaggaagccagcacactccagggccacatagctggccccgaccaccaacgtttttccaggggattccttcagccagaagatgtcatcacttgtgattccatattccaaggcaccttcgatgtgcgtggggtatctcggccgccctccagtagcaatgatgatgtgatcggctgacagcagaatctctttcccacctttggcaacgccgcaaaccgtgtgctcgtcaacaaagctggctttgatgttaaagtacttgacttttctgtcctgaagctggacacggtggccccagttcaaggatttcacgtgattttgaacagcttctgccatcttcctccagtcatgcggcacgggctgggccacctcccagccatagttgggggcatcttggatcaggcctcccagcagtgccgcctggtgcatcagcttcttggggatgcagcccacgttgacgcaggtgccgccgaggccccaccgggtgccttggggagaaggttccacgtagtccaccacggacaccttccttcccagctgagcggcctccttggcacaagccaggccaccagatcccccgccgaccaccaggagatcatagtcccgctgacctgctgctgcgccccgcgccgcgccccgcaccccgcccgccacggcctgcgtccgccaccggaagcgccctcctaatccccgcagcgccaccgccattgccgccatcgtcgtggggcttctggggcagctagggctgcccgccgcgctgcctgcgccggaccggggcgggtccagtcccgggcgggccgtcgcgggagagaaataacatctgctttgctgccgagctcagaggagaccccagacccctcccgcagccagagggctggagcctgctcagaggtgctttgaagatgcccggacggggcccccccccgggncccccttttccctttgnccntgggtctggggccaggccctgggtggtttgcctaggggccctggctgggcctggtgctgctggtggtgctgctgctgcttctgaggcactggggctggggcctgtgccttatcggctggaacgagttcatcctgcagcccatccacaacctgctcatgggtgacaccaaggagcagcgcatcctgaaccacgtgctgcagcatgcggagcccgggaacgcacagagcgtgctggaggccattgacacctactgcgagcagaaggagtgggccatgaacgtgggcgacaagaaaggcaagatcgtggacgccgtgattcaggagcaccagccctccgtgctgctggagctgggggcctactgtggctactcagctgtgcgcatggcccgcctgctgtcaccaggggcgaggctcatcaccatcgagatcaaccccgactgtgccgccatcacccagcggatggtggatttcgctggcgtgaaggacaaggtcacccttgtggttggagcgtcccaggacatcatcccccagctgaagaagaagtatgatgtggacacactggacatggtcttcctcgaccactggaaggaccggtacctgccggacacgcttctcttggaggaatgtggcctgctgcggaaggggacagtgctactggctgacaacgtgatctgcccaggtgcgccagacttcctagcacacgtgcgcgggagcagctgctttgagtgcacacactaccaatcgttcctggaatacagggaggtggtggacggcctggagaaggccatctacaagggcccaggcagcgaagcagggccctgactgccccccccggcccccctctcgggctctctcacccagcctggtactgaaggtgccagacgtgctcctgctgaccttctgcggctccgggctgtgtcctaaatgcaaagcacacctcggccgaggcctgcgccctgacatgctaacctctctgaactgcaacactggattgttcttttttaagactcaatcatgacttctttactaacactggctagctatattatcttatatactaatatcatgttttaaaaatataaaatagaaattaagaatctaaatatttagatataaaaaaaaaaa

SEQ ID NO: 378106 - DNA, 2608 bp, Homo sapiens
ccccagctacccaggaggctgaggcaggagaatcgcttgaacccgggaggcggaggttgccactgcactccagcctgggcgacagagcgagactccatctcaaaaaaaaaaaaaaaaagaaaagaaacataccaagacttaaacctggaaggtgacaagtaggatttatgtgctgaaaccttaataagcaattgctcaagggccagggaaggcgaggatgattgcctagttgatcctcgatgaggacacctggctgatgccgtctcagtctcttctctggttttttccagcatgtcccacggtggtggggagacacgcagagatgcaaggtgctatggcccacaggacggtgtcaaaggtgcccgtgtcctccttgccggtggtgctgtcctcccaggtgacctgcagctggccatcagggagcctcctgacccgcgaggggcacagcccctcaggaaccgggtgccatgagatgccatgtgctctatgaccatggaggacatttgctggtcgaagccgcggagggggatgctgcgcatcatgatggtggtgtccagcccaatcccggtgaggaagccagcacactccagggccacatagctggccccgaccaccaacgtttttccaggggattccttcagccagaagatgtcatcacttgtgattccatattccaaggcaccttcgatgtgcgtggggtatctcggccgccctccagtagcaatgatgatgtgatcggctgacagcagaatctctttcccacctttggcaacgccgcaaaccgtgtgctcgtcaacaaagctggctttgatgttaaagtacttgacttttctgtcctgaagctggacacggtggccccagttcaaggatttcacgtgattttgaacagcttctgccatcttcctccagtcatgcggcacgggctgggccacctcccagccatagttgggggcatcttggatcaggcctcccagcagtgccgcctggtgcatcagcttcttggggatgcagcccacgttgacgcaggtgccgccgaggccccaccgggtgccttggggagaaggttccacgtagtccaccacggacaccttccttcccagctgagcggcctccttggcacaagccaggccaccagatcccccgccgaccaccaggagatcatagtcccgctgacctgctgctgcgccccgcgccgcgccccgcaccccgcccgccacggcctgcgtccgccaccggaagcgccctcctaatccccgcagcgccaccgccattgccgccatcgtcgtggggcttctggggcagctagggctgcccgccgcgctgcctgcgccggaccggggcgggtccagtcccgggcgggccgtcgcgggagagaaataacatctgctttgctgccgagctcagaggagaccccagacccctcccgcagccagagggctggagcctgctcagaggtgctttgaagatgccggaggccccgcctctgctgttggcagctgtgttgctgggcctggtgctgctggtggtgctgctgctgcttctgaggcactggggctggggcctgtgccttatcggctggaacgagttcatcctgcagcccatccacaacctgctcatgggtgacaccaaggagcagcgcatcctgaaccacgtgctgcagcatgcggagcccgggaacgcacagagcgtgctggaggccattgacacctactgcgagcagaaggagtgggccatgaacgtgggcgacaagaaaggcaagatcgtggacgccgtgattcaggagcaccagccctccgtgctgctggagctgggggcctactgtggctactcagctgtgcgcatggcccgcctgctgtcaccaggggcgaggctcatcaccatcgagatcaaccccgactgtgccgccatcacccagcggatggtggatttcgctggcgtgaaggacaaggtcacccttgtggttggagcgtcccaggacatcatcccccagctgaagaagaagtatgatgtggacacactggacatggtcttcctcgaccactggaaggaccggtacctgccggacacgcttctcttggaggtgcagtggtctggtgtctttcagtccgctgacgtcttctgtatccctgatgaccagattgggctcctgagtcccctggcgcaacccgagaagtccaggagcccaggcccctcactcatgcattccctggcccagactggaaggcagccgccctgctcaaggcctaggccattgtcctcctcccgggtggcgctttgttctacgtcttttcagctgacattgctaggacatttttttttttttctaaatgaaaacacatcatgattcatggtggtacttcctgctcaactccggaccttggggctgtcccctgacctcactgaccttgcagccgtgtggtgtccatactgtcacatgaaagccccctgctttctctgcagcatacaggctggaaacgaccgccacccaccaccaggacagctgcaagccctgtgggactctccaggcccatcccagaggcatgtggggtcggataccagtgtttcaaggcacctgcctgcaaattgattttattatactttagatgtt

SEQ ID NO: 378107 - DNA, 2642 bp, Homo sapiens
ccccagctacccaggaggctgaggcaggagaatcgcttgaacccgggaggcggaggttgccactgcactccagcctgggcgacagagcgagactccatctcaaaaaaaaaaaaaaaaagaaaagaaacataccaagacttaaacctggaaggtgacaagtaggatttatgtgctgaaaccttaataagcaattgctcaagggccagggaaggcgaggatgattgcctagttgatcctcgatgaggacacctggctgatgccgtctcagtctcttctctggttttttccagcatgtcccacggtggtggggagacacgcagagatgcaaggtgctatggcccacaggacggtgtcaaaggtgcccgtgtcctccttgccggtggtgctgtcctcccaggtgacctgcagctggccatcagggagcctcctgacccgcgaggggcacagcccctcaggaaccgggtgccatgagatgccatgtgctctatgaccatggaggacatttgctggtcgaagccgcggagggggatgctgcgcatcatgatggtggtgtccagcccaatcccggtgaggaagccagcacactccagggccacatagctggccccgaccaccaacgtttttccaggggattccttcagccagaagatgtcatcacttgtgattccatattccaaggcaccttcgatgtgcgtggggtatctcggccgccctccagtagcaatgatgatgtgatcggctgacagcagaatctctttcccacctttggcaacgccgcaaaccgtgtgctcgtcaacaaagctggctttgatgttaaagtacttgacttttctgtcctgaagctggacacggtggccccagttcaaggatttcacgtgattttgaacagcttctgccatcttcctccagtcatgcggcacgggctgggccacctcccagccatagttgggggcatcttggatcaggcctcccagcagtgccgcctggtgcatcagcttcttggggatgcagcccacgttgacgcaggtgccgccgaggccccaccgggtgccttggggagaaggttccacgtagtccaccacggacaccttccttcccagctgagcggcctccttggcacaagccaggccaccagatcccccgccgaccaccaggagatcatagtcccgctgacctgctgctgcgccccgcgccgcgccccgcaccccgcccgccacggcctgcgtccgccaccggaagcgccctcctaatccccgcagcgccaccgccattgccgccatcgtcgtggggcttctggggcagctagggctgcccgccgcgctgcctgcgccggaccggggcgggtccagtcccgggcgggccgtcgcgggagagaaataacatctgctttgctgccgagctcagaggagaccccagacccctcccgcagccagagggctggagcctgctcagaggtgctttgaagatgccggaggccccgcctctgctgttggcagctgtgttgctgggcctggtgctgctggtggtgctgctgctgcttctgaggcactggggctggggcctgtgccttatcggctggaacgagttcatcctgcagcccatccacaacctgctcatgggtgacaccaaggagcagcgcatcctgaaccacgtgctgcagcatgcggagcccgggaacgcacagagcgtgctggaggccattgacacctactgcgagcagaaggagtgggccatgaacgtgggcgacaagaaaggcaagatcgtggacgccgtgattcaggagcaccagccctccgtgctgctggagctgggggcctactgtggctactcagctgtgcgcatggcccgcctgctgtcaccaggggcgaggctcatcaccatcgagatcaaccccgactgtgccgccatcacccagcggatggtggatttcgctggcgtgaaggacaaggtgtgtagggatggcctcctgtctgtgaggacgtgggcactgacaggcgctgttccaggtcacccttgtggttggagcgtcccaggacatcatcccccagctgaagaagaagtatgatgtggacacactggacatggtcttcctcgaccactggaaggaccggtacctgccggacacgcttctcttggaggaatgtggcctgctgcggaaggggacagtgctactggctgacaacgtgatctgcccaggtgcgccagacttcctagcacacgtgcgcgggagcagctgctttgagtgcacacactaccaatcgttcctggaatacagggaggtggtggacggcctggagaaggccatctacaagggcccaggcagcgaagcagggccctgactgccccccccggcccccctctcgggctctctcacccagcctggtactgaaggtgccagacgtgctcctgctgaccttctgcggctccgggctgtgtcctaaatgcaaagcacacctcggccgaggcctgcgccctgacatgctaacctctctgaactgcaacactggattgttcttttttaagactcaatcatgacttctttactaacactggctagctatattatcttatatactaatatcatgttttaaaaatataaaatagaaattaagaatctaaatatttagatataaaaaaaaaaa

SEQ ID NO: 378108 - DNA, 857 bp, Homo sapiens
tccaagcgcgctcacagtggggaccaggcaagatcgtggacgccgtgattcaggagcaccagccctccgtgctgctggagctgggggcctactgtggctactcagctgtgcgcatggcccgcctgctgtcaccaggggcgaggctcatcaccatcgagatcaaccccgactgtgccgccatcacccagcggatggtggatttcgctggcgtgaaggacaaggtcacccttgtggttggagcgtcccaggacatcatcccccagctgaagaagaagtatgatgtggacacactggacatggtcttcctcgaccactggaaggaccggtacctgccggacacgcttctcttggaggaatgtggcctgctgcggaaggggacagtgctactggctgacaacgtgatctgcccaggtgcgccagacttcctagcacacgtgcgcgggagcagctgctttgagtgcacacactaccaatcgttcctggaatacagggaggtggtggacggcctggagaaggccatctacaagggcccaggcagcgaagcagggccctgactgccccccccggcccccctctcgggctctctcacccagcctggtactgaaggtgccagacgtgctcctgctgaccttctgcggctccgggctgtgtcctaaatgcaaagcacacctcggccgaggcctgcgccctgacatgctaacctctctgaactgcaacactggattgttcttttttaagactcaatcatgacttctttactaacactggctagctatattatcttatatactaatatcatgttttaaaaatataaaatagaaattaagaatctaaatatttagatataaaaaaaaaaa

SEQ ID NO: 378109 - DNA, 946 bp, Homo sapiens
ccctgtgggtcatggcacgtcctgccccgctgggaaacacagtgggccacgggtttccctgcaggcctgggacccttcccaagggtagcagcagaaggcagcacgattcccactcctgcagctgtggacaggggcacccccactgtcactgagccccgtgctgctggagctgggggcctactgtggctactcagctgtgcgcatggcccgcctgctgtcaccaggggcgaggctcatcaccatcgagatcaaccccgactgtgccgccatcacccagcggatggtggatttcgctggcgtgaaggacaaggtcacccttgtggttggagcgtcccaggacatcatcccccagctgaagaagaagtatgatgtggacacactggacatggtcttcctcgaccactggaaggaccggtacctgccggacacgcttctcttggaggaatgtggcctgctgcggaaggggacagtgctactggctgacaacgtgatctgcccaggtgcgccagacttcctagcacacgtgcgcgggagcagctgctttgagtgcacacactaccaatcgttcctggaatacagggaggtggtggacggcctggagaaggccatctacaagggcccaggcagcgaagcagggccctgactgccccccccggcccccctctcgggctctctcacccagcctggtactgaaggtgccagacgtgctcctgctgaccttctgcggctccgggctgtgtcctaaatgcaaagcacacctcggccgaggcctgcgccctgacatgctaacctctctgaactgcaacactggattgttcttttttaagactcaatcatgacttctttactaacactggctagctatattatcttatatactaatatcatgttttaaaaatataaaatagaaattaagaatctaaatatttagatataaaaaaaaaaa

SEQ ID NO: 378110 - DNA, 2348 bp, Homo sapiens
ccccagctacccaggaggctgaggcaggagaatcgcttgaacccgggaggcggaggttgccactgcactccagcctgggcgacagagcgagactccatctcaaaaaaaaaaaaaaaaagaaaagaaacataccaagacttaaacctggaaggtgacaagtaggatttatgtgctgaaaccttaataagcaattgctcaagggccagggaaggcgaggatgattgcctagttgatcctcgatgaggacacctggctgatgccgtctcagtctcttctctggttttttccagcatgtcccacggtggtggggagacacgcagagatgcaaggtgctatggcccacaggacggtgtcaaaggtgcccgtgtcctccttgccggtggtgctgtcctcccaggtgacctgcagctggccatcagggagcctcctgacccgcgaggggcacagcccctcaggaaccgggtgccatgagatgccatgtgctctatgaccatggaggacatttgctggtcgaagccgcggagggggatgctgcgcatcatgatggtggtgtccagcccaatcccggtgaggaagccagcacactccagggccacatagctggccccgaccaccaacgtttttccaggggattccttcagccagaagatgtcatcacttgtgattccatattccaaggcaccttcgatgtgcgtggggtatctcggccgccctccagtagcaatgatgatgtgatcggctgacagcagaatctctttcccacctttggcaacgccgcaaaccgtgtgctcgtcaacaaagctggctttgatgttaaagtacttgacttttctgtcctgaagctggacacggtggccccagttcaaggatttcacgtgattttgaacagcttctgccatcttcctccagtcatgcggcacgggctgggccacctcccagccatagttgggggcatcttggatcaggcctcccagcagtgccgcctggtgcatcagcttcttggggatgcagcccacgttgacgcaggtgccgccgaggccccaccgggtgccttggggagaaggttccacgtagtccaccacggacaccttccttcccagctgagcggcctccttggcacaagccaggccaccagatcccccgccgaccaccaggagatcatagtcccgctgacctgctgctgcgccccgcgccgcgccccgcaccccgcccgccacggcctgcgtccgccaccggaagcgccctcctaatccccgcagcgccaccgccattgccgccatcgtcgtggggcttctggggcagctagggctgcccgccgcgctgcctgcgccggaccggggcgggtccagtcccgggcgggccgtcgcgggagagaaataacatctgctttgctgccgagctcagaggagaccccagacccctcccgcagccagagggctggagcctgctcagaggtgctttgaagatgccggaggccccgcctctgctgttggcagctgtgttgctgggcctggtgctgctggtggtgctgctgctgcttctgaggcactggggctggggcctgtgccttatcggctggaacgagttcatcctgcagcccatccacaacctgctcatgggtgacaccaaggagcagcgcatcctgaaccacgtgctgcagcatgcggagcccgggaacgcacagagcgtgctggaggccattgacacctactgcgagcagaaggagtgggccatgaacgtgggcgacaagaaaggcaagatcgtggacgccgtgattcaggagcaccagccctccgtgctgctggagctgggggcctactgtggctactcagctgtgcgcatggcccgcctgctgtcaccaggggcgaggctcatcaccatcgagatcaaccccgactgtgccgccatcacccagcggatggtggatttcgctggcgtgaaggacaagctacagcacatgccggcatgtgctgtaggccagcgacgcttgtagaactcactctgggctgtaacgtggcactggtaggttgggacaccagggaagaagatcaacgcctcactgaaacatggctgtgtttgcagcctgctctagtgggacagcccagagcctggctgcccatcatgtggccccacccaatcaagggaagaaggaggaatgctggactggaggcccctggagccagatggcaagagggtgacagcttcctttcctgtgtgtactctgtccagttcctttagaaaaaatggatgcccagaggactcccaaccctggcttggggtcaagaaacagccagcaagagttagggccttaggcactggctttgttcatatgaccgacgctgcctaca

SEQ ID NO: 378111 - DNA, 691 bp, Homo sapiens
gaatggtaaccttgtccttcacgccagcgaaatccaccatccgctgggtgatggcgtcacccttgtggttggagcgtcccaggacatcatcccccagctgaagaagaagtatgatgtggacacactggacatggtcttcctcgaccactggaaggaccggtacctgccggacacgcttctcttggaggaatgtggcctgctgcggaaggggacagtgctactggctgacaacgtgatctgcccaggtgcgccagacttcctagcacacgtgcgcgggagcagctgctttgagtgcacacactaccaatcgttcctggaatacagggaggtggtggacggcctggagaaggccatctacaagggcccaggcagcgaagcagggccctgactgccccccccggcccccctctcgggctctctcacccagcctggtactgaaggtgccagacgtgctcctgctgaccttctgcggctccgggctgtgtcctaaatgcaaagcacacctcggccgaggcctgcgccctgacatgctaacctctctgaactgcaacactggattgttcttttttaagactcaatcatgacttctttactaacactggctagctatattatcttatatactaatatcatgttttaaaaatataaaatagaaattaagaatctaaatatttagatataaaaaaaaaaa

SEQ ID NO: 378112 - DNA, 704 bp, Homo sapiens
agaaaggtccctgtcctcacggggcccatgttctgaaggtggcacccaagtcttgtacagtcctttcctgcaggagtcacgctgggcagaaagtggaaacctggccccaggggctaggcacaggcgtggtgccgtggcctagtgaggagcacccatcctggtttggggcaggttctctgggcacctctgaccctcacctcccccaccccccggtctgtttgcaggaatgtggcctgctgcggaaggggacagtgctactggctgacaacgtgatctgcccaggtgcgccagacttcctagcacacgtgcgcgggagcagctgctttgagtgcacacactaccaatcgttcctggaatacagggaggtggtggacggcctggagaaggccatctacaagggcccaggcagcgaagcagggccctgactgccccccccggcccccctctcgggctctctcacccagcctggtactgaaggtgccagacgtgctcctgctgaccttctgcggctccgggctgtgtcctaaatgcaaagcacacctcggccgaggcctgcgccctgacatgctaacctctctgaactgcaacactggattgttcttttttaagactcaatcatgacttctttactaacactggctagctatattatcttatatactaatatcatgttttaaaaatataaaatagaaattaagaatcta

SEQ ID NO: 378113 - DNA, 375 bp, Homo sapiens
gaccagcacgggctcaccacatgaggccaaggggctgcaccatacagcctctcctttggccacccgtgactacccccaactccgggccatggggcttccctacccctgggtgtcctctaagccagctgggagacaacagcctgagtccgtgtctgcttctgtattttgtgtggttttagaggatccctgggctgcctggggaagcacccagggccagggagtgtgaccctgcaggctccacacaggactgccagaggcacacacctgctctgtctacccgagggcaccagagggcacgagaaggctggctccctggcgctgacacgtcaggcaactgaggcacaaggctggcatttctgaaccttgcccctctgc

SEQ ID NO: 378114 - DNA, 1368 bp, Homo sapiens
gcgaggggggaaaaaaaataggctaggtacgaggctgggtgttgttgcatccgagggttgatcggatggtggttcccatccagatccaagtcctggcccctgatcacagagaaacacagctggacattaaagtgaaataacatctgctttgctgccgagctcagaggagaccccagacccctcccgcagccagagggctggagcctgctcagaggtgctttgaagatgccggaggccccgcctctgctgttggcagctgtgttgctgggcctggtgctgctggtggtgctgctgctgcttctgaggcactggggctggggcctgtgccttatcggctggaacgagttcatcctgcagcccatccacaacctgctcatgggtgacaccaaggagcagcgcatcctgaaccacgtgctgcagcatgcggagcccgggaacgcacagagcgtgctggaggccattgacacctactgcgagcagaaggagtgggccatgaacgtgggcgacaagaaaggcaagatcgtggacgccgtgattcaggagcaccagccctccgtgctgctggagctgggggcctactgtggctactcagctgtgcgcatggcccgcctgctgtcaccaggggcgaggctcatcaccatcgagatcaaccccgactgtgccgccatcacccagcggatggtggatttcgctggcgtgaaggacaaggtcacccttgtggttggagcgtcccaggacatcatcccccagctgaagaagaagtatgatgtggacacactggacatggtcttcctcgaccactggaaggaccggtacctgccggacacgcttctcttggaggtgcagtggtctggtgtctttcagtccgctgacgtcttctgtatccctgatgaccagattgggctcctgagtcccctggcgcaacccgagaagtccaggagcccaggcccctcactcatgcattccctggcccagactggaaggcagccgccctgctcaaggcctaggccattgtcctcctcccgggtggcgctttgttctacgtcttttcagctgacattgctaggacatttttttttttttctaaatgaaaacacatcatgattcatggtggtacttcctgctcaactccggaccttggggctgtcccctgacctcactgaccttgcagccgtgtggtgtccatactgtcacatgaaagccccctgctttctctgcagcatacaggctggaaacgaccgccacccaccaccaggacagctgcaagccctgtgggactctccaggcccatcccagaggcatgtggggtcggataccagtgtttcaaggcacctgcctgcaaattgattttattatactttagatgtt

SEQ ID NO: 378115 - DNA, 2560 bp, Homo sapiens
ccccagctacccaggaggctgaggcaggagaatcgcttgaacccgggaggcggaggttgccactgcactccagcctgggcgacagagcgagactccatctcaaaaaaaaaaaaaaaaagaaaagaaacataccaagacttaaacctggaaggtgacaagtaggatttatgtgctgaaaccttaataagcaattgctcaagggccagggaaggcgaggatgattgcctagttgatcctcgatgaggacacctggctgatgccgtctcagtctcttctctggttttttccagcatgtcccacggtggtggggagacacgcagagatgcaaggtgctatggcccacaggacggtgtcaaaggtgcccgtgtcctccttgccggtggtgctgtcctcccaggtgacctgcagctggccatcagggagcctcctgacccgcgaggggcacagcccctcaggaaccgggtgccatgagatgccatgtgctctatgaccatggaggacatttgctggtcgaagccgcggagggggatgctgcgcatcatgatggtggtgtccagcccaatcccggtgaggaagccagcacactccagggccacatagctggccccgaccaccaacgtttttccaggggattccttcagccagaagatgtcatcacttgtgattccatattccaaggcaccttcgatgtgcgtggggtatctcggccgccctccagtagcaatgatgatgtgatcggctgacagcagaatctctttcccacctttggcaacgccgcaaaccgtgtgctcgtcaacaaagctggctttgatgttaaagtacttgacttttctgtcctgaagctggacacggtggccccagttcaaggatttcacgtgattttgaacagcttctgccatcttcctccagtcatgcggcacgggctgggccacctcccagccatagttgggggcatcttggatcaggcctcccagcagtgccgcctggtgcatcagcttcttggggatgcagcccacgttgacgcaggtgccgccgaggccccaccgggtgccttggggagaaggttccacgtagtccaccacggacaccttccttcccagctgagcggcctccttggcacaagccaggccaccagatcccccgccgaccaccaggagatcatagtcccgctgacctgctgctgcgccccgcgccgcgccccgcaccccgcccgccacggcctgcgtccgccaccggaagcgccctcctaatccccgcagcgccaccgccattgccgccatcgtcgtggggcttctggggcagctagggctgcccgccgcgctgcctgcgccggaccggggcgggtccagtcccgggcgggccgtcgcgggagagaaataacatctgctttgctgccgagctcagaggagaccccagacccctcccgcagccagagggctggagcctgctcagaggtgctttgaagatgccggaggccccgcctctgctgttggcagctgtgttgctgggcctggtgctgctggtggtgctgctgctgcttctgaggcactggggctggggcctgtgccttatcggctggaacgagttcatcctgcagcccatccacaacctgctcatgggtgacaccaaggagcagcgcatcctgaaccacgtgctgcagcatgcggagcccgggaacgcacagagcgtgctggaggccattgacacctactgcgagcagaaggagtgggccatgaacgtgggcgacaagaaaggcaagatcgtggacgccgtgattcaggagcaccagccctccgtgctgctggagctgggggcctactgtggctactcagctgtgcgcatggcccgcctgctgtcaccaggggcgaggctcatcaccatcgagatcaaccccgactgtgccgccatcacccagcggatggtggatttcgctggcgtgaaggacaaggtcacccttgtggttggagcgtcccaggacatcatcccccagctgaagaagaagtatgatgtggacacactggacatggtcttcctcgaccactggaaggaccggtacctgccggacacgcttctcttggaggaatgtggcctgctgcggaaggggacagtgctactggctgacaacgtgatctgcccaggtgcgccagacttcctagcacacgtgcgcgggagcagctgctttgagtgcacacactaccaatcgttcctggaatacagggaggtggtggacggcctggagaaggccatctacaagggcccaggcagcgaagcagggccctgactgccccccccggcccccctctcgggctctctcacccagcctggtactgaaggtgccagacgtgctcctgctgaccttctgcggctccgggctgtgtcctaaatgcaaagcacacctcggccgaggcctgcgccctgacatgctaacctctctgaactgcaacactggattgttcttttttaagactcaatcatgacttctttactaacactggctagctatattatcttatatactaatatcatgttttaaaaatataaaatagaaattaagaatcta

SEQ ID NO: 378116 - DNA, 2739 bp, Homo sapiens
ccccagctacccaggaggctgaggcaggagaatcgcttgaacccgggaggcggaggttgccactgcactccagcctgggcgacagagcgagactccatctcaaaaaaaaaaaaaaaaagaaaagaaacataccaagacttaaacctggaaggtgacaagtaggatttatgtgctgaaaccttaataagcaattgctcaagggccagggaaggcgaggatgattgcctagttgatcctcgatgaggacacctggctgatgccgtctcagtctcttctctggttttttccagcatgtcccacggtggtggggagacacgcagagatgcaaggtgctatggcccacaggacggtgtcaaaggtgcccgtgtcctccttgccggtggtgctgtcctcccaggtgacctgcagctggccatcagggagcctcctgacccgcgaggggcacagcccctcaggaaccgggtgccatgagatgccatgtgctctatgaccatggaggacatttgctggtcgaagccgcggagggggatgctgcgcatcatgatggtggtgtccagcccaatcccggtgaggaagccagcacactccagggccacatagctggccccgaccaccaacgtttttccaggggattccttcagccagaagatgtcatcacttgtgattccatattccaaggcaccttcgatgtgcgtggggtatctcggccgccctccagtagcaatgatgatgtgatcggctgacagcagaatctctttcccacctttggcaacgccgcaaaccgtgtgctcgtcaacaaagctggctttgatgttaaagtacttgacttttctgtcctgaagctggacacggtggccccagttcaaggatttcacgtgattttgaacagcttctgccatcttcctccagtcatgcggcacgggctgggccacctcccagccatagttgggggcatcttggatcaggcctcccagcagtgccgcctggtgcatcagcttcttggggatgcagcccacgttgacgcaggtgccgccgaggccccaccgggtgccttggggagaaggttccacgtagtccaccacggacaccttccttcccagctgagcggcctccttggcacaagccaggccaccagatcccccgccgaccaccaggagatcatagtcccgctgacctgctgctgcgccccgcgccgcgccccgcaccccgcccgccacggcctgcgtccgccaccggaagcgccctcctaatccccgcagcgccaccgccattgccgccatcgtcgtggggcttctggggcagctagggctgcccgccgcgctgcctgcgccggaccggggcgggtccagtcccgggcgggccgtcgcgggagagaaataacatctgctttgctgccgagctcagaggagaccccagacccctcccgcagccagagggctggagcctgctcagaggtgctttgaagatgccggaggccccgcctctgctgttggcagctgtgttgctgggcctggtgctgctggtggtgctgctgctgcttctgaggcactggggctggggcctgtgccttatcggctggaacgagttcatcctgcagcccatccacaacctgctcatgggtgacaccaaggagcagcgcatcctgaaccacgtgctgcagcatgcggagcccgggaacgcacagagcgtgctggaggccattgacacctactgcgagcagaaggagtgggccatgaacgtgggcgacaagaaaggcaagatcgtggacgccgtgattcaggagcaccagccctccgtgctgctggagctgggggcctactgtggctactcagctgtgcgcatggcccgcctgctgtcaccaggggcgaggctcatcaccatcgagatcaaccccgactgtgccgccatcacccagcggatggtggatttcgctggcgtgaaggacaaggtcacccttgtggttggagcgtcccaggacatcatcccccagctgaagaagaagtatgatgtggacacactggacatggtcttcctcgaccactggaaggaccggtacctgccggacacgcttctcttggaggaatgtggcctgctgcggaaggggacagtgctactggctgacaacgtgatctgcccaggtgcgccagacttcctagcacacgtgcgcgggagcagctgctttgagtgcacacactaccaatcgttcctggaatacagggaggtggtggacggcctggagaaggccatctacaagggcccaggcagcgaagcagggccctgactgccccccccggcccccctctcgggctctctcacccagcctggtactgaaggtgccagacgtgctcctgctgaccttctgcggctccgggctgtgtcctaaatgcaaagcacacctcggccgaggcctgcgccctgacatgctaacctctctgaactgcaacactggattgttcttttttaagactcaatcatgacttctttactaacactggctagctatattatcttatatactaatatcatgttttaaaaatataaaatagaaattaagaatctaaaaaaaacaaaaagataaaaaaaaaaaaaaaacccggggctttatttggggggggggaaaaaggggtttcggcaagggggcctggctacatgtgttttcctgacccagtttttggccacaggggggtaaatggggggccccattagggggcggataaattgaaaaccgggttaccggta

SEQ ID NO: 378117 - DNA, 1320 bp, Homo sapiens
gcgaggggggaaaaaaaataggctaggtacgaggctgggtgttgttgcatccgagggttgatcggatggtggttcccatccagatccaagtcctggcccctgatcacagagaaacacagctggacattaaagtgaaataacatctgctttgctgccgagctcagaggagaccccagacccctcccgcagccagagggctggagcctgctcagaggtgctttgaagatgccggaggccccgcctctgctgttggcagctgtgttgctgggcctggtgctgctggtggtgctgctgctgcttctgaggcactggggctggggcctgtgccttatcggctggaacgagttcatcctgcagcccatccacaacctgctcatgggtgacaccaaggagcagcgcatcctgaaccacgtgctgcagcatgcggagcccgggaacgcacagagcgtgctggaggccattgacacctactgcgagcagaaggagtgggccatgaacgtgggcgacaagaaaggcaagatcgtggacgccgtgattcaggagcaccagccctccgtgctgctggagctgggggcctactgtggctactcagctgtgcgcatggcccgcctgctgtcaccaggggcgaggctcatcaccatcgagatcaaccccgactgtgccgccatcacccagcggatggtggatttcgctggcgtgaaggacaaggtcacccttgtggttggagcgtcccaggacatcatcccccagctgaagaagaagtatgatgtggacacactggacatggtcttcctcgaccactggaaggaccggtacctgccggacacgcttctcttggaggaatgtggcctgctgcggaaggggacagtgctactggctgacaacgtgatctgcccaggtgcgccagacttcctagcacacgtgcgcgggagcagctgctttgagtgcacacactaccaatcgttcctggaatacagggaggtggtggacggcctggagaaggccatctacaagggcccaggcagcgaagcagggccctgactgccccccccggcccccctctcgggctctctcacccagcctggtactgaaggtgccagacgtgctcctgctgaccttctgcggctccgggctgtgtcctaaatgcaaagcacacctcggccgaggcctgcgccctgacatgctaacctctctgaactgcaacactggattgttcttttttaagactcaatcatgacttctttactaacactggctagctatattatcttatatactaatatcatgttttaaaaatataaaatagaaattaagaatcta

SEQ ID NO: 378118 - DNA, 1476 bp, Homo sapiens
tgtctttccctgctgctcccccacgtgggggagaacacgtgggctgagaaaaaaaaaacagcatgtgcaaacctgacagatgtcacggctcccaacattgttccttgcagttttgttttgatgtgctgattaaagtagcgcagagggcatgatcagcagggctccagtaagacgctcccacgggaggagcaagaacacagaacagagggggcaagacagctccaccaggagtcaggagtgaatcccctctgggaacgaggcactaggaagaagaacttccagcccaggagaaataacatctgctttgctgccgagctcagaggagaccccagacccctcccgcagccagagggctggagcctgctcagaggtgctttgaagatgccggaggccccgcctctgctgttggcagctgtgttgctgggcctggtgctgctggtggtgctgctgctgcttctgaggcactggggctggggcctgtgccttatcggctggaacgagttcatcctgcagcccatccacaacctgctcatgggtgacaccaaggagcagcgcatcctgaaccacgtgctgcagcatgcggagcccgggaacgcacagagcgtgctggaggccattgacacctactgcgagcagaaggagtgggccatgaacgtgggcgacaagaaaggcaagatcgtggacgccgtgattcaggagcaccagccctccgtgctgctggagctgggggcctactgtggctactcagctgtgcgcatggcccgcctgctgtcaccaggggcgaggctcatcaccatcgagatcaaccccgactgtgccgccatcacccagcggatggtggatttcgctggcgtgaaggacaaggtcacccttgtggttggagcgtcccaggacatcatcccccagctgaagaagaagtatgatgtggacacactggacatggtcttcctcgaccactggaaggaccggtacctgccggacacgcttctcttggaggaatgtggcctgctgcggaaggggacagtgctactggctgacaacgtgatctgcccaggtgcgccagacttcctagcacacgtgcgcgggagcagctgctttgagtgcacacactaccaatcgttcctggaatacagggaggtggtggacggcctggagaaggccatctacaagggcccaggcagcgaagcagggccctgactgccccccccggcccccctctcgggctctctcacccagcctggtactgaaggtgccagacgtgctcctgctgaccttctgcggctccgggctgtgtcctaaatgcaaagcacacctcggccgaggcctgcgccctgacatgctaacctctctgaactgcaacactggattgttcttttttaagactcaatcatgacttctttactaacactggctagctatattatcttatatactaatatcatgttttaaaaatataaaatagaaattaagaatcta

SEQ ID NO: 378119 - DNA, 2545 bp, Homo sapiens
ccccagctacccaggaggctgaggcaggagaatcgcttgaacccgggaggcggaggttgccactgcactccagcctgggcgacagagcgagactccatctcaaaaaaaaaaaaaaaaagaaaagaaacataccaagacttaaacctggaaggtgacaagtaggatttatgtgctgaaaccttaataagcaattgctcaagggccagggaaggcgaggatgattgcctagttgatcctcgatgaggacacctggctgatgccgtctcagtctcttctctggttttttccagcatgtcccacggtggtggggagacacgcagagatgcaaggtgctatggcccacaggacggtgtcaaaggtgcccgtgtcctccttgccggtggtgctgtcctcccaggtgacctgcagctggccatcagggagcctcctgacccgcgaggggcacagcccctcaggaaccgggtgccatgagatgccatgtgctctatgaccatggaggacatttgctggtcgaagccgcggagggggatgctgcgcatcatgatggtggtgtccagcccaatcccggtgaggaagccagcacactccagggccacatagctggccccgaccaccaacgtttttccaggggattccttcagccagaagatgtcatcacttgtgattccatattccaaggcaccttcgatgtgcgtggggtatctcggccgccctccagtagcaatgatgatgtgatcggctgacagcagaatctctttcccacctttggcaacgccgcaaaccgtgtgctcgtcaacaaagctggctttgatgttaaagtacttgacttttctgtcctgaagctggacacggtggccccagttcaaggatttcacgtgattttgaacagcttctgccatcttcctccagtcatgcggcacgggctgggccacctcccagccatagttgggggcatcttggatcaggcctcccagcagtgccgcctggtgcatcagcttcttggggatgcagcccacgttgacgcaggtgccgccgaggccccaccgggtgccttggggagaaggttccacgtagtccaccacggacaccttccttcccagctgagcggcctccttggcacaagccaggccaccagatcccccgccgaccaccaggagatcatagtcccgctgacctgctgctgcgccccgcgccgcgccccgcaccccgcccgccacggcctgcgtccgccaccggaagcgccctcctaatccccgcagcgccaccgccattgccgccatcgtcgtggggcttctggggcagctagggctgcccgccgcgctgcctgcgccggaccggggcgggtccagtcccgggcgggccgtcgcgggagagaaataacatctgctttgctgccgagctcagaggagaccccagacccctcccgcagccagagggctggagcctgctcagaggtgctttgaagctgggcctggtgctgctggtggtgctgctgctgcttctgaggcactggggctggggcctgtgccttatcggctggaacgagttcatcctgcagcccatccacaacctgctcatgggtgacaccaaggagcagcgcatcctgaaccacgtgctgcagcatgcggagcccgggaacgcacagagcgtgctggaggccattgacacctactgcgagcagaaggagtgggccatgaacgtgggcgacaagaaaggcaagatcgtggacgccgtgattcaggagcaccagccctccgtgctgctggagctgggggcctactgtggctactcagctgtgcgcatggcccgcctgctgtcaccaggggcgaggctcatcaccatcgagatcaaccccgactgtgccgccatcacccagcggatggtggatttcgctggcgtgaaggacaaggtcacccttgtggttggagcgtcccaggacatcatcccccagctgaagaagaagtatgatgtggacacactggacatggtcttcctcgaccactggaaggaccggtacctgccggacacgcttctcttggaggaatgtggcctgctgcggaaggggacagtgctactggctgacaacgtgatctgcccaggtgcgccagacttcctagcacacgtgcgcgggagcagctgctttgagtgcacacactaccaatcgttcctggaatacagggaggtggtggacggcctggagaaggccatctacaagggcccaggcagcgaagcagggccctgactgccccccccggcccccctctcgggctctctcacccagcctggtactgaaggtgccagacgtgctcctgctgaccttctgcggctccgggctgtgtcctaaatgcaaagcacacctcggccgaggcctgcgccctgacatgctaacctctctgaactgcaacactggattgttcttttttaagactcaatcatgacttctttactaacactggctagctatattatcttatatactaatatcatgttttaaaaatataaaatagaaattaagaatctaaatatttagatataaaaaaaaaaa

SEQ ID NO: 378120 - DNA, 2381 bp, Homo sapiens
ccccagctacccaggaggctgaggcaggagaatcgcttgaacccgggaggcggaggttgccactgcactccagcctgggcgacagagcgagactccatctcaaaaaaaaaaaaaaaaagaaaagaaacataccaagacttaaacctggaaggtgacaagtaggatttatgtgctgaaaccttaataagcaattgctcaagggccagggaaggcgaggatgattgcctagttgatcctcgatgaggacacctggctgatgccgtctcagtctcttctctggttttttccagcatgtcccacggtggtggggagacacgcagagatgcaaggtgctatggcccacaggacggtgtcaaaggtgcccgtgtcctccttgccggtggtgctgtcctcccaggtgacctgcagctggccatcagggagcctcctgacccgcgaggggcacagcccctcaggaaccgggtgccatgagatgccatgtgctctatgaccatggaggacatttgctggtcgaagccgcggagggggatgctgcgcatcatgatggtggtgtccagcccaatcccggtgaggaagccagcacactccagggccacatagctggccccgaccaccaacgtttttccaggggattccttcagccagaagatgtcatcacttgtgattccatattccaaggcaccttcgatgtgcgtggggtatctcggccgccctccagtagcaatgatgatgtgatcggctgacagcagaatctctttcccacctttggcaacgccgcaaaccgtgtgctcgtcaacaaagctggctttgatgttaaagtacttgacttttctgtcctgaagctggacacggtggccccagttcaaggatttcacgtgattttgaacagcttctgccatcttcctccagtcatgcggcacgggctgggccacctcccagccatagttgggggcatcttggatcaggcctcccagcagtgccgcctggtgcatcagcttcttggggatgcagcccacgttgacgcaggtgccgccgaggccccaccgggtgccttggggagaaggttccacgtagtccaccacggacaccttccttcccagctgagcggcctccttggcacaagccaggccaccagatcccccgccgaccaccaggagatcatagtcccgctgacctgctgctgcgccccgcgccgcgccccgcaccccgcccgccacggcctgcgtccgccaccggaagcgccctcctaatccccgcagcgccaccgccattgccgccatcgtcgtggggcttctggggcagctagggctgcccgccgcgctgcctgcgccggaccggggcgggtccagtcccgggcgggccgtcgcgggagagaaataacatctgctttgctgccgagctcagaggagaccccagacccctcccgcagccagagggctggagcctgctcagaggtgctttgaagatgccggaggccccgcctctgctgttggcagctgtgttgctgggcctggtgctgctggtggtgctgctgctgcttctgaggcactggggctggggcctgtgccttatcggctggaacgagttcatcctgcagcccatccacaacctgctcatgggtgacaccaaggagcagcgcatcctgaaccacgtgctgcagcatgcggagcccgggaacgcacagagcgtgctggaggccattgacacctactgcgagcagaaggagtgggccatgaacgtgggcgacaagaaaggcaagatcgtggacgccgtgattcaggagcaccagccctccgtgctgctggagctgggggcctactgtggctactcagctgtgcgcatggcccgcctgctgtcaccaggggcgaggctcatcaccatcgagatcaaccccgactgtgccgccatcacccagcggatggtggatttcgctggcgtgaaggacaaggtcacccttgtggttggagcgtcccaggacatcatcccccagctgaagaagaagtatgatgtggacacactggacatggtcttcctcgaccactggaaggaccggtacctgccggacacgcttctcttggagaatgtggcagcatgcgcaagggaccctgccaccgggctgaacacgagaacatgccaggagaccagcattcctagacacgtcacaagacgcacagcatgacatgcacaactacacaacggcgggcaacacgaagcagtgggacgcacgaacaagccaacaaaggacaagaaaaaaagccgacagcccggacccacagagaaaccaccagggtagacggaccaacacagaaaaaaagaacgagagacaaaaacacgccagagacagacacaccaaacaaacaaaaacacacaccacgcacccc

SEQ ID NO: 378121 - DNA, 2469 bp, Homo sapiens
ccccagctacccaggaggctgaggcaggagaatcgcttgaacccgggaggcggaggttgccactgcactccagcctgggcgacagagcgagactccatctcaaaaaaaaaaaaaaaaagaaaagaaacataccaagacttaaacctggaaggtgacaagtaggatttatgtgctgaaaccttaataagcaattgctcaagggccagggaaggcgaggatgattgcctagttgatcctcgatgaggacacctggctgatgccgtctcagtctcttctctggttttttccagcatgtcccacggtggtggggagacacgcagagatgcaaggtgctatggcccacaggacggtgtcaaaggtgcccgtgtcctccttgccggtggtgctgtcctcccaggtgacctgcagctggccatcagggagcctcctgacccgcgaggggcacagcccctcaggaaccgggtgccatgagatgccatgtgctctatgaccatggaggacatttgctggtcgaagccgcggagggggatgctgcgcatcatgatggtggtgtccagcccaatcccggtgaggaagccagcacactccagggccacatagctggccccgaccaccaacgtttttccaggggattccttcagccagaagatgtcatcacttgtgattccatattccaaggcaccttcgatgtgcgtggggtatctcggccgccctccagtagcaatgatgatgtgatcggctgacagcagaatctctttcccacctttggcaacgccgcaaaccgtgtgctcgtcaacaaagctggctttgatgttaaagtacttgacttttctgtcctgaagctggacacggtggccccagttcaaggatttcacgtgattttgaacagcttctgccatcttcctccagtcatgcggcacgggctgggccacctcccagccatagttgggggcatcttggatcaggcctcccagcagtgccgcctggtgcatcagcttcttggggatgcagcccacgttgacgcaggtgccgccgaggccccaccgggtgccttggggagaaggttccacgtagtccaccacggacaccttccttcccagctgagcggcctccttggcacaagccaggccaccagatcccccgccgaccaccaggagatcatagtcccgctgacctgctgctgcgccccgcgccgcgccccgcaccccgcccgccacggcctgcgtccgccaccggaagcgccctcctaatccccgcagcgccaccgccattgccgccatcgtcgtggggcttctggggcagctagggctgcccgccgcgctgcctgcgccggaccggggcgggtccagtcccgggcgggccgtcgcgggagagaaataacatctgctttgctgccgagctcagaggagaccccagacccctcccgcagccagagggctggagcctgctcagaggtgctttgaagatgccggaggccccgcctctgctgttggcagctgtgttgctgggcctggtgctgctggtggtgctgctgctgcttctgaggcactggggctggggcctgtgccttatcggctggaacgagttcatcctgcagcccatccacaacctgctcatgggtgacaccaaggagcagcgcatcctgaaccacgtgctgcagcatgcggagcccgggaacgcacagagcgtgctggaggccattgacacctactgcgagcagaaggagtgggccatgaacgtgggcgacaagaaaggctcatcaccatcgagatcaaccccgactgtgccgccatcacccagcggatggtggatttcgctggcgtgaaggacaaggtcacccttgtggttggagcgtcccaggacatcatcccccagctgaagaagaagtatgatgtggacacactggacatggtcttcctcgaccactggaaggaccggtacctgccggacacgcttctcttggaggaatgtggcctgctgcggaaggggacagtgctactggctgacaacgtgatctgcccaggtgcgccagacttcctagcacacgtgcgcgggagcagctgctttgagtgcacacactaccaatcgttcctggaatacagggaggtggtggacggcctggagaaggccatctacaagggcccaggcagcgaagcagggccctgactgccccccccggcccccctctcgggctctctcacccagcctggtactgaaggtgccagacgtgctcctgctgaccttctgcggctccgggctgtgtcctaaatgcaaagcacacctcggccgaggcctgcgccctgacatgctaacctctctgaactgcaacactggattgttcttttttaagactcaatcatgacttctttactaacactggctagctatattatcttatatactaatatcatgttttaaaaatataaaatagaaattaagaatctaaatatttagatataaaaaaaaaaa

SEQ ID NO: 378122 - DNA, 1635 bp, Homo sapiens
ttgaagggggtgtctccttcaagagaaagtagggaagtatggaggtgataggaagggagaggcctgagaggagctagtttggggagatctcaagtatcccaaaggagccactgatgttccaaattatccttggtaacgtcacatcaacaaggaaggaagcagacagaggcgcacttgttccttgcagttttgttttgatgtgctgattaaagtagcgcagagggcatgatcagcagggctccagtaagacgctcccacgggaggagcaagaacacagaacagagggggcaagacagctccaccaggagtcaggagtgaatcccctctgggaacgaggcactaggaagaagaacttccagcccaggagaaataacatctgctttgctgccgagctcagaggagaccccagacccctcccgcagccagagggctggagcctgctcagaggtgctttgaagatgccggaggccccgcctctgctgttggcagctgtgttgctgggcctggtgctgctggtggtgctgctgctgcttctgaggcactggggctggggcctgtgccttatcggctggaacgagttcatcctgcagcccatccacaacctgctcatgggtgacaccaaggagcagcgcatcctgaaccacgtgctgcagcatgcggagcccgggaacgcacagagcgtgctggaggccattgacacctactgcgagcagaaggagtgggccatgaacgtgggcgacaagaaaggcaagatcgtggacgccgtgattcaggagcaccagccctccgtgctgctggagctgggggcctactgtggctactcagctgtgcgcatggcccgcctgctgtcaccaggggcgaggctcatcaccatcgagatcaaccccgactgtgccgccatcacccagcggatggtggatttcgctggcgtgaaggacaaggtgtgtagggatggcctcctgtctgtgaggacgtgggcactgacaggcgctgttccaggtcacccttgtggttggagcgtcccaggacatcatcccccagctgaagaagaagtatgatgtggacacactggacatggtcttcctcgaccactggaaggaccggtacctgccggacacgcttctcttggaggaatgtggcctgctgcggaaggggacagtgctactggctgacaacgtgatctgcccaggtgcgccagacttcctagcacacgtgcgcgggagcagctgctttgagtgcacacactaccaatcgttcctggaatacagggaggtggtggacggcctggagaaggccatctacaagggcccaggcagcgaagcagggccctgactgccccccccggcccccctctcgggctctctcacccagcctggtactgaaggtgccagacgtgctcctgctgaccttctgcggctccgggctgtgtcctaaatgcaaagcacacctcggccgaggcctgcgccctgacatgctaacctctctgaactgcaacactggattgttcttttttaagactcaatcatgacttctttactaacactggctagctatattatcttatatactaatatcatgttttaaaaatataaaatagaaattaagaatctaaatatttagatataaaaaaaaaaa

SEQ ID NO: 378123 - DNA, 969 bp, Homo sapiens
gcgaggggggaaaaaaaataggctaggtacgaggctgggtgttgttgcatccgagggttgatcggatggtggttcccatccagatccaagtcctggcccctgatcacagagaaacacagctggacattaaagtgaaataacatctgctttgctgccgagctcagaggagaccccagacccgtgctgctggagctgggggcctactgtggctactcagctgtgcgcatggcccgcctgctgtcaccaggggcgaggctcatcaccatcgagatcaaccccgactgtgccgccatcacccagcggatggtggatttcgctggcgtgaaggacaaggtcacccttgtggttggagcgtcccaggacatcatcccccagctgaagaagaagtatgatgtggacacactggacatggtcttcctcgaccactggaaggaccggtacctgccggacacgcttctcttggaggaatgtggcctgctgcggaaggggacagtgctactggctgacaacgtgatctgcccaggtgcgccagacttcctagcacacgtgcgcgggagcagctgctttgagtgcacacactaccaatcgttcctggaatacagggaggtggtggacggcctggagaaggccatctacaagggcccaggcagcgaagcagggccctgactgccccccccggcccccctctcgggctctctcacccagcctggtactgaaggtgccagacgtgctcctgctgaccttctgcggctccgggctgtgtcctaaatgcaaagcacacctcggccgaggcctgcgccctgacatgctaacctctctgaactgcaacactggattgttcttttttaagactcaatcatgacttctttactaacactggctagctatattatcttatatactaatatcatgttttaaaaatataaaatagaaattaagaatctaaatatttagatataaaaaaaaaaa

SEQ ID NO: 378124 - DNA, 1980 bp, Homo sapiens
ccccagctacccaggaggctgaggcaggagaatcgcttgaacccgggaggcggaggttgccactgcactccagcctgggcgacagagcgagactccatctcaaaaaaaaaaaaaaaaagaaaagaaacataccaagacttaaacctggaaggtgacaagtaggatttatgtgctgaaaccttaataagcaattgctcaagggccagggaaggcgaggatgattgcctagttgatcctcgatgaggacacctggctgatgccgtctcagtctcttctctggttttttccagcatgtcccacggtggtggggagacacgcagagatgcaaggtgctatggcccacaggacggtgtcaaaggtgcccgtgtcctccttgccggtggtgctgtcctcccaggtgacctgcagctggccatcagggagcctcctgacccgcgaggggcacagcccctcaggaaccgggtgccatgagatgccatgtgctctatgaccatggaggacatttgctggtcgaagccgcggagggggatgctgcgcatcatgatggtggtgtccagcccaatcccggtgaggaagccagcacactccagggccacatagctggccccgaccaccaacgtttttccaggggattccttcagccagaagatgtcatcacttgtgattccatattccaaggcaccttcgatgtgcgtggggtatctcggccgccctccagtagcaatgatgatgtgatcggctgacagcagaatctctttcccacctttggcaacgccgcaaaccgtgtgctcgtcaacaaagctggctttgatgttaaagtacttgacttttctgtcctgaagctggacacggtggccccagttcaaggatttcacgtgattttgaacagcttctgccatcttcctccagtcatgcggcacgggctgggccacctcccagccatagttgggggcatcttggatcaggcctcccagcagtgccgcctggtgcatcagcttcttggggatgcagcccacgttgacgcaggtgccgccgaggccccaccgggtgccttggggagaaggttccacgtagtccaccacggacaccttccttcccagctgagcggcctccttggcacaagccaggccaccagatcccccgccgaccaccaggagatcatagtcccgctgacctgctgctgcgccccgcgccgcgccccgcaccccgcccgccacggcctgcgtccgccaccggaagcgccctcctaatccccgcagcgccaccgccattgccgccatcgtcgtggggcttctggggcagctagggctgcccgccgcgctgcctgcgccggaccggggcgggtccagtcccgggcgggccgtcgcgggagagaaataacatctgctttgctgccgagctcagaggagaccccagacccctcccgcagccagagggctggagcctgctcagaggtgctttgaagatgccggaggccccgcctctgctgttggcagctgtgttgctgggcctggtgctgctggtggtgctgctgctgcttctgaggcactggggctggggcctgtgccttatcggctggaacgagttcatcctgcagcccatccacaacctgctcatgggtgacaccaaggagcagcgcatcctgaaccacgtgctgcagcatgcggagcccgggaacgcacagagcgtgctggaggccattgacacctactgcgagcagaaggagtgggccatgaacgtgggcgacaagaaagcaagatcgtgttttcttaaaaaacaagacaaacaaataaataaataaataaaagtgtataaatttgtttcattactgcagttgcactagttacatttctagcactcggtagctctaccggctgccatactgaacaatctgcattggcagattaagaagtttcatcatcacagaaagttcaactgggcagtgctgtttcggaaggtcccttgggcactgggcctctg

SEQ ID NO: 378125 - DNA, 726 bp, Homo sapiens
gcgaggggggaaaaaaaataggctaggtacgaggctgggtgttgttgcatccgagggttgatcggatggtggttcccatccagatccaagtcctggcccctgatcacagagaaacacagctggacattaaagtgaaataacatctgctttgctgccgagctcagaggagaccccagacccctcccgcagccagagggctggagcctgctcagaggtgctttgaagatgccggaggccccgcctctgctgttggcagctgtgttgctgggcctggtgctgctggtggtgctgctgctgcttctgaggcactggggctggggcctgtgccttatcggctggaacgagttcatcctgcagcccatccacaacctgctcatgggtgacaccaaggagcagcgcatcctgaaccacgtgctgcagcatgcggagcccgggaacgcacagagcgtgctggaggccattgacacctactgcgagctcacccagcctggtactgaaggtgccagacgtgctcctgctgaccttctgcggctccgggctgtgtcctaaatgcaaagcacacctcggccgaggcctgcgccctgacatgctaacctctctgaactgcaacactggattgttcttttttaagactcaatcatgacttctttactaacactggctagctatattatcttatatactaatatcatgttttaaaaatataaaatagaaattaagaatcta

SEQ ID NO: 378126 - DNA, 231 bp, Homo sapiens
aggacggaactggctggctgtggaccccacgcctgggaatgcatccatctggtcacccagctgcaggtctcctgacctgcaccctacaccaaggacgcggggtggccctaggttcagaaggtcttggctaaaatccgagctcttgggacagacaagccatcttgcctcactgagcccctgttccctcatctgttcacaaaacaaatagaaacaaaacaacattcaagccag

SEQ ID NO: 378127 - DNA, 421 bp, Homo sapiens
gagactgctaatgggtctccttttgggatgctgaaactctggaactagatagaggtggtggttgcacaacattgtgaatatactcaatgccactgaagtgaacactttaaaatggttaaaatggtaaattttgtgttatatgtattttactgcaataaaaaaagtgagaagaagcggtagaatctagatggtgaatatatggatgttcattataaaatgttttcaactttgccatatgcttgaacactttcatcataaaacagtgagagagaggccgggcacggtggctcatgcctgtaatctcagcactttgggaggccgagatgggtggatcacctgaggtcaggagttcaagaccagcctggccaacatggcgaaaccttgtctctactaaaaatacaaaaattagctgggtgtggtg

SEQ ID NO: 378128 - DNA, 159 bp, Homo sapiens
cattttagggtttcataagaattctagttaacatgtaattctgtatacaaaatgtgccggaaaaggttatgttattaggattatgttattagtacctccccagactccaaagagacaaaaacaaacaaaaaaattttgtctatttcagtagttatccaa

SEQ ID NO: 378129 - DNA, 419 bp, Homo sapiens
cagaaaaaaattaggctgtcagtaaatgtatgaaaatatgtcctgtcagagaaatgtatattgaaacaatgggatgaatttttcttttatggaataggcaaggtattaaaaaatgataatacttaggccaggcatagtggctcatgcctgtaatcccagcactttggaagactgaggcgggcggatcacctgaggtcaggagttcgagaccagcctggccaacatggtgaaaccccgtgcctaccaaaaatacagaaattagccaggcatggtggcacatgcctgtaatcccagccactcgggaggctgaggcaggagaattgcttgagcctgggaggtggaggttgcagcgagctgagatcgcaccactgcactacagcctgggcgacagagcaagactctgtctcaaaaaaaaaaaa

SEQ ID NO: 378130 - DNA, 273 bp, Homo sapiens
ggccaaaccccgaagcttgtttctatagtactgaggagccaagaaaattgttacattttttaatggttggggaaagatcaaaagacgaataatatttcatgaaacatgaaaattatattagccgggcatggtggcgtgcgcctgtagtcccagctactcgggaggctgaggcaggagaatggtgtgaacctgggaggcggagcttgcagtgagctgagatcacgccactgcactccagcctgggcgacagagcgagactctgtctcaaaaaaa

SEQ ID NO: 378131 - DNA, 294 bp, Homo sapiens
agggtttcgccatgttgcccaggctggtcttgaactcctgagctctagcaaatcttcccaccttggtctcccaaagtgctaggattacaggtgtgagccaccgcacctggacttctttttctttttttgagataaggtctcactgtgtcacccaggctggagtgcagtggcacgatcatagctcactgcagccataagggagtaaaggaaagaacacccctcagccccctccactcccagcatcccacccacctgctgaggtcccacttgggtccctgtgcccaggaaaccccg

SEQ ID NO: 378132 - DNA, 724 bp, Homo sapiens
ggtgcttagtacataatgaatgagtgaatgaacaaattcaattctgtaagtatttatcatctccttacacggcaggcactgttttaagtcccaaagaaagaggcagaggagcgacagagatgacttcctcccttgaaaacgaagcatgtggcctgacaacctaaaattggggtcaatccatccaattatggtgactgcttagaaatatcccttttcctcccaacgttttcctttccttctcccataaacataataatgtctcctgccagtactaaggcatggcccatggacccactaacacctatgctcacgttagctcttgaggccgagtggcttggttctatctggttatcagatgcaaacttcatcacagcagggatttgggctagacattagaggaatagtgtggtaccagatggtgtttctgaagaaggttgtcctatttttgcagtttaaggatttgataataaatctgcctggcagccctcagatgtgatttggccttgaaatcgtctctgttaatccttgatgctgtgtgtatctgtcaaggtccaaccagaaaaaacagaacctgctctaagtatctgaacaaagggaaatttaatgtaaggagctgattgcacagatgaaggaaggggctgggaggcaaacaagagggaactgtgaggtaacccagggatttgccacagtaggaagacatgaccactactaggatagagaggta

SEQ ID NO: 378133 - DNA, 402 bp, Homo sapiens
tggagctgcagatccctctcctgttcaaactatgagagctggctcaggtcccctgctatagtgggccagaaaagcctggacttccactgctttttcctgcagagctgagtccctccagggctgccatgagaggcggggagagagagcactagacagagaagaccagaagaccatttgagaattcctttgggtttccttcatgattcctttttcttctcattctgaattgttttattttattatgtaatattcggtatatgcaaaggaatatatgacacctttgtgtgtattacaaaacaagcatttgagaatccgcacctctccacccaatttttctttgtggtttctttgccagtaaaagagttcactcatctgttgcttaaaatataggatgcttgagtc

SEQ ID NO: 378134 - DNA, 2003 bp, Homo sapiens
ccgggtgttatttcagtcacgggggggagttgacggaacgtgaggggtcgtgaggaggcgcgaatcaagttagcggggggaagagtcttagacctggccagtcctcagggtgagggccctgaggaagaactgagggacctcccaccatagagagaagaaaccccggcctgtactgcgctgccgtgagactggtgctccaggaaccaggtggtgacgaactgggtgtgaggcacacagcctaaagtcagcacagcagaggaggcccaggcagtgccaggagtcaaggcctgttggatctcatcatccatatccctgttgatacgtttacctgctgctcctgaagaagtcgtcatgcctcccgttccaggcgttccattccgcaacgttgacaacgactccccgacctcagttgagttagaagactgggtagatgcacagcatcccacagatgaggaagaggaggaagcctcctccgcctcttccactttgtacttagtattttccccctcttctttctccacatcctcttctctgattcttggtggtcctgaggaggaggaggtgccctctggtgtgataccaaatcttaccgagagcattcccagtagtcctccacagggtcctccacagggtccttcccagagtcctctgagctcctgctgctcctctttttcatggagctcattcagtgaggagtccagcagccagaaaggggaggatacaggcacctgtcagggcctgccagacagtgagtcctctttcacatatacactagatgaaaaggtggccgagttagtggagttcctgctcctcaaatacgaagcagaggagcctgtaacagaggcagagatgctgatgattgtcatcaagtacaaagattactttcctgtgatactcaagagagcccgtgagttcatggagcttctttttggccttgccctgatagaagtgggccctgaccacttctgtgtgtttgcaaacacagtaggcctcaccgatgagggtagtgatgatgagggcatgcccgagaacagcctcctgattattattctgagtgtgatcttcataaagggcaactgtgcctctgaggaggtcatctgggaagtgctgaatgcagtaggggtatatgctgggagggagcacttcgtctatggggagcctagggagctcctcactaaagtttgggtgcagggacattacctggagtatcgggaggtgccccacagttctcctccatattatgaattcctgtggggtccaagagcccattcagaaagcatcaagaagaaagtactagagtttttagccaagctgaacaacactgttcctagttcctttccatcctggtacaaggatgctttgaaagatgtggaagagagagtccaggccacaattgataccgcagatgatgccactgtcatggccagtgaaagcctcagtgtcatgtccagcaacgtctccttttctgagtgaagtctaggatagtttcttccccttgtgtttgaacagggcagtttaggttctaggtagtggagggccaggtggggctcgaggaacgtagtgttctttgcatttctgtcccatatgggtgatgtagagatttacctgtttttcagtattttctaaatgcttttcctttgaatagcaggtagttagcttcagagtgttaatttatgaatattagtcgcacatgtattgctctttatctggtttaagagtaacagtttgatattttgttaaaaaaatggaaataccttctcccttattttgtgatctgtaacagggtagtgtggtattgtaataggcatttttttttttttttacaatgtgcaataactcagcagttaaatagtggaacaaaattgaagggtggtcagtagtttcatttccttgtcctgcttattcttttgttcttgaaaattatatatacctggctttgcttagcttgttgaagaaagtagcagaaattaaatcttaataaaagaaagccccactgactcctt

SEQ ID NO: 378135 - DNA, 1887 bp, Homo sapiens
  misc_feature (29)..(29): n is a, c, g, or t
atacctaggctaacgtcggaccggcttantcggccgaggaagaacccgggctggtaatgcgctgccgtgagactggtgctccaggaaccaggtggtgacgaactgggtgtgaggcacacagcctaaagtcagcacagcagaggaggcccaggcagtgccaggagtcaaggcctgttggatctcatcatccatatccctgttgatacgtttacctgctgctcctgaagaagtcgtcatgcctcccgttccaggcgttccattccgcaacgttgacaacgactccccgacctcagttgagttagaagactgggtagatgcacagcatcccacagatgaggaagaggaggaagcctcctccgcctcttccactttgtacttagtattttccccctcttctttctccacatcctcttctctgattcttggtggtcctgaggaggaggaggtgccctctggtgtgataccaaatcttaccgagagcattcccagtagtcctccacagggtcctccacagggtccttcccagagtcctctgagctcctgctgctcctctttttcatggagctcattcagtgaggagtccagcagccagaaaggggaggatacaggcacctgtcagggcctgccagacagtgagtcctctttcacatatacactagatgaaaaggtggccgagttagtggagttcctgctcctcaaatacgaagcagaggagcctgtaacagaggcagagatgctgatgattgtcatcaagtacaaagattactttcctgtgatactcaagagagcccgtgagttcatggagcttctttttggccttgccctgatagaagtgggccctgaccacttctgtgtgtttgcaaacacagtaggcctcaccgatgagggtagtgatgatgagggcatgcccgagaacagcctcctgattattattctgagtgtgatcttcataaagggcaactgtgcctctgaggaggtcatctgggaagtgctgaatgcagtaggggtatatgctgggagggagcacttcgtctatggggagcctagggagctcctcactaaagtttgggtgcagggacattacctggagtatcgggaggtgccccacagttctcctccatattatgaattcctgtggggtccaagagcccattcagaaagcatcaagaagaaagtactagagtttttagccaagctgaacaacactgttcctagttcctttccatcctggtacaaggatgctttgaaagatgtggaagagagagtccaggccacaattgataccgcagatgatgccactgtcatggccagtgaaagcctcagtgtcatgtccagcaacgtctccttttctgagtgaagtctaggatagtttcttccccttgtgtttgaacagggcagtttaggttctaggtagtggagggccaggtggggctcgaggaacgtagtgttctttgcatttctgtcccatatgggtgatgtagagatttacctgtttttcagtattttctaaatgcttttcctttgaatagcaggtagttagcttcagagtgttaatttatgaatattagtcgcacatgtattgctctttatctggtttaagagtaacagtttgatattttgttaaaaaaatggaaataccttctcccttattttgtgatctgtaacagggtagtgtggtattgtaataggcatttttttttttttttacaatgtgcaataactcagcagttaaatagtggaacaaaattgaagggtggtcagtagtttcatttccttgtcctgcttattcttttgttcttgaaaattatatatacctggctttgcttagcttgttgaagaaagtagcagaaattaaatcttaataaaagaaagccccactgactcctt

SEQ ID NO: 378136 - DNA, 1753 bp, Homo sapiens
agcgggctttcccgacggccatcttgggaatctgacggatcggaggcatttgtgaggaggcgcgaatcaagttagcggggggaagagtcttagacctggccagtcctcagggtgagggccctgaggaagaactgagggacctcccaccatagagagaagaaaccccggcctgtactgcgctgccgtgagactggtgctccaggaaccaggtggtgacgaactgggtgtgaggcacacagcctaaagtcagcacagcagaggaggcccaggcagtgccaggagtcaaggcctgttggatctcatcatccatatccctgttgatacgtttacctgctgctcctgaagaagtcgtcatgcctcccgttccaggcgttccattccgcaacgttgacaacgactccccgacctcagttgagttagaagactgggtagatgcacagcatcccacagatgaggaagaaggggaggatacaggcacctgtcagggcctgccagacagtgagtcctctttcacatatacactagatgaaaaggtggccgagttagtggagttcctgctcctcaaatacgaagcagaggagcctgtaacagaggcagagatgctgatgattgtcatcaagtacaaagattactttcctgtgatactcaagagagcccgtgagttcatggagcttctttttggccttgccctgatagaagtgggccctgaccacttctgtgtgtttgcaaacacagtaggcctcaccgatgagggtagtgatgatgagggcatgcccgagaacagcctcctgattattattctgagtgtgatcttcataaagggcaactgtgcctctgaggaggtcatctgggaagtgctgaatgcagtaggggtatatgctgggagggagcacttcgtctatggggagcctagggagctcctcactaaagtttgggtgcagggacattacctggagtatcgggaggtgccccacagttctcctccatattatgaattcctgtggggtccaagagcccattcagaaagcatcaagaagaaagtactagagtttttagccaagctgaacaacactgttcctagttcctttccatcctggtacaaggatgctttgaaagatgtggaagagagagtccaggccacaattgataccgcagatgatgccactgtcatggccagtgaaagcctcagtgtcatgtccagcaacgtctccttttctgagtgaagtctaggatagtttcttccccttgtgtttgaacagggcagtttaggttctaggtagtggagggccaggtggggctcgaggaacgtagtgttctttgcatttctgtcccatatgggtgatgtagagatttacctgtttttcagtattttctaaatgcttttcctttgaatagcaggtagttagcttcagagtgttaatttatgaatattagtcgcacatgtattgctctttatctggtttaagagtaacagtttgatattttgttaaaaaaatggaaataccttctcccttattttgtgatctgtaacagggtagtgtggtattgtaataggcatttttttttttttttacaatgtgcaataactcagcagttaaatagtggaacaaaattgaagggtggtcagtagtttcatttccttgtcctgcttattcttttgttcttgaaaattatatatacctggctttgcttagcttgttgaagaaagtagcagaaattaaatcttaataaaagaaagccccactgactcctt

SEQ ID NO: 378137 - DNA, 2005 bp, Homo sapiens
agcgggctttcccgacggccatcttgggaatctgacggatcggaggcatttgtgaggaggcgcgaatcaagttagcggggggaagagtcttagacctggccagtcctcagggtgagggccctgaggaagaactgagggacctcccaccatagagagaagaaaccccggcctgtactgcgctgccgtgagactggtgctccaggaaccaggtggtgacgaactgggtgtgaggcacacagcctaaagtcagcacagcagaggaggcccaggcagtgccaggagtcaaggcctgttggatctcatcatccatatccctgttgatacgtttacctgctgctcctgaagaagtcgtcatgcctcccgttccaggcgttccattccgcaacgttgacaacgactccccgacctcagttgagttagaagactgggtagatgcacagcatcccacagatgaggaagaggaggaagcctcctccgcctcttccactttgtacttagtattttccccctcttctttctccacatcctcttctctgattcttggtggtcctgaggaggaggaggtgccctctggtgtgataccaaatcttaccgagagcattcccagtagtcctccacagggtcctccacagggtccttcccagagtcctctgagctcctgctgctcctctttttcatggagctcattcagtgaggagtccagcagccagaaaggggaggatacaggcacctgtcagggcctgccagacagtgagtcctctttcacatatacactagatgaaaaggtggccgagttagtggagttcctgctcctcaaatacgaagcagaggagcctgtaacagaggcagagatgctgatgattgtcatcaagtacaaagattactttcctgtgatactcaagagagcccgtgagttcatggagcttctttttggccttgccctgatagaagtgggccctgaccacttctgtgtgtttgcaaacacagtaggcctcaccgatgagggtagtgatgatgagggcatgcccgagaacagcctcctgattattattctgagtgtgatcttcataaagggcaactgtgcctctgaggaggtcatctgggaagtgctgaatgcagtaggggtatatgctgggagggagcacttcgtctatggggagcctagggagctcctcactaaagtttgggtgcagggacattacctggagtatcgggaggtgccccacagttctcctccatattatgaattcctgtggggtccaagagcccattcagaaagcatcaagaagaaagtactagagtttttagccaagctgaacaacactgttcctagttcctttccatcctggtacaaggatgctttgaaagatgtggaagagagagtccaggccacaattgataccgcagatgatgccactgtcatggccagtgaaagcctcagtgtcatgtccagcaacgtctccttttctgagtgaagtctaggatagtttcttccccttgtgtttgaacagggcagtttaggttctaggtagtggagggccaggtggggctcgaggaacgtagtgttctttgcatttctgtcccatatgggtgatgtagagatttacctgtttttcagtattttctaaatgcttttcctttgaatagcaggtagttagcttcagagtgttaatttatgaatattagtcgcacatgtattgctctttatctggtttaagagtaacagtttgatattttgttaaaaaaatggaaataccttctcccttattttgtgatctgtaacagggtagtgtggtattgtaataggcatttttttttttttttacaatgtgcaataactcagcagttaaatagtggaacaaaattgaagggtggtcagtagtttcatttccttgtcctgcttattcttttgttcttgaaaattatatatacctggctttgcttagcttgttgaagaaagtagcagaaattaaatcttaataaaagaaagccccactgactcctt

SEQ ID NO: 378138 - DNA, 2050 bp, Homo sapiens
agcgggctttcccgacggccatcttgggaatctgacggatcggaggcatttgtgaggaggcgcgaatcaagttagcggggggaagagtcttagacctggccagtcctcagggtgagggccctgaggaagaactgagggacctcccaccatagagagaagaaaccccggcctgtactgcgctgccgtgagactggtgctccaggaaccaggtggtgacgaactgggcgtgtgcacggcacacaaggcctataaagaggctcaaggccaaccaaggcaggaaggggaaggggcccccaagggcgcaaggttgccccaagcccctgttcaaaggggcctgttggatctcatcatccatatccctgttgatacgtttacctgctgctcctgaagaagtcgtcatgcctcccgttccaggcgttccattccgcaacgttgacaacgactccccgacctcagttgagttagaagactgggtagatgcacagcatcccacagatgaggaagaggaggaagcctcctccgcctcttccactttgtacttagtattttccccctcttctttctccacatcctcttctctgattcttggtggtcctgaggaggaggaggtgccctctggtgtgataccaaatcttaccgagagcattcccagtagtcctccacagggtcctccacagggtccttcccagagtcctctgagctcctgctgctcctctttttcatggagctcattcagtgaggagtccagcagccagaaaggggaggatacaggcacctgtcagggcctgccagacagtgagtcctctttcacatatacactagatgaaaaggtggccgagttagtggagttcctgctcctcaaatacgaagcagaggagcctgtaacagaggcagagatgctgatgattgtcatcaagtacaaagattactttcctgtgatactcaagagagcccgtgagttcatggagcttctttttggccttgccctgatagaagtgggccctgaccacttctgtgtgtttgcaaacacagtaggcctcaccgatgagggtagtgatgatgagggcatgcccgagaacagcctcctgattattattctgagtgtgatcttcataaagggcaactgtgcctctgaggaggtcatctgggaagtgctgaatgcagtaggggtatatgctgggagggagcacttcgtctatggggagcctagggagctcctcactaaagtttgggtgcagggacattacctggagtatcgggaggtgccccacagttctcctccatattatgaattcctgtggggtccaagagcccattcagaaagcatcaagaagaaagtactagagtttttagccaagctgaacaacactgttcctagttcctttccatcctggtacaaggatgctttgaaagatgtggaagagagagtccaggccacaattgataccgcagatgatgccactgtcatggccagtgaaagcctcagtgtcatgtccagcaacgtctccttttctgagtgaagtctaggatagtttcttccccttgtgtttgaacagggcagtttaggttctaggtagtggagggccaggtggggctcgaggaacgtagtgttctttgcatttctgtcccatatgggtgatgtagagatttacctgtttttcagtattttctaaatgcttttcctttgaatagcaggtagttagcttcagagtgttaatttatgaatattagtcgcacatgtattgctctttatctggtttaagagtaacagtttgatattttgttaaaaaaatggaaataccttctcccttattttgtgatctgtaacagggtagtgtggtattgtaataggcatttttttttttttttacaatgtgcaataactcagcagttaaatagtggaacaaaattgaagggtggtcagtagtttcatttccttgtcctgcttattcttttgttcttgaaaattatatatacctggctttgcttagcttgttgaagaaagtagcagaaattaaatcttaataaaagaaagccccactgactcctt

SEQ ID NO: 378139 - DNA, 388 bp, Homo sapiens
tcacattatttccgaagtattctcccattcccagtcccacctctacagctcttttaaataatcgttacatataatgctattttgtttgtctcttagccgttataaactctaattttattctgaagtacaactcaggacgctgtgcaaaaccttggtagtgttttctttaatattttaaagcctaataggactcactactcatttgacacatcattatttatcacttgtgttgaaactttttgattttacacgttcttttcttccaaaatatatcataaatgctctgagggcacacatattattttatttctctttagagtgctcttgccatgcatgcagccttataaacatattaagtatttttaaattatagggatagtgcatgctc

SEQ ID NO: 378140 - DNA, 279 bp, Homo sapiens
tctcctacagctcctgttcagggacgggagggcagccaggcaagaaaccaaacacgaggtcaggcctgagcagagtccttgaatggaaggcccccaaagtggcaattttagggtttcctgtctattcccatgggtctggccgccaagggaactggcaggttggaagaacttgccactgggggcagctcctgccagggtggcaagcacgggcgagcacaggggtgggacagcctcctggactgggtcaccttgtctccaacactgctccctgatactggc

SEQ ID NO: 378141 - DNA, 369 bp, Homo sapiens
gactggcctcctaaagtctttgcaaatttaaatgaggtaatacacgcaaacattttgcatagcatttggcccatagttagagtgaatatactggctgttagtaattagcaagttcctgttgttgatcactcaaggcatggcagtgtgctgtgcagctcagtttctgcacatgcctacactggcttttgcattctctggatgaggcagagtggtttttcaaggttgcttacaagaaagtataaaaacccaagagctaatgcatgctgggattaatacctaggtgatgggttgataagtgcagcaaaccaccatggcacacgtttacctatgtaacaaacctgcacatcctacacatgtaccctggtactt

SEQ ID NO: 378142 - DNA, 1769 bp, Homo sapiens
ttgtgatggaagatttctttccatagattagtataatttacgtgggctgtttgaagagattaccttcttagtggttcccttaaagctctttgttatgtatatcctgaagcccagtcacttcttcccacttgtttttgagtgtttgatctagacaatgtaaaggcacttttaagataaaaattattgtatttgggggactttgggagactcacttcccaatcattttgtttagaagcaaaaatgattaaacagtactttatgtcagatctgcctgtttaagggatttgagcacacctggtagcaaagaggtttaacctagtttctcagatgaaaactagaggtggaggaaggacgaggaagcagtccagggtgagctgaggagctggttacctttagcctacttctgggatgatgcacattgtcgtctaggtcagtcagcctcctcagcccatgcattaagattcctggttgcagctgggcacagtggctcacacctgtaatctcagcactttgggaagctgaggtgggcaggtaacctgagttcaggagttcaagactggcctggccaacatggtgaaacctcatctctactagaaatacaaaaattagccagatgtggtggcggacgcctgtaatcccagctacttgggaggctgaggcaggagaatcactcgaacctgggtgttggaggttgcagtgagccaggattgtgccactgcattacagcctgggtgacaaagtgagattctgtctcaaaaaaaaaaaaaaaaaaaaaaaattcctggttgttagtaacagaaactcacatagtctagctgaagcaaaaggggtttttttttttgcttacttaactagatttcaggaagagctggaatgaggtgggttttaaggacattcataaccagggacttgaaacacagctgtgtgccctatgtggctccgtgctctcctcaccttttatctcttagtgttgcgttaatttttgtcttgctgctggtgggcttcctctacatggaaggggatatgactgtggtcattgcccatctatagacatctttattgctgtgatctgagagaaaacaggcttcttttcccccagcttaagtttgacaaatcccagggaagaatggtcactggcctagcctaggtcatgtgtttgtgacagttctaaggggtgcgtgataggctcagcttgtgtcacatgcccagggaggtcacacagatgataccctgagggaactgctgtaaacagttaagatacagcagttttcatgcatttttagtccatatggaactcagctcaaacaactagttaagattctttccttgattcattgaaaatcttttacagtctttgttgatgctggtgcctgtaatcccggctactcaagaggctgaggcgggaggatcgaatattcgcagtggcctgtgaatagacacttcactccagcctaggcaacatagtgagaccctgtctcaaaaaaaatagaatgaggctgggcacagtggctcacacctgtaatcccagcactttgggaggcaaaggcaggcagatcgcctgaggtcaggagtttgagaccagcctgggcaacatggtgaacaccctgtctctactaaaaataccaaaattagctgggtgtggtggcagtgcctgtaatcccagctactcgggaggctgaggcagaattactttgagcccgggaggtggaggctgcagcgagctgagatcgcgccactgcgctccagcctgggcagagtgagactctatc

SEQ ID NO: 378143 - DNA, 549 bp, Homo sapiens
ttgtgatggaagatttctttccatagattagtataatttacgtgggctgtttgaagagattaccttcttagtggttcccttaaagctctttgttatgtatatcctgaagcccagtcacttcttcccacttgtttttgagtgtttgatctagacaatgtaaaggcacttttaagataaaaattattgtatttgggggactttgggagactcacttcccaatcattttgtttagaagcaaaaatgattaaacagtactttatgtcagatctgcctgtttaagggatttgagcacacctggtagcaaagaggtttaacctagtttctcagatgaaaactagaggtggaggaaggacgaggaagcagtccagggtgagctgaggagctggttacctttagcctacttctgggatgatgcacattgtcgtctaggtcagtcagcctcctcagcccatgcattaagattcctggtcttgaactcctaggctcaagcgatcagcccacctcggcctcccaaagtgttgggattacaggtataagccactgtacctg

SEQ ID NO: 378144 - DNA, 340 bp, Homo sapiens
gacatacacatatacacatacacaagtacacatgtatacacatgcatacacacatgcacacaggcatatacacatgtacacacacattaacacatgtactcacacgtcatacacatacacagagaccctgacacgcgtataaacatgcactcacacatgaactcatgcaaatacagatgcagtcatacatggatatacgcacacgccatctcacccacacgcgcgcacacgtgccctcacccacacacatacgccctcacccacacacatgcgcacacaagcacccttacctacacacatgcgcacacatctctcacccacacacacgcacacacaggcc

SEQ ID NO: 378145 - DNA, 1924 bp, Homo sapiens
  misc_feature (1021)..(1021): n is a, c, g, or t
  misc_feature (1023)..(1023): n is a, c, g, or t
  misc_feature (1038)..(1039): n is a, c, g, or t
agtgcctttatatacttcctatcctgagactactttactggggtaattcaatctctaaacactccctgaattaagaatcaagggacctatatgaagaaagacaagtctttcctctggagttaaggagacctacctccttcaaaagaagggagaaaaaaaagtctcctcccatctctctctaaactacggtaagtatattcatttctgtaacttctataacaccacaaacgtaaaacaacaggaatttatcttacagttctgaaggtcagtagtccaaaatcagtttcactgagctaaaaacaaagtgtgtgcagacgtgtgttccttctggaggctctacagaatatgtttccttgccttttccagcttctaaaggttagctgcacacctgggcttatgggatgttccatcatcttcaaaaccagcagtgcagcatcttctctcttgacctttgcttttggtcttaacccttctctgactaattcctcctgcctccctcttattaggaacctttgtgatcacactgggccaatccagttatccaggacagcctccccattgcaagatccttaatcaaatttgcaaaatccaatttaccatctaacgcaacatatgcacaggttttagggattaaaacatgagtatctttggaggggtacattattcagcctaccattgcaaatatccacaataatctgtaaaacagatgataacaacaaaaaactaatttcttaaattccctcacttttcatttattagggggtaagaaagatcccactgttttactcattctctcaaattacttttaaaaacctctattttcttccagtttccttgctggttttgtttttactcttagtcctttatccatctagaagttatttttgtgaatgatttaagataggggctttaaatatttttccagactgacaatcaaatatcctattaccatgtattgatatttgccctactaatataaatgtcattcacaatataattctttatatgtaggtatgttctngnttctctttctttttnnttttttttttttttttttaagacagagtcttgcactgttgcccaggctggagtgcagtggtgtgatctcggctcactgcaacctctgcctcccgggttcaagcgattctcctgcctcagcctcccaagtagctgggactacaggcacatgccaccacgcccagctcatttttgtatttttagtagagatggggtttcacaatgttggccaggatggtctcgatctcttgacctcatgatccacctgcctcagcctcccaaagtgctgggatcacaggggtgagccaccggcacccggcctttttttaaaaaaaaaaaaatagagacagggtctatgttgcccaaactgatctcacacttctggcctcaagtgatgctccccacctcagcctcccaaagtgctgggattacaggtgtaagccaccacacctagcctgtttctgggttctctaattttatctatttgttcttttgctaataattgcaaaattttaactatagtagtttctaaattttaatagctggtgggataagtctcgtttttttaaactgtccttgttatagttacataccaaacaaactttataggcttctcaaattcatacaaaaattcctttgggattttggttaaagtttcactgaatttataaatcaattagggggaaaagtgacatctttatcgggctatcctacccataaacaccctatgggccaaaactatggccaaggctattatggcctactgtctctctctctcagaatatcatccgacatcttgaatacttacaatgttagagacatgctgattgagatgtgggcaaagaccaaattaagtaagaaggggacttgaacactacctccaaagaatatgaattctatccaactg

SEQ ID NO: 378146 - DNA, 521 bp, Homo sapiens
agacagtatgtgtccattaccgggtcagacacagttttggggagcaattaggtctttgaggtcagtgaatgtaagcaatctgaaatgcagctggggccggggcagtggcttatgcctgtaatcccaacacttcgggaggccgaggcaggtggatcacttgaggtcaggagttcgagaccagactggccaacatgggtgaaacctcatctctactaaaaataaaaaaattagacaggtgcagtggtaccacactgagtagtcccagctactcgggaggctgaggcatgaaaatcacttcagcctgggaggtgaaggttgcagtgagctgagatcacgccactacactccagcctaggtgacagagcaagactctgtctcaaacaaataaaataaaatgcagctgggctgggcatggtcgctcacgcctgtaatcccagcactttgggaggctgaggtgggagtatcccttgagtccaggatttcaagaccagcctgggcaatatagtgagaccctgtctcta

SEQ ID NO: 378147 - DNA, 639 bp, Homo sapiens
gaatcagccttaggttctctgcctccagatcctattctcctgcctcaccaccaccccaaaaagctccctcagtcacaaaagatgacctcacttccaacctcacagagaaatttgaagctgccagagaggagccctcaactttccagcacctactttcaaacctacaacctatctgtatcttctctcctctcctcaattcctgtgaaagccaactcccttcttcctagtttcggtccaatctctctgtctgtgttctgtagcccacttcgagaatcatctcctatcaataatctcttctctcttctgtgtcttctaactcaccatctttgcttggttcccccatggtcattcaaacatacttaattcatacaaaaaaaattagaatgaataagacctactatttgatagcacaagatgactataatcaataccttaactgtacattttttaataactaaaagagtataattggattgtttgtaacacaagggataaatgcttcagggaagggataccccattctacatgatgtgattacacactacatgcctgtatcaaaacatcgcatgtaccccataaagctatacacctactatgtacccgcaagaattaaaaataaaaaaaacttaaatttaaatt

SEQ ID NO: 378148 - DNA, 1843 bp, Homo sapiens
cccagccaacgccactgcacccccgctacgctggggcccccttcggcgggtcctgagcttctcctgggagctgcacgtctacggggtgggggtactctttctgctgcccgcgttgttggcgctggctgcgctggcagccgccccagcagggccccggctggcattggtggccgcggtgctggtgctcgtggcttcggcgctgcgatccgcctacatgcttaccgacccttacggctcgcaggcgcggctgggcgttcgcgggggcctggtgctctacaacctgcccttccccttgctgcttacggcgctggcagccctgactctgctcggcctgggcgcggggctgccgccaccgctgcaaaacccactcctgctgggagcagtggcgctggtgcatggtgtagggttgctcgcgacagacctgctgtccacatggtctgtgctcaacctcctgacgcagggcttgtcgtgcgcctggggcgcggccgtggctctgggcacgctctgcctgtgccgtcgccgcctgctggacggcccacggggctgggatgccagcccgggccctcggctgttggctgtggcgggcgcgctggggctgctggctagcggcttgcagctggcggctgcgctctggctgtacccgggcccaggccgcgtgggccgcttctcgtgggcctggtggggtgtccacttctggctgcgcctcctggagctgacatgggcgctcgccctggcgttggccgcggtggctgccgcgagacccaggccgcccacggagcacgcttgctgggctaagctgatgcgtctggcgtgcccggcgccgtcaggaaagagcgaggtgccggagcgacccaataactgctatgcagggcccagcaacgttggtgcaggcagcttggacatcagcaagagcctcatccgcaacccggcggagagtgggcagctggccacgcccagttcaggcgcctggggctcggctgcgtcgttgggtcgcggaccccagggtggcccgggactgtcccgcaacggtgtgggaccggcgccatcgctgagcgagctggatctgcggccgccatcgcccatcaacctgagccgcagcatcgacgccgcgctcttccgcgagcacctagtgcgagacagtgtgttccagcgctgcggcctccgcggcctggcctccccgccgcctggaggcgctctgcggccgcgccggggcagccatcccaaagccgagctcgacgacgctggctcctcgctcctccgcggccgctgcaggtcgctcagcgacgtgcgcgtgcgcgggccggtcccacagcacgtagtggaagcacccgacggggcagccgctgcggcttctggcagctccctcgacagcttctccaggggttcactcaagatcagttggaacccctggcgccacgggctgtcatcagtggacagtctgcccctagatgagttgcccagcacggtacagctactgcctgccccgaccccagcccctgattctaccgccgctcggcagggggacggccagggagaggtccagccgcgcggcaagcctggggaatcccgcagcgcctccagtgataccatcgagctttgaagagcggtcctgacgcagggccaggaccctgcccgatgcccacatggcatggcctactgggacagttgagcctttaaaaaatgggcatcctggccaggcgcggtggctcacgccaggaatcccagcactttgggaggccgaggtgggtggaacacgaggtcaggagttcgagatcagcctcctggtctcgaacatagcgaaaccctcgtctctactaaaaatacaaaaaaattagccaggtgg

SEQ ID NO: 378149 - DNA, 2283 bp, Homo sapiens
cccagccaacgccactgcacccccgctacgctggggcccccttcggcgggtcctgagcttctcctgggagctgcacgtctacggggtgggggtactctttctgctgcccgcgttgttggcgctggctgcgctggcagccgccccagcagggccccggctggcattggtggccgcggtgctggtgctcgtggcttcggcgctgcgatccgcctacatgcttaccgacccttacggctcgcaggcgcggctgggcgttcgcgggggcctggtgctctacaacctgcccttccccttgctgcttacggcgctggcagccctgactctgctcggcctgggcgcggggctgccgccaccgctgcaaaacccactcctgctgggagcagtggcgctggtgcatggtgtagggttgctcgcgacagacctgctgtccacatggtctgtgctcaacctcctgacgcagggcttgtcgtgcgcctggggcgcggccgtggctctgggcacgctctgcctgtgccgtcgccgcctgctggacggcccacggggctgggatgccagcccgggccctcggctgttggctgtggcgggcgcgctggggctgctggctagcggcttgcagctggcggctgcgctctggctgtacccgggcccaggccgcgtgggccgcttctcgtgggcctggtggggtgtccacttctggctgcgcctcctggagctgacatgggcgctcgccctggcgttggccgcggtggctgccgcgagacccaggccgcccacggagcacgcttgctgggctaagctgatgcgtctggcgtgcccggcgccgtcaggaaagagcgaggtgccggagcgacccaataactgctatgcagggcccagcaacgttggtgcaggcagcttggacatcagcaagagcctcatccgcaacccggcggagagtgggcagctggccacgcccagttcaggcgcctggggctcggctgcgtcgttgggtcgcggaccccagggtggcccgggactgtcccgcaacggtgtgggaccggcgccatcgctgagcgagctggatctgcggccgccatcgcccatcaacctgagccgcagcatcgacgccgcgctcttccgcgagcacctagtgcgagacagtgtgttccagcgctgcggcctccgcggcctggcctccccgccgcctggaggcgctctgcggccgcgccggggcagccatcccaaagccgagctcgacgacgctggctcctcgctcctccgcggccgctgcaggtcgctcagcgacgtgcgcgtgcgcgggccggtcccacagcacgtagtggaagcacccgacggggcagccgctgcggcttctggcagctccctcgacagcttctccaggggttcactcaagatcagttggaacccctggcgccacgggctgtcatcagtggacagtctgcccctagatgagttgcccagcacggtacagctactgcctgccccgaccccagcccctgattctaccgccgctcggcagggggacggccagggagaggtccagccgcgcggcaagcctggggaatcccgcagcgcctccagtgataccatcgagctttgaagagcggtcctgacgcagggccaggaccctgcccgatgcccacatggcatggcctactgggacagttgagcctttaaaaaatgggcatcctggccaggcgcggtggctcacgccaggaatcccagcactttgggaggccgaggtgggtggaacacgaggtcaggagttcgagatcagcctcctggtctcgaacatagcgaaaccctcgtctctactaaaaatacaaaaaaattagccaggtggcacacgcctgtagtcccagctactcgggaggctgaggcgggagaattgcttgaacagggaggcagaggttgcagtgagccgagaccacgccattgcactccagcctgggtgacaagagtgagactccgtctcaaaaaaaaaaaaaaaaaaaaaaaaaaaaggcatccccaggcctctctacctgacggcaacccccgggggacagccaggtttgaactcaccccacccccatgccgttttttgcttttaatatttctatttttttttcagccggcattttgcacagaggccgtgtcttatgcggaatacagggtgggtgtgcatggattcgggcatgaagaacagggagcaggtgccccagactccccaacgtggagtgatgagcctcgcttgtctagattgtcctctttgtgccaaagaaataaacccttaggacttgg

SEQ ID NO: 378150 - DNA, 471 bp, Homo sapiens
gtgatccacccacctcggcctcccaaagtgctgggattacaggtgtgagccgcccggctggacagtctgcccctagatgagttgcccagcacggtacagctactgcctgccccgaccccagcccctgattctaccgccgctcggcagggggacggccagggagaggtccagccgcgcggcaagcctggggaatcccgcagcgcctccagtgataccatcgagctttgaagagcggtcctgacgcagggccaggaccctgcccgatgcccacatggcatggcctactgggacagttgagcctttaaaaaatgggcatcctggccaggcgcggtggctcacgccaggaatcccagcactttgggaggccgaggtgggtggaacacgaggtcaggagttcgagatcagcctcctggtctcgaacatagcgaaaccctcgtctctactaaaaatacaaaaaaattagccaggtgg

SEQ ID NO: 378151 - DNA, 1912 bp, Homo sapiens
cccagccaacgccactgcacccccgctacgctggggcccccttcggcgggtcctgagcttctcctgggagctgcacgtctacggggtgggggtactctttctgctgcccgcgttgttggcgctggctgcgctggcagccgccccagcagggccccggctggcattggtggccgcggtgctggtgctcgtggcttcggcgctgcgatccgcctacatgcttaccgacccttacggctcgcaggcgcggctgggcgttcgcgggggcctggtgctctacaacctgcccttccccttgctgcttacggcgctggcagccctgactctgctcggcctgggcgcggggctgccgccaccgctgcaaaacccactcctgctgggagcagtggcgctggtgcatggtgtagggttgctcgcgacagacctgctgtccacatggtctgtgctcaacctcctgacgcagggcttgtcgtgcgcctggggcgcggccgtggctctgggcacgctctgcctgtgccgtcgccgcctgctggacggcccacggggctgggatgccagcccgggccctcggctgttggctgtggcgggcgcgctggggctgctggctagcggcttgcagctggcggctgcgctctggctgtacccgggcccaggccgcgtgggccgcttctcgtgggcctggtggggtgtccacttctggctgcgcctcctggagctgacatgggcgctcgccctggcgttggccgcggtggctgccgcgagacccaggccgcccacggagcacgcttgctgggctaagctgatgcgtctggcgtgcccggcgccgtcaggaaagagcgaggtgccggagcgacccaataactgctatgcagggcccagcaacgttggtgcaggcagcttggacatcagcaagagcctcatccgcaacccggcggagagtgggcagctggccacgcccagttcaggcgcctggggctcggctgcgtcgttgggtcgcggaccccagggtggcccgggactgtcccgcaacggtgtgggaccggcgccatcgctgagcgagctggatctgcggccgccatcgcccatcaacctgagccgcagcatcgacgccgcgctcttccgcgagcacctagtgcgagacagtgtgttccagcgctgcggcctccgcggcctggcctccccgccgcctggaggcgctctgcggccgcgccggggcagccatcccaaagccgagctcgacgacgctggctcctcgctcctccgcggccgctgcaggtcgctcagcgacgtgcgcgtgcgcgggccggtcccacagcacgtagtggaagcacccgacggggcagccgctgcggcttctggcagctccctcgacagcttctccaggggttcactcaagatcagttggaacccctggcgccacgggctgtcatcagtggacagtctgcccctagatgagttgcccagcacggtacagctactgcctgccccgaccccagcccctgattctaccgccgctcggcagggggacggccagggagaggtccagccgcgcggcaagcctggggaatcccgcagcgcctccagtgataccatcgagctttgaagagcggtcctgacgcagggccaggaccctgcccgatgcccacatggcatggcctactgggacagttgagcctttaaaaaatgggcatcctggccaggcgcggtggctcacgccaggaatcccagcactttgggaggccgagccggcattttgcacagaggccgtgtcttatgcggaatacagggtgggtgtgcatggattcgggcatgaagaacagggagcaggtgccccagactccccaacgtggagtgatgagcctcgcttgtctagattgtcctctttgtgccaaagaaataaacccttaggacttgg

SEQ ID NO: 378152 - DNA, 608 bp, Homo sapiens
  misc_feature (601)..(601): n is a, c, g, or t
ttttttttccacttccccaatccctcagctctaaatttatctggaaatattttgagtttttcttacagtggagaactatttgacttagggctacacaacaatgcttgccacctccgtattttgaagatcttcctctgtgaatccttcccacattcaaggaggtacgcaggaaaagcctgtggcaggcagtagcccttgatctaggctgctcagggccacgtagatcatctgaagattgtcacctaaatacagctgttactaaacctttgccaagggaaagcagagaagggacaagtcattgccatccctcagcagcagcttcaaggtcattcgtaagtgagagcccggaagttatgcaacactttctctctaggtcctccagacaatgatttttacaacagccagatggtaaattcacgtttgtggctattccactgccttgtcctatcagcatcaggcatgatggccatgggcctttcacgactggtgtggacacacatagctctacactgatggcacccaagtcacagcagggactcgtgtggcagtttgcatttcttatgataatctttttgttcacccaagtttttaagagctaaangagacag

SEQ ID NO: 378153 - DNA, 817 bp, Homo sapiens
gccctgtccaattattagaaaaaaaaaggaacatgacttagtacattcattttggaggataagtctctcaaaataggcctttcactgggggaaaatggtaaaaatactccctggtaattcaagaattggagactcctgagatgctgctcatattagctgagcacttatcaatacttcacttttttccatatatactcaaggaacaagtgctatttaaagtgtttcactccactgggctaggtgcaagactataaagaggtgtgaggatcaacacttttatgaaaaccagtgtcattctggatatagtttcagatgctagtgcaaaggaagctcttggtatacggaaaaagtattcaacaataaattaggcatggttgcttccattttctgcctcacatacttttttttcgtggttaaagtgatataatgtctatgatattttagattggcagttgcaaactagtggtcctcagcgtgctttttatgacacctacaaggtctgaagactttgatttcatattaaaaatctgggtttcaggctgggtgtggtgttgcatgcctgtaatcccagcactttgggaggctgaggcaagagaatcgcttgaaccagggaggtggaggttgcagtgagccaagatcgcgccactgcactcaagcttaggcaatagagcaagactccatctcaaaaaatgaataaataaataaataaaatctgggtttcaggccaggtgtggtggtgcactcctgcaatcccagcactttgggaggctgagatgggcagacagcttgacctcaggaattccagactagcctgggc

SEQ ID NO: 378154 - DNA, 326 bp, Homo sapiens
ccagggcagggaggtggaatgtatccagggaaaaaggcctgtccacctggctcttcacatgtataacacatcccagagctacaggacttagcagaaattgagctgggggaaactgggttggaagaagggatgagttcaacttgactaaaagtggtgtctcaagtaggcagcataggcagcaccaagcttctacataaagaggtacagataacaatgctagaggtgagaacaaaatagtcaatccagtgaaaactgaattataaaccagctagatatctcagaatagtacagtagagaatcaggatatggcatctctgaaactttgc

SEQ ID NO: 378155 - DNA, 416 bp, Homo sapiens
tcacacctgtattcctagcactttgggaggctgagatgggagtatcacttgaggccagtgatgcaagaccagcctgggcaacatagggagacactatctctacaaaaaataaaaaattagccaggtatggtggtgtatgcctccactcccagctactcaggagacggaggcaggaggatcacctcagcccaggagtttaaggctgcagtaagccattggagctccagcctaggtggcagagtgagaacctgtctgaggaaaaacaaaaaaaaagtaacttgcagaattatatatatagtgtgattgttatgggaaaatatgcataacataaaatttaccattttaaagtttgcaattcagtaggactaataagtacattcttaatgtgcagtcatcaccactgtctattctgtagc

SEQ ID NO: 378156 - DNA, 796 bp, Homo sapiens
tgaagtggcatgatctcagctcactggaatgtccacctcctaggttcaagtgattctcctgcctcagcctcccaagtggctgggattacaggatttttcatgggccgatctgctgaattcagcctaggagctgagaccaacatctgagtctcttcagcacacaagtttgaaagaagtcctagcaacttcaagctcagaactacgggtggcagcagctccctcttgacgtcgaagcctcccattccagagagagtcaaggcctggatcaaacaaagcccacaagcaccgatgactgagctgctgactacccccagcatctccaactcaacctcctctttctgcctctacccaaattttaaaactttcaaacatgggtttaaaaatggtaatgagtaaagttgcatccaagtgtatcaaataaaactaaatatccataaaaactgtaataattcctgctttgatgctgaactaaagaattttctgccaggcgtggtggctaacacctgtaatcccagcactttgggaggccaaggcaggtggatcacgaggtcaggagttcaagacctgcctggccaacgtggtgaaaccccatctctactaaaaatacaaaaattagctgggcatggtggcaggcatctgtagtcccagctactcaggaggctgaggcaggagaatcacttgaacccgggagacagaggttgtagtgagccaagatggcaccactgcactccatcctgggcaacaagcgagattccatctcaaaagaaaaaaaaaaaagaattttctgtttatatta

SEQ ID NO: 378157 - DNA, 809 bp, Homo sapiens
cttttcagattgcaggatttccactacctgtcctcttccttggtgtcaagcccaggacaataggtgttgctttctgacagatcctttgctttgtctcaatataggatttttcatgggccgatctgctgaattcagcctaggagctgagaccaacatctgagtctcttcagcacacaagtttgaaagaagtcctagcaacttcaagctcagaactacgggtggcagcagctccctcttgacgtcgaagcctcccattccagagagagtcaaggcctggatcaaacaaagcccacaagcaccgatgactgagctgctgactacccccagcatctccaactcaacctcctctttctgcctctacccaaattttaaaactttcaaacatgggtttaaaaatggtaatgagtaaagttgcatccaagtgtatcaaataaaactaaatatccataaaaactgtaataattcctgctttgatgctgaactaaagaattttctgccaggcgtggtggctaacacctgtaatcccagcactttgggaggccaaggcaggtggatcacgaggtcaggagttcaagacctgcctggccaacgtggtgaaaccccatctctactaaaaatacaaaaattagctgggcatggtggcaggcatctgtagtcccagctactcaggaggctgaggcaggagaatcacttgaacccgggagacagaggttgtagtgagccaagatggcaccactgcactccatcctgggcaacaagcgagattccatctcaaaagaaaaaaaaaaaagaattttctgtttatatta

SEQ ID NO: 378158 - DNA, 747 bp, Homo sapiens
gcgtgacgtggaggaaccgcaggcggcgaccgcggacagaatgatttttcatgggccgatctgctgaattcagcctaggagctgagaccaacatctgagtctcttcagcacacaagtttgaaagaagtcctagcaacttcaagctcagaactacgggtggcagcagctccctcttgacgtcgaagcctcccattccagagagagtcaaggcctggatcaaacaaagcccacaagcaccgatgactgagctgctgactacccccagcatctccaactcaacctcctctttctgcctctacccaaattttaaaactttcaaacatgggtttaaaaatggtaatgagtaaagttgcatccaagtgtatcaaataaaactaaatatccataaaaactgtaataattcctgctttgatgctgaactaaagaattttctgccaggcgtggtggctaacacctgtaatcccagcactttgggaggccaaggcaggtggatcacgaggtcaggagttcaagacctgcctggccaacgtggtgaaaccccatctctactaaaaatacaaaaattagctgggcatggtggcaggcatctgtagtcccagctactcaggaggctgaggcaggagaatcacttgaacccgggagacagaggttgtagtgagccaagatggcaccactgcactccatcctgggcaacaagcgagattccatctcaaaagaaaaaaaaaaaagaattttctgtttatatta

SEQ ID NO: 378159 - DNA, 763 bp, Homo sapiens
ctaggtaatttatatctcatgttacacctgagcaaacaaccaacccacacactttcaggatttttcatgggccgatctgctgaattcagcctaggagctgagaccaacatctgagtctcttcagcacacaagtttgaaagaagtcctagcaacttcaagctcagaactacgggtggcagcagctccctcttgacgtcgaagcctcccattccagagagagtcaaggcctggatcaaacaaagcccacaagcaccgatgactgagctgctgactacccccagcatctccaactcaacctcctctttctgcctctacccaaattttaaaactttcaaacatgggtttaaaaatggtaatgagtaaagttgcatccaagtgtatcaaataaaactaaatatccataaaaactgtaataattcctgctttgatgctgaactaaagaattttctgccaggcgtggtggctaacacctgtaatcccagcactttgggaggccaaggcaggtggatcacgaggtcaggagttcaagacctgcctggccaacgtggtgaaaccccatctctactaaaaatacaaaaattagctgggcatggtggcaggcatctgtagtcccagctactcaggaggctgaggcaggagaatcacttgaacccgggagacagaggttgtagtgagccaagatggcaccactgcactccatcctgggcaacaagcgagattccatctcaaaagaaaaaaaaaaaagaattttctgtttatatta

SEQ ID NO: 378160 - DNA, 887 bp, Homo sapiens
ctccaatctaactaccctacacctgcggcaatctagctgaactaaacttcacctagtgaggaatgcctgtgcctgcttcccctttgccttctgccatgactgaaagtttcctaaggcctcctcagaagccgagcagatgccagcatcatgcttcctctaaagcctgtggaaccatgagccaagatttttcatgggccgatctgctgaattcagcctaggagctgagaccaacatctgagtctcttcagcacacaagtttgaaagaagtcctagcaacttcaagctcagaactacgggtggcagcagctccctcttgacgtcgaagcctcccattccagagagagtcaaggcctggatcaaacaaagcccacaagcaccgatgactgagctgctgactacccccagcatctccaactcaacctcctctttctgcctctacccaaattttaaaactttcaaacatgggtttaaaaatggtaatgagtaaagttgcatccaagtgtatcaaataaaactaaatatccataaaaactgtaataattcctgctttgatgctgaactaaagaattttctgccaggcgtggtggctaacacctgtaatcccagcactttgggaggccaaggcaggtggatcacgaggtcaggagttcaagacctgcctggccaacgtggtgaaaccccatctctactaaaaatacaaaaattagctgggcatggtggcaggcatctgtagtcccagctactcaggaggctgaggcaggagaatcacttgaacccgggagacagaggttgtagtgagccaagatggcaccactgcactccatcctgggcaacaagcgagattccatctcaaaagaaaaaaaaaaaagaattttctgtttatatta

SEQ ID NO: 378161 - DNA, 428 bp, Homo sapiens
gtcaatggatgaatgaataaagtaaatgtggtatatgtacacaatggaatactattcatctctaaaaaataaaattctgtcatctgtgacaacaaggatgaacctggaagacattatgttaaataagccccacccagccccccagtgcccgtcttcctgtcccatctgctcagagagagccaagctctaaagcacatgtagccgctgagacctgctgtttctgctgggggcaggctcctcttcccccagccccgggagcctcccccagcttcctgcagccccgacctctcaggttagaccctgggccctggagcttaggggattctccccaccccagccccacacctgctccttccctaatgctttgaggttttcttggttggaagctgcagctggcccaagaaagaaaataaaaaacaacacttttg

SEQ ID NO: 378162 - DNA, 976 bp, Homo sapiens
aaagctacaatatctttctcccccaagggaaatgatgtgcccagcatagtcaagacagacaagagggagctcccatggctgagttggggcctcaagccctccctctactcctcctcagagaccaggggtgacagagacagatcttgaaaaccttgggacaagtgcccttgggctgcagggttgggaacggggggagcatggccagcctatcacctggtgtgccctcaggtgaaggaatacgactccatctcccggctggaccagtggctcaccaccatgctgctgcgcatcaagaagaccatccagggcgatgaggaggacctgcgctaagccccacccagccccccagtgcccgtcttcctgtcccatctgctcagagagaggtggggccgagacttgctggagagcttccctcctttcccatctggggagtcccgcgggccacagtgggcaggtggcaccgggggtcagcatgcaggggcgccagaggcccaggctgctggccggacagtcaccctctgttctcgctacatcccttgccccctgtccatttatttaagcccccataggtgcccttcacccccaaaaccagctgtacagaatctttgatacagacctatttgctaggggtgctgccggggatttggggtcagcatctggccccctatctcctgaccagctgagtcatgaggccggtttctctctctctcccacttttgtcccccagccaagctctaaagcacatgtagccgctgagacctgctgtttctgctgggggcaggctcctcttcccccagccccgggagcctcccccagcttcctgcagccccgacctctcaggttagaccctgggccctggagcttaggggattctccccaccccagccccacacctgctccttccctaatgctttgaggttttcttggttggaagctgcagctggcccaagaaagaaaataaaaaacaacacttttg

SEQ ID NO: 378163 - DNA, 323 bp, Homo sapiens
catctggcagcatttccggctcaaggcttcctgtgcagcccgattgttctggtgtccaaagagtgttcccccataggagttctatagcacatgcaaccccttaaccaagctgttttggaatgtgctatgctcctcttcccccagccccgggagcctcccccagcttcctgcagccccgacctctcaggttagaccctgggccctggagcttaggggattctccccaccccagccccacacctgctccttccctaatgctttgaggttttcttggttggaagctgcagctggcccaagaaagaaaataaaaaacaacacttttg

SEQ ID NO: 378164 - DNA, 1684 bp, Homo sapiens
gtcacgtggttcctggccgcaagcgacgcgcgccggtgcgacgtcaacgcagccgggcgagttttaccgatctgtgttccgcggcccggccgcggctgagtcttcccagggtcagggtcaggcgctttgctgagtccctttgtggccgccatggacaattccgggaaggaagcggaggcgatggcgctgttggccgaggcggagcgcaaagtgaagaactcgcagtccttcttctctggcctctttggaggctcatccaaaatagaggaagcatgcgaaatctacgccagagcagcaaacatgttcaaaatggccaaaaactggagtgctgctggaaacgcgttctgccaggctgcacagctgcacctgcagctccagagcaagcacgacgcagccacctgctttgtggacgctggcaacgcattcaagaaagccgacccccaagaggccattaactgtttgatgcgagcaatcgagatctacacagacatgggccgattcacgattgcggccaagcaccacatctccattgctgagatctatgagacagagttggtggacatcgagaaggccattgcccactacgagcagtctgcagactactacaaaggcgaggagtccaacagctcagccaacaagtgtctgctgaaggtggctggttacgctgcgctgctggagcagtatcagaaggccattgacatctacgaacaggtggggaccaatgccatggacagccccctcctcaagtacagcgccaaagactacttcttcaaggcggccctctgccacttctgcatcgacatgctcaacgccaagctggctgtccaaaagtatgaggagctgttcccagctttctctgattcccgggaatgcaagttgatgaaaaaattgctagaggcccacgaggagcagaatgtggacagctacaccgagtcggtgaaggaatacgactccatctcccggctggaccagtggctcaccaccatgctgctgcgcatcaagaagaccatccagggcgatgaggaggacctgcgctaagccccacccagccccccagtgcccgtcttcctgtcccatctgctcagagagaggtggggccgagacttgctggagagcttccctcctttcccatctggggagtcccgcgggccacagtgggcaggtggcaccgggggtcagcatgcaggggcgccagaggcccaggctgctggccggacagtcaccctctgttctcgctacatcccttgccccctgtccatttatttaagcccccataggtgcccttcacccccaaaaccagctgtacagaatctttgatacagacctatttgctaggggtgctgccggggatttggggtcagcatctggccccctatctcctgaccagctgagtcatgaggccggtttctctctctctcccacttttgtcccccagccaagctctaaagcacatgtagccgctgagacctgctgtttctgctgggggcaggctcctcttcccccagccccgggagcctcccccagcttcctgcagccccgacctctcaggttagaccctgggccctggagcttaggggattctccccaccccagccccacacctgctccttccctaatgctttgaggttttcttggttggaagctgcagctggcccaagaaagaaaataaaaaacaacacttttg

SEQ ID NO: 378165 - DNA, 1807 bp, Homo sapiens
ctgctccgcccctctctgaggatgatgctgtttcctccaggtcccgggccatcacgattggcatttcctttagggtttgtcatgcagtcagcagacggcggcctcagagacctttcctagcagattcactggatcaagcaatttggatggcacagattcctgtctcatcttcccatggttcgagttttaccgatctgtgttccgcggcccggccgcggctgagtcttcccagggtcagggtcaggcgctttgctgagtccctttgtggccgccatggacaattccgggaaggaagcggaggcgatggcgctgttggccgaggcggagcgcaaagtgaagaactcgcagtccttcttctctggcctctttggaggctcatccaaaatagaggaagcatgcgaaatctacgccagagcagcaaacatgttcaaaatggccaaaaactggagtgctgctggaaacgcgttctgccaggctgcacagctgcacctgcagctccagagcaagcacgacgcagccacctgctttgtggacgctggcaacgcattcaagaaagccgacccccaagaggccattaactgtttgatgcgagcaatcgagatctacacagacatgggccgattcacgattgcggccaagcaccacatctccattgctgagatctatgagacagagttggtggacatcgagaaggccattgcccactacgagcagtctgcagactactacaaaggcgaggagtccaacagctcagccaacaagtgtctgctgaaggtggctggttacgctgcgctgctggagcagtatcagaaggccattgacatctacgaacaggtggggaccaatgccatggacagccccctcctcaagtacagcgccaaagactacttcttcaaggcggccctctgccacttctgcatcgacatgctcaacgccaagctggctgtccaaaagtatgaggagctgttcccagctttctctgattcccgggaatgcaagttgatgaaaaaattgctagaggcccacgaggagcagaatgtggacagctacaccgagtcggtgaaggaatacgactccatctcccggctggaccagtggctcaccaccatgctgctgcgcatcaagaagaccatccagggcgatgaggaggacctgcgctaagccccacccagccccccagtgcccgtcttcctgtcccatctgctcagagagaggtggggccgagacttgctggagagcttccctcctttcccatctggggagtcccgcgggccacagtgggcaggtggcaccgggggtcagcatgcaggggcgccagaggcccaggctgctggccggacagtcaccctctgttctcgctacatcccttgccccctgtccatttatttaagcccccataggtgcccttcacccccaaaaccagctgtacagaatctttgatacagacctatttgctaggggtgctgccggggatttggggtcagcatctggccccctatctcctgaccagctgagtcatgaggccggtttctctctctctcccacttttgtcccccagccaagctctaaagcacatgtagccgctgagacctgctgtttctgctgggggcaggctcctcttcccccagccccgggagcctcccccagcttcctgcagccccgacctctcaggttagaccctgggccctggagcttaggggattctccccaccccagccccacacctgctccttccctaatgctttgaggttttcttggttggaagctgcagctggcccaagaaagaaaataaaaaacaacacttttg

SEQ ID NO: 378166 - DNA, 1340 bp, Homo sapiens
gtcacgtggttcctggccgcaagcgacgcgcgccggtgcgacgtcaacgcagccgggcgagttttaccgatctgtgttccgcggcccggccgcggctgagtcttcccagggtcagggtcaggcgctttgctgagtccctttgtggccgccatggacaattccgggaaggaagcggaggcgatggcgctgttggccgaggcggagcgcaaagtgaagaactcgcagtccttcttctctggcctctttggaggctcatccaaaatagaggaagcatgcgaaatctacgccagagcagcaaacatgttcaaaatggccaaaaactggagtgctgctggaaacgcgttctgccaggctgcacagctgcacctgcagctccagagcaagcacgacgcagccacctgctttgtggacgctggcaacgcattcaagaaagccgacccccaagaggccattaactgtttgatgcgagcaatcgagatctacacagacatgggccgattcacgattgcggccaagcaccacatctccattgctgagatctatgagacagagttggtggacatcgagaaggccattgcccactacgagcagtctgcagactactacaaaggcgaggagtccaacagctcagccaacaagtgtctgctgaaggtggctggttacgctgcgctgctggagcagtatcagaaggccattgacatctacgaacaggtggggaccaatgccatggacagccccctcctcaagtacagcgccaaagactacttcttcaaggcggccctctgccacttctgcatcgacatgctcaacgccaagctggctgtccaaaagtatgaggagctgttcccagctttctctgattcccgggaatgcaagttgatgaaaaaattgctagaggcccacgaggagcagaatgtggacagctacaccgagtcggtgaaggaatacgactccatctcccggctggaccagtggctcaccaccatgctgctgcgcatcaagaagaccatccagggcgatgaggaggacctgcgctaagccccacccagccccccagtgcccgtcttcctgtcccatctgctcagagagagccaagctctaaagcacatgtagccgctgagacctgctgtttctgctgggggcaggctcctcttcccccagccccgggagcctcccccagcttcctgcagccccgacctctcaggttagaccctgggccctggagcttaggggattctccccaccccagccccacacctgctccttccctaatgctttgaggttttcttggttggaagctgcagctggcccaagaaagaaaataaaaaacaacacttttg

SEQ ID NO: 378167 - DNA, 1630 bp, Homo sapiens
gtcacgtggttcctggccgcaagcgacgcgcgccggtgcgacgtcaacgcagccgggcgagttttaccgatctgtgttccgcggcccggccgcggctgagtcttcccagggtcagggtcaggcgctttgctgagtccctttgtggccgccatggacaattccgggaaggaagcggaggcgatggcgctgttggccgaggcggagcgcaaagtgaagaactcgcagtccttcttctctggcctctttggaggctcatccaaaatagaggaagcatgcgaaatctacgccagagcagcaaacatgttcaaaatggccaaaaactggagtgctgctggaaacgcgttctgccaggctgcacagctgcacctgcagctccagagcaagcacgacgcagccacctgctttgtggacgctggcaacgcattcaagaaagccgacccccaagaggccattaactgtttgatgcgagcaatcgagatctacacagacatgggccgattcacgattgcggccaagcaccacatctccattgctgagatctatgagacagagttggtggacatcgagaaggccattgcccactacgagcagtctgcagactactacaaaggcgaggagtccaacagctcagccaacaagtgtctgctgaaggtggctggttacgctgcgctgctggagcagtatcagaaggccattgacatctacgaacaggtggggaccaatgccatggacagccccctcctcaagtacagcgccaaagactacttcttcaaggcggccctctgccacttctgcatcgacatgctcaacgccaagctggctgtccaaaagtatgaggagctgttcccagctttctctgattcccgggaatgcaagttgatgaaaaaattgctagaggcccacgaggagcagaatgtggacagctacaccgagtcggtgaaggaatacgactccatctcccggctggaccagtggctcaccaccatgctgctgcgcatcaagaagaccatccagggcgatgaggaggacctgcgctaagccccacccagccccccagtgcccgtcttcctgtcccatctgctcagagagaggtggggccgagacttgctggagagcttccctcctttcccatctggggagtcccgcgggccacagtgggcaggtggcaccgggggtcagcatgcaggggcgccagaggcccaggctgctggccggacagtcaccctctgttctcgctacatcccttgccccctgtccatttatttaagcccccataggtgcccttcacccccaaaaccagctgtacagaatctttgatacagacctatttgctaggggtgctgccggggatttggggtcagcatctggccccctatctcctgaccagctgagtcatgaggccggtttctctctctctcccacttttgtcccccagccaagctctaaagcacatgtagccgctgagacctgcttcctgcagccccgacctctcaggttagaccctgggccctggagcttaggggattctccccaccccagccccacacctgctccttccctaatgctttgaggttttcttggttggaagctgcagctggcccaagaaagaaaataaaaaacaacacttttg

SEQ ID NO: 378168 - DNA, 1630 bp, Homo sapiens
gtcacgtggttcctggccgcaagcgacgcgcgccggtgcgacgtcaacgcagccgggcgagttttaccgatctgtgttccgcggcccggccgcggctgagtcttcccagggtcagggtcaggcgctttgctgagtccctttgtggccgccatggacaattccgggaaggaagcggaggcgatggcgctgttggccgaggcggagcgcaaagtgaagaactcgcagtccttcttctctggcctctttggaggctcatccaaaatagaggaagcatgcgaaatctacgccagagcagcaaacatgttcaaaatggccaaaaactggagtgctgctggaaacgcgttctgccaggctgcacagctgcacctgcagctccagagcaagcacgacgcagccacctgctttgtggacgctggcaacgcattcaagaaagccgacccccaagaggccattaactgtttgatgcgagcaatcgagatctacacagacatgggccgattcacgattgcggccaagcaccacatctccattgctgagatctatgagacagagttggtggacatcgagaaggccattgcccactacgagcagtctgcagactactacaaaggcgaggagtccaacagctcagccaacaagtgtctgctgaaggtggctggttacgctgcgctgctggagcagtatcagaaggccattgacatctacgaacaggtggggaccaatgccatggacagccccctcctcaagtacagcgccaaagactacttcttcaaggcggccctctgccacttctgcatcgacatgctcaacgccaagctggctgtccaaaagtatgaggagctgttcccagctttctctgattcccgggaatgcaagttgatgaaaaaattgctagaggcccacgaggagcagaatgtggacagctacaccgagtcggtgaaggaatacgactccatctcccggctggaccagtggctcaccaccatgctgctgcgcatcaagaagaccatccagggcgatgaggaggacctgcgctaagccccacccagccccccagtgcccgtcttcctgtcccatctgctcagagagaggtggggccgagacttgctggagagcttccctcctttcccatctggggagtcccgcgggccacagtgggcaggtggcaccgggggtcagcatgcaggggcgccagaggcccaggctgctggccggacagtcaccctctgttctcgctacatcccttgccccctgtccatttatttaagcccccataggtgcccttcacccccgggatttggggtcagcatctggccccctatctcctgaccagctgagtcatgaggccggtttctctctctctcccacttttgtcccccagccaagctctaaagcacatgtagccgctgagacctgctgtttctgctgggggcaggctcctcttcccccagccccgggagcctcccccagcttcctgcagccccgacctctcaggttagaccctgggccctggagcttaggggattctccccaccccagccccacacctgctccttccctaatgctttgaggttttcttggttggaagctgcagctggcccaagaaagaaaataaaaaacaacacttttg

SEQ ID NO: 378169 - DNA, 1639 bp, Homo sapiens
cgggaactagtatcagcgggtgatcgccgaggcggccggcgcggtgatctccaagtcttcccagggtcagggtcaggcgctttgctgagtccctttgtggccgccatggacaattccgggaaggaagcggaggcgatggcgctgttggccgaggcggagcgcaaagtgaagaactcgcagtccttcttctctggcctctttggaggctcatccaaaatagaggaagcatgcgaaatctacgccagagcagcaaacatgttcaaaatggccaaaaactggagtgctgctggaaacgcgttctgccaggctgcacagctgcacctgcagctccagagcaagcacgacgcagccacctgctttgtggacgctggcaacgcattcaagaaagccgacccccaagaggccattaactgtttgatgcgagcaatcgagatctacacagacatgggccgattcacgattgcggccaagcaccacatctccattgctgagatctatgagacagagttggtggacatcgagaaggccattgcccactacgagcagtctgcagactactacaaaggcgaggagtccaacagctcagccaacaagtgtctgctgaaggtggctggttacgctgcgctgctggagcagtatcagaaggccattgacatctacgaacaggtggggaccaatgccatggacagccccctcctcaagtacagcgccaaagactacttcttcaaggcggccctctgccacttctgcatcgacatgctcaacgccaagctggctgtccaaaagtatgaggagctgttcccagctttctctgattcccgggaatgcaagttgatgaaaaaattgctagaggcccacgaggagcagaatgtggacagctacaccgagtcggtgaaggaatacgactccatctcccggctggaccagtggctcaccaccatgctgctgcgcatcaagaagaccatccagggcgatgaggaggacctgcgctaagccccacccagccccccagtgcccgtcttcctgtcccatctgctcagagagaggtggggccgagacttgctggagagcttccctcctttcccatctggggagtcccgcgggccacagtgggcaggtggcaccgggggtcagcatgcaggggcgccagaggcccaggctgctggccggacagtcaccctctgttctcgctacatcccttgccccctgtccatttatttaagcccccataggtgcccttcacccccaaaaccagctgtacagaatctttgatacagacctatttgctaggggtgctgccggggatttggggtcagcatctggccccctatctcctgaccagctgagtcatgaggccggtttctctctctctcccacttttgtcccccagccaagctctaaagcacatgtagccgctgagacctgctgtttctgctgggggcaggctcctcttcccccagccccgggagcctcccccagcttcctgcagccccgacctctcaggttagaccctgggccctggagcttaggggattctccccaccccagccccacacctgctccttccctaatgctttgaggttttcttggttggaagctgcagctggcccaagaaagaaaataaaaaacaacacttttg

SEQ ID NO: 378170 - DNA, 1655 bp, Homo sapiens
aaaaaaaaaaaaaaaaaaaaaaaaaaaaaaaaaaaaaaaaaaaaaaaaaaaaaaaaaaaaaaaaaggagagtcttcccagggtcagggtcaggcgctttgctgagtccctttgtggccgccatggacaattccgggaaggaagcggaggcgatggcgctgttggccgaggcggagcgcaaagtgaagaactcgcagtccttcttctctggcctctttggaggctcatccaaaatagaggaagcatgcgaaatctacgccagagcagcaaacatgttcaaaatggccaaaaactggagtgctgctggaaacgcgttctgccaggctgcacagctgcacctgcagctccagagcaagcacgacgcagccacctgctttgtggacgctggcaacgcattcaagaaagccgacccccaagaggccattaactgtttgatgcgagcaatcgagatctacacagacatgggccgattcacgattgcggccaagcaccacatctccattgctgagatctatgagacagagttggtggacatcgagaaggccattgcccactacgagcagtctgcagactactacaaaggcgaggagtccaacagctcagccaacaagtgtctgctgaaggtggctggttacgctgcgctgctggagcagtatcagaaggccattgacatctacgaacaggtggggaccaatgccatggacagccccctcctcaagtacagcgccaaagactacttcttcaaggcggccctctgccacttctgcatcgacatgctcaacgccaagctggctgtccaaaagtatgaggagctgttcccagctttctctgattcccgggaatgcaagttgatgaaaaaattgctagaggcccacgaggagcagaatgtggacagctacaccgagtcggtgaaggaatacgactccatctcccggctggaccagtggctcaccaccatgctgctgcgcatcaagaagaccatccagggcgatgaggaggacctgcgctaagccccacccagccccccagtgcccgtcttcctgtcccatctgctcagagagaggtggggccgagacttgctggagagcttccctcctttcccatctggggagtcccgcgggccacagtgggcaggtggcaccgggggtcagcatgcaggggcgccagaggcccaggctgctggccggacagtcaccctctgttctcgctacatcccttgccccctgtccatttatttaagcccccataggtgcccttcacccccaaaaccagctgtacagaatctttgatacagacctatttgctaggggtgctgccggggatttggggtcagcatctggccccctatctcctgaccagctgagtcatgaggccggtttctctctctctcccacttttgtcccccagccaagctctaaagcacatgtagccgctgagacctgctgtttctgctgggggcaggctcctcttcccccagccccgggagcctcccccagcttcctgcagccccgacctctcaggttagaccctgggccctggagcttaggggattctccccaccccagccccacacctgctccttccctaatgctttgaggttttcttggttggaagctgcagctggcccaagaaagaaaataaaaaacaacacttttg

SEQ ID NO: 378171 - DNA, 1052 bp, Homo sapiens
gtcacgtggttcctggccgcaagcgacgcgcgccggtgcgacgtcaacgcagccgggcgagttttaccgatctgtgttccgcggcccggccgcggctgagtcttcccagggtcagggtcaggcgctttgctgagtccctttgtggccgccatggacaattccgggaaggaagcggaggcgatggcgctgttggccgaggcggagcgcaaagtgaagaactcgcagtccttcttctctggcctctttggaggctcatccaaaatagaggaagcatgcgaaatctacgccagagcagcaaacatgttcaaaatggccaaaaactggagtgctgctggaaacgcgttctgccaggctgcacagctgcacctgcagctccagagcaagcacgacgcagccacctgctttgtggacgctggcaacgcattcaagaaagccgacccccaagaggccattaactgtttgatgcgagcaatcgagatctacacagacatgggccgattcacgattgcggccaagcaccacatctccattgctgagatctatgagacagagttggtggacatcgagaaggccattgcccactacgagcagtctgcagactactacaaaggcgaggagtccaacagctcagccaacaagtgtctgctgaaggtggctggttacgctgcgctgctggagcagtatcagaaggccattgacatctacgaacaggtggggaccaatgccatggacagccccctcctcaagtacagcgccaaagactacttcttcaaggcggccctctgccacttctgcatcgacatgctcaacgccaagctggctgtccaaaagtatgaggagctgttcccagctttctctgattcccgggaatgcaagttgatgaaaaaattgctagaggcccacgaggagcagaatgtggacagctacaccgagtcggtgaaggaatacgactccatctcccggctggaccagtggctcaccaccatgtttgaggttttcttggttggaagctgcagctggcccaagaaagaaaataaaaaacaacacttttg

SEQ ID NO: 378172 - DNA, 1503 bp, Homo sapiens
tgtggttcttgtgctggtggttcttgtgctggaagaactcgcagtccttcttctctggcctctttggaggctcatccaaaatagaggaagcatgcgaaatctacgccagagcagcaaacatgttcaaaatggccaaaaactggagtgctgctggaaacgcgttctgccaggctgcacagctgcacctgcagctccagagcaagcacgacgcagccacctgctttgtggacgctggcaacgcattcaagaaagccgacccccaagaggccattaactgtttgatgcgagcaatcgagatctacacagacatgggccgattcacgattgcggccaagcaccacatctccattgctgagatctatgagacagagttggtggacatcgagaaggccattgcccactacgagcagtctgcagactactacaaaggcgaggagtccaacagctcagccaacaagtgtctgctgaaggtggctggttacgctgcgctgctggagcagtatcagaaggccattgacatctacgaacaggtggggaccaatgccatggacagccccctcctcaagtacagcgccaaagactacttcttcaaggcggccctctgccacttctgcatcgacatgctcaacgccaagctggctgtccaaaagtatgaggagctgttcccagctttctctgattcccgggaatgcaagttgatgaaaaaattgctagaggcccacgaggagcagaatgtggacagctacaccgagtcggtgaaggaatacgactccatctcccggctggaccagtggctcaccaccatgctgctgcgcatcaagaagaccatccagggcgatgaggaggacctgcgctaagccccacccagccccccagtgcccgtcttcctgtcccatctgctcagagagaggtggggccgagacttgctggagagcttccctcctttcccatctggggagtcccgcgggccacagtgggcaggtggcaccgggggtcagcatgcaggggcgccagaggcccaggctgctggccggacagtcaccctctgttctcgctacatcccttgccccctgtccatttatttaagcccccataggtgcccttcacccccaaaaccagctgtacagaatctttgatacagacctatttgctaggggtgctgccggggatttggggtcagcatctggccccctatctcctgaccagctgagtcatgaggccggtttctctctctctcccacttttgtcccccagccaagctctaaagcacatgtagccgctgagacctgctgtttctgctgggggcaggctcctcttcccccagccccgggagcctcccccagcttcctgcagccccgacctctcaggttagaccctgggccctggagcttaggggattctccccaccccagccccacacctgctccttccctaatgctttgaggttttcttggttggaagctgcagctggcccaagaaagaaaataaaaaacaacacttttg

SEQ ID NO: 378173 - DNA, 1604 bp, Homo sapiens
gtcacgtggttcctggccgcaagcgacgcgcgccggtgcgacgtcaacgcagccgggcgagttttaccgatctgtgttccgcggcccggccgcggctgagtcttcccagggtcagggtcaggcgctttgctgagtccctttgtggccgccatggacaattccgggaaggaagcggaggcgatggcgctgttggccgaggcggagcgcaaagtgaagaactcgcagtccttcttctctggcctctttggctgctggaaacgcgttctgccaggctgcacagctgcacctgcagctccagagcaagcacgacgcagccacctgctttgtggacgctggcaacgcattcaagaaagccgacccccaagaggccattaactgtttgatgcgagcaatcgagatctacacagacatgggccgattcacgattgcggccaagcaccacatctccattgctgagatctatgagacagagttggtggacatcgagaaggccattgcccactacgagcagtctgcagactactacaaaggcgaggagtccaacagctcagccaacaagtgtctgctgaaggtggctggttacgctgcgctgctggagcagtatcagaaggccattgacatctacgaacaggtggggaccaatgccatggacagccccctcctcaagtacagcgccaaagactacttcttcaaggcggccctctgccacttctgcatcgacatgctcaacgccaagctggctgtccaaaagtatgaggagctgttcccagctttctctgattcccgggaatgcaagttgatgaaaaaattgctagaggcccacgaggagcagaatgtggacagctacaccgagtcggtgaaggaatacgactccatctcccggctggaccagtggctcaccaccatgctgctgcgcatcaagaagaccatccagggcgatgaggaggacctgcgctaagccccacccagccccccagtgcccgtcttcctgtcccatctgctcagagagaggtggggccgagacttgctggagagcttccctcctttcccatctggggagtcccgcgggccacagtgggcaggtggcaccgggggtcagcatgcaggggcgccagaggcccaggctgctggccggacagtcaccctctgttctcgctacatcccttgccccctgtccatttatttaagcccccataggtgcccttcacccccaaaaccagctgtacagaatctttgatacagacctatttgctaggggtgctgccggggatttggggtcagcatctggccccctatctcctgaccagctgagtcatgaggccggtttctctctctctcccacttttgtcccccagccaagctctaaagcacatgtagccgctgagacctgctgtttctgctgggggcaggctcctcttcccccagccccgggagcctcccccagcttcctgcagccccgacctctcaggttagaccctgggccctggagcttaggggattctccccaccccagccccacacctgctccttccctaatgctttgaggttttcttggttggaagctgcagctggcccaagaaagaaaataaaaaacaacacttttg

SEQ ID NO: 378174 - DNA, 2024 bp, Homo sapiens
cctttcccaaatttaaaatcttgcaagagatagtacaacaaaggtagcccagttcttcctcagtgccatcctggtgtgttcaggttttttggcaaaacctttgaggagctggtgggtggcaggactaggttaaagggactgagcagagggctcccgactgctgagctacgaggaagagggggcagtggagagcacactgagggctcagtgttgatgacatccagcctcctcgtgccagaggtccaggtcctcctggtgcaggagcagaagctgctcaggatcctgcagagatggtggcagagcccaggtagaacctggcaccctgttgcctccaagaccacctcagatgctggtttggccgcctcccatgcctccttcccctttgccagcagctcagtccttcaagagcagggccttggcaggtctgtcttaaaacaccgtgggagtctggccatcatcctggcctagcactgctgtgccctgtccctggggttgtgggaagctggtagcatcctggcagcccgaggagagaagggctcccccagaagcatgtgcccagcaagtcacagtctgcagagtcagccctctcaccagatttcctggggctcagggattccgtccccttcttcccagccccttgagagtgtgtggcagcgctggcagctctgagcgcctattgatctctctgctggcagccaggtgcgcctgcgtccgcctcctctcctcagcttctgctgaaacgacttcactttctcatgtctcctcccacctccctttctctccagaggccattaactgtttgatgcgagcaatcgagatctacacagacatgggccgattcacgattgcggccaagcaccacatctccattgctgagatctatgagacagagttggtggacatcgagaaggccattgcccactacgagcagtctgcagactactacaaaggcgaggagtccaacagctcagccaacaagtgtctgctgaaggtggctggttacgctgcgctgctggagcagtatcagaaggccattgacatctacgaacaggtggggaccaatgccatggacagccccctcctcaagtacagcgccaaagactacttcttcaaggcggccctctgccacttctgcatcgacatgctcaacgccaagctggctgtccaaaagtatgaggagctgttcccagctttctctgattcccgggaatgcaagttgatgaaaaaattgctagaggcccacgaggagcagaatgtggacagctacaccgagtcggtgaaggaatacgactccatctcccggctggaccagtggctcaccaccatgctgctgcgcatcaagaagaccatccagggcgatgaggaggacctgcgctaagccccacccagccccccagtgcccgtcttcctgtcccatctgctcagagagaggtggggccgagacttgctggagagcttccctcctttcccatctggggagtcccgcgggccacagtgggcaggtggcaccgggggtcagcatgcaggggcgccagaggcccaggctgctggccggacagtcaccctctgttctcgctacatcccttgccccctgtccatttatttaagcccccataggtgcccttcacccccaaaaccagctgtacagaatctttgatacagacctatttgctaggggtgctgccggggatttggggtcagcatctggccccctatctcctgaccagctgagtcatgaggccggtttctctctctctcccacttttgtcccccagccaagctctaaagcacatgtagccgctgagacctgctgtttctgctgggggcaggctcctcttcccccagccccgggagcctcccccagcttcctgcagccccgacctctcaggttagaccctgggccctggagcttaggggattctccccaccccagccccacacctgctccttccctaatgctttgaggttttcttggttggaagctgcagctggcccaagaaagaaaataaaaaacaacacttttg

SEQ ID NO: 378175 - DNA, 1966 bp, Homo sapiens
cctttcccaaatttaaaatcttgcaagagatagtacaacaaaggtagcccagttcttcctcagtgccatcctggtgtgttcaggttttttggcaaaacctttgaggactacgaggaagagggggcagtggagagcacactgagggctcagtgttgatgacatccagcctcctcgtgccagaggtccaggtcctcctggtgcaggagcagaagctgctcaggatcctgcagagatggtggcagagcccaggtagaacctggcaccctgttgcctccaagaccacctcagatgctggtttggccgcctcccatgcctccttcccctttgccagcagctcagtccttcaagagcagggccttggcaggtctgtcttaaaacaccgtgggagtctggccatcatcctggcctagcactgctgtgccctgtccctggggttgtgggaagctggtagcatcctggcagcccgaggagagaagggctcccccagaagcatgtgcccagcaagtcacagtctgcagagtcagccctctcaccagatttcctggggctcagggattccgtccccttcttcccagccccttgagagtgtgtggcagcgctggcagctctgagcgcctattgatctctctgctggcagccaggtgcgcctgcgtccgcctcctctcctcagcttctgctgaaacgacttcactttctcatgtctcctcccacctccctttctctccagaggccattaactgtttgatgcgagcaatcgagatctacacagacatgggccgattcacgattgcggccaagcaccacatctccattgctgagatctatgagacagagttggtggacatcgagaaggccattgcccactacgagcagtctgcagactactacaaaggcgaggagtccaacagctcagccaacaagtgtctgctgaaggtggctggttacgctgcgctgctggagcagtatcagaaggccattgacatctacgaacaggtggggaccaatgccatggacagccccctcctcaagtacagcgccaaagactacttcttcaaggcggccctctgccacttctgcatcgacatgctcaacgccaagctggctgtccaaaagtatgaggagctgttcccagctttctctgattcccgggaatgcaagttgatgaaaaaattgctagaggcccacgaggagcagaatgtggacagctacaccgagtcggtgaaggaatacgactccatctcccggctggaccagtggctcaccaccatgctgctgcgcatcaagaagaccatccagggcgatgaggaggacctgcgctaagccccacccagccccccagtgcccgtcttcctgtcccatctgctcagagagaggtggggccgagacttgctggagagcttccctcctttcccatctggggagtcccgcgggccacagtgggcaggtggcaccgggggtcagcatgcaggggcgccagaggcccaggctgctggccggacagtcaccctctgttctcgctacatcccttgccccctgtccatttatttaagcccccataggtgcccttcacccccaaaaccagctgtacagaatctttgatacagacctatttgctaggggtgctgccggggatttggggtcagcatctggccccctatctcctgaccagctgagtcatgaggccggtttctctctctctcccacttttgtcccccagccaagctctaaagcacatgtagccgctgagacctgctgtttctgctgggggcaggctcctcttcccccagccccgggagcctcccccagcttcctgcagccccgacctctcaggttagaccctgggccctggagcttaggggattctccccaccccagccccacacctgctccttccctaatgctttgaggttttcttggttggaagctgcagctggcccaagaaagaaaataaaaaacaacacttttg

SEQ ID NO: 378176 - DNA, 1543 bp, Homo sapiens
gtcacgtggttcctggccgcaagcgacgcgcgccggtgcgacgtcaacgcagccgggcgagttttaccgatctgtgttccgcggcccggccgcggctgagtcttcccagggtcagggtcaggcgctttgctgagtccctttgtggccgccatggacaattccgggaaggaagcggaggcgatggcgctgttggccgaggcggagcgcaaagtgaagaactcgcagtccttcttctctggcctctttggaggctcatccaaaatagaggaagcatgcgaaatctacgccagagcagcaaacatgttcaaaatggccaaaaactggagtgctgctggaaacgcgttctgccaggctgcacagctgcacctgcagctccagagcaagcacgacgcagccacctgctttgtggacgctggcaacgcattcaagaaagccgacccccaagaggccattaactgtttgatgcgagcaatcgagatctacacagacatgggccgattcacgattgcggccaagcaccacatctccattgctgagatctatgagacagagttggtggacatcgagaaggtggggaccaatgccatggacagccccctcctcaagtacagcgccaaagactacttcttcaaggcggccctctgccacttctgcatcgacatgctcaacgccaagctggctgtccaaaagtatgaggagctgttcccagctttctctgattcccgggaatgcaagttgatgaaaaaattgctagaggcccacgaggagcagaatgtggacagctacaccgagtcggtgaaggaatacgactccatctcccggctggaccagtggctcaccaccatgctgctgcgcatcaagaagaccatccagggcgatgaggaggacctgcgctaagccccacccagccccccagtgcccgtcttcctgtcccatctgctcagagagaggtggggccgagacttgctggagagcttccctcctttcccatctggggagtcccgcgggccacagtgggcaggtggcaccgggggtcagcatgcaggggcgccagaggcccaggctgctggccggacagtcaccctctgttctcgctacatcccttgccccctgtccatttatttaagcccccataggtgcccttcacccccaaaaccagctgtacagaatctttgatacagacctatttgctaggggtgctgccggggatttggggtcagcatctggccccctatctcctgaccagctgagtcatgaggccggtttctctctctctcccacttttgtcccccagccaagctctaaagcacatgtagccgctgagacctgctgtttctgctgggggcaggctcctcttcccccagccccgggagcctcccccagcttcctgcagccccgacctctcaggttagaccctgggccctggagcttaggggattctccccaccccagccccacacctgctccttccctaatgctttgaggttttcttggttggaagctgcagctggcccaagaaagaaaataaaaaacaacacttttg

SEQ ID NO: 378177 - DNA, 2097 bp, Homo sapiens
cctttcccaaatttaaaatcttgcaagagatagtacaacaaaggtagcccagttcttcctcagtgccatcctggtgtgttcaggttttttggcaaaacctttgaggagctggtgggtggcaggactaggttaaagggactgagcagagggctcccgactgctgagctacgaggaagagggggcagtggagagcacactgagggctcagtgttgatgacatccagcctcctcgtgccagaggtccaggtcctcctggtgcaggagcagaagctgctcaggatcctgcagagatggtggcagagcccaggtagaacctggcaccctgttgcctccaagaccacctcagatgctggtttggccgcctcccatgcctccttcccctttgccagcagctcagtccttcaagagcagggccttggcaggtctgtcttaaaacaccgtgggagtctggccatcatcctggcctagcactgctgtgccctgtccctggggttgtgggaagctggtagcatcctggcagcccgaggagagaagggctcccccagaagcatgtgcccagcaagtcacagtctgcagagtcagccctctcaccagatttcctggggctcagggattccgtccccttcttcccagccccttgagagtgtgtggcagcgctggcagctctgagcgcctattgatctctctgctggcagccaggtgcgcctgcgtccgcctcctctcctcagcttctgctgaaacgacttcactttctcatgtctcctcccacctccctttctctccagaggccattaactgtttgatgcgagcaatcgagatctacacagacatgggccgattcacgattgcggccaagcaccacatctccattgctgagatctatgagacagagttggtggacatcgagaaggccattgcccactacgagcagtctgcagactactacaaaggcgaggagtccaacaggtagcccccttcctgcctgccccagccccgcagggaccgccaccacttcccctcactactcctccccacacagctcagccaacaagtgtctgctgaaggtggctggttacgctgcgctgctggagcagtatcagaaggccattgacatctacgaacaggtggggaccaatgccatggacagccccctcctcaagtacagcgccaaagactacttcttcaaggcggccctctgccacttctgcatcgacatgctcaacgccaagctggctgtccaaaagtatgaggagctgttcccagctttctctgattcccgggaatgcaagttgatgaaaaaattgctagaggcccacgaggagcagaatgtggacagctacaccgagtcggtgaaggaatacgactccatctcccggctggaccagtggctcaccaccatgctgctgcgcatcaagaagaccatccagggcgatgaggaggacctgcgctaagccccacccagccccccagtgcccgtcttcctgtcccatctgctcagagagaggtggggccgagacttgctggagagcttccctcctttcccatctggggagtcccgcgggccacagtgggcaggtggcaccgggggtcagcatgcaggggcgccagaggcccaggctgctggccggacagtcaccctctgttctcgctacatcccttgccccctgtccatttatttaagcccccataggtgcccttcacccccaaaaccagctgtacagaatctttgatacagacctatttgctaggggtgctgccggggatttggggtcagcatctggccccctatctcctgaccagctgagtcatgaggccggtttctctctctctcccacttttgtcccccagccaagctctaaagcacatgtagccgctgagacctgctgtttctgctgggggcaggctcctcttcccccagccccgggagcctcccccagcttcctgcagccccgacctctcaggttagaccctgggccctggagcttaggggattctccccaccccagccccacacctgctccttccctaatgctttgaggttttcttggttggaagctgcagctggcccaagaaagaaaataaaaaacaacacttttg

SEQ ID NO: 378178 - DNA, 1421 bp, Homo sapiens
tgtcagaagctcgtccaggagccagctgtcccaggtgtctgctggtggcccgccgctttccagacatggaggggacttaaccccgtgagtccatgttgctgcctgggggaggccattaactgtttgatgcgagcaatcgagatctacacagacatgggccgattcacgattgcggccaagcaccacatctccattgctgagatctatgagacagagttggtggacatcgagaaggccattgcccactacgagcagtctgcagactactacaaaggcgaggagtccaacaggtagcccccttcctgcctgccccagccccgcagggaccgccaccacttcccctcactactcctccccacacagctcagccaacaagtgtctgctgaaggtggctggttacgctgcgctgctggagcagtatcagaaggccattgacatctacgaacaggtggggaccaatgccatggacagccccctcctcaagtacagcgccaaagactacttcttcaaggcggccctctgccacttctgcatcgacatgctcaacgccaagctggctgtccaaaagtatgaggagctgttcccagctttctctgattcccgggaatgcaagttgatgaaaaaattgctagaggcccacgaggagcagaatgtggacagctacaccgagtcggtgaaggaatacgactccatctcccggctggaccagtggctcaccaccatgctgctgcgcatcaagaagaccatccagggcgatgaggaggacctgcgctaagccccacccagccccccagtgcccgtcttcctgtcccatctgctcagagagaggtggggccgagacttgctggagagcttccctcctttcccatctggggagtcccgcgggccacagtgggcaggtggcaccgggggtcagcatgcaggggcgccagaggcccaggctgctggccggacagtcaccctctgttctcgctacatcccttgccccctgtccatttatttaagcccccataggtgcccttcacccccaaaaccagctgtacagaatctttgatacagacctatttgctaggggtgctgccggggatttggggtcagcatctggccccctatctcctgaccagctgagtcatgaggccggtttctctctctctcccacttttgtcccccagccaagctctaaagcacatgtagccgctgagacctgctgtttctgctgggggcaggctcctcttcccccagccccgggagcctcccccagcttcctgcagccccgacctctcaggttagaccctgggccctggagcttaggggattctccccaccccagccccacacctgctccttccctaatgctttgaggttttcttggttggaagctgcagctggcccaagaaagaaaataaaaaacaacacttttg

SEQ ID NO: 378179 - DNA, 1538 bp, Homo sapiens
gcgtggccagcgggaaggagctggagggttggcgctagattttgcttggccggagtttttttaccattgcctggcagaagcacggagtccaggatttcctggtgtccctggctcacggcctggggtggtggccccacacaccccacacacacacaccccacagagccctgccctgctgtgggcaccggtggtgggcaaaagcttgggctttgtcagaccaggttcccattcccaccccatgtctcaccgtgccctgggcaggtcactgcccctctctggatctgtttcctcactttgaaaagggggctcaccgtcatttgaccctctcagggtcctcaagaagcaccagccccaggcctggcatggaggatgtgctcatttgtcccctgccccagctgagccaggtgggaggaggcagtgggtgcctatctggggaaccttccccctccacccacctctccctgcagccatctctgcagccaggctggtgctgagctcagctacgggaaggtactgacagacacagagccaggtgacacctgaggctgggggaggggtgcaagagctgactcaatatcacccgacatccccaagtcccctcagctgctaggccagtagctctgaggaccctcttgttactaactcatcttctcccttccctgctgcccagctggctgtccaaaagtatgaggagctgttcccagctttctctgattcccgggaatgcaagttgatgaaaaaattgctagaggcccacgaggagcagaatgtggacagctacaccgagtcggtgaaggaatacgactccatctcccggctggaccagtggctcaccaccatgctgctgcgcatcaagaagaccatccagggcgatgaggaggacctgcgctaagccccacccagccccccagtgcccgtcttcctgtcccatctgctcagagagaggtggggccgagacttgctggagagcttccctcctttcccatctggggagtcccgcgggccacagtgggcaggtggcaccgggggtcagcatgcaggggcgccagaggcccaggctgctggccggacagtcaccctctgttctcgctacatcccttgccccctgtccatttatttaagcccccataggtgcccttcacccccaaaaccagctgtacagaatctttgatacagacctatttgctaggggtgctgccggggatttggggtcagcatctggccccctatctcctgaccagctgagtcatgaggccggtttctctctctctcccacttttgtcccccagccaagctctaaagcacatgtagccgctgagacctgctgtttctgctgggggcaggctcctcttcccccagccccgggagcctcccccagcttcctgcagccccgacctctcaggttagaccctgggccctggagcttaggggattctccccaccccagccccacacctgctccttccctaatgctttgaggttttcttggttggaagctgcagctggcccaagaaagaaaataaaaaacaacacttttg

SEQ ID NO: 378180 - DNA, 874 bp, Homo sapiens
gtcacgtggttcctggccgcaagcgacgcgcgccggtgcgacgtcaacgcagccgggcgagttttaccgatctgtgttccgcggcccggccgcggctgagtcttcccagggtcagggtcaggcgctttgctgagtccctttgtggccgccatggacaattccgggaaggaagcggaggcgatggcgctgttggccgaggcggagcgcaaagtgaagaactcgcagtccttcttctctggcctctttggaggctcatccaaaatagaggaagcatgcgaaatctacgccagagcagcaaacatgttcaaaatggccaaaaactggagtgctgctggaaacgcgttctgccaggctgcacagctgcacctgcagctccagagcaagcacgacgcagccacctgctttgtggacgctggcaacgcattcaagaaagccgacccccaagaggccattaactgtttgatgcgagcaatcgagatctacacagacatgggccgattcacgattgcggccaagcaccacatctccattgctgagatctatgagacagagttggtggacatcgagaaggccattgcccactacgagcagtctgcagactactacaaaggcgaggagtccaacaggtagcccccttcctgcctgccccagccccgcagggaccgccaccacttcccctcactactcctccccacacagctcagccaacaagtgtctgctgaaggtggctggttacgctgcgctgctggagcagtatcagaaggccattgacatctacgaacaggtggggacaggtggggatggcggcttccaccctgccccctctcagggcctgtgcctcctcctaagccccggcaccttgttctggaaccac

SEQ ID NO: 378181 - DNA, 1019 bp, Homo sapiens
  misc_feature (953)..(953): n is a, c, g, or t
  misc_feature (955)..(955): n is a, c, g, or t
gtcacgtggttcctggccgcaagcgacgcgcgccggtgcgacgtcaacgcagccgggcgagttttaccgatctgtgttccgcggcccggccgcggctgagtcttcccagggtcagggtcaggcgctttgctgagtccctttgtggccgccatggacaattccgggaaggaagcggaggcgatggcgctgttggccgaggcggagcgcaaagtgaagaactcgcagtccttcttctctggcctctttggaggccattaactgtttgatgcgagcaatcgagatctacacagacatgggccgattcacgattgcggccaagcaccacatctccattgctgagatctatgagacagagttggtggacatcgagaaggccattgcccactacgagcagtctgcagactactacaaaggcgaggagtccaacagctcagccaacaagtgtctgctgaaggtggctggttacgctgcgctgctggagcagtatcagaaggccattgacatctacgaacaggtggggaccaatgccatggacagccccctcctcaagtacagcgccaaagactacttcttcaaggcggccctctgccacttctgcatcgacatgctcaacgccaagctggctgtccaaaagtatgaggagctgttcccagctttctctgattcccgggaatgcaagttgatgaaaaaattgctagaggcccacgaggagcagaatgtggacagctacaccgagtcggtgaaggaatacgactccatctcccggctggaccagtggctcaccaccatgctgctgcgcatcaagaagaccatccagggcgatgaggaggacctgcgctaagccccacccagccccccagtgcccgtcttcctgtcccatctgctcagagagaggtggggccgagacttgctggagagcttccctcctttcccatctggggagtcccgcgggncnggggggtggcccggggttctcttaggggccaagccagggtggcggaaactctgttggaaaccgg

SEQ ID NO: 378182 - DNA, 762 bp, Homo sapiens
gtcacgtggttcctggccgcaagcgacgcgcgccggtgcgacgtcaacgcagccgggcgagttttaccgatctgtgttccgcggcccggccgcggctgagtcttcccagggtcagggtcaggcgctttgctgagtccctttgtggccgccatggacaattccgggaaggaagcggaggcgatggcgctgttggccgaggcggagcgcaaagtgaagaactcgcagtccttcttctctggcctctttggaggctcatccaaaatagaggaagcatgcgaaatctacgccagagcagcaaacatgttcaaaatggccaaaaactggagtgctgctggaaacgcgttctgccaggctgcacagctgcacctgcagctccagagcaagcacgacgcagccacctgctttgtggacgctggcaacgcattcaagaaagccgacccccaaggtgagggcctctgcgggccacacgggctggctgtccggagcgccatcctagcaccctgcattgattcctcaggtttcctggcggctctggtttttccagtggccgacatgtgataggctggcaggggcgtgcctgaggcagagtgagcgttgactttagaactggctctcttccttccagttggcattcgcgccctgctcaagtctccgcccccctatctaccgtgtcggtggtgtcggtgcagctgatcaccccttcccaatcccggagcatttgggagtgggagttccattgcagacccaccgcctgccggggag

SEQ ID NO: 378183 - DNA, 794 bp, Homo sapiens
gtcacgtggttcctggccgcaagcgacgcgcgccggtgcgacgtcaacgcagccgggcgagttttaccgatctgtgttccgcggcccggccgcggctgagtcttcccagggtcagggtcaggcgctttgctgagtccctttgtggccgccatggacaattccgggaaggaagcggaggcgatggcgctgttggccgaggcggagcgcaaagtgaagaactcgcagtccttcttctctggcctctttggctgctggaaacgcgttctgccaggctgcacagctgcacctgcagctccagagcaagcacgacgcagccacctgctttgtggacgctggcaacgcattcaagaaagccgacccccaagaggccattaactgtttgatgcgagcaatcgagatctacacagacatgggccgattcacgattgcggccaagcaccacatctccattgctgagatctatgagacagagttggtggacatcgagaaggccattgcccactacgagcagtctgcagactactacaaaggcgaggagtccaacaggtagcccccttcctgcctgccccagccccgcagggaccgccaccacttcccctcactactcctccccacacagctcagccaacaagtgtctgctgaaggtggctggttacgctgcgctgctggagcagtatcagaaggccattgacatctacgaacaggtggggacaggtggggatggcggcttccaccctgccccctctcagggcctgtgcctcctcctaagccccggcaccttgttctggaaccac

SEQ ID NO: 378184 - DNA, 721 bp, Homo sapiens
gtcacgtggttcctggccgcaagcgacgcgcgccggtgcgacgtcaacgcagccgggcgagttttaccgatctgtgttccgcggcccggccgcggctgagtcttcccagggtcagggtcaggcgctttgctgagtccctttgtggccgccatggacaattccgggaaggaagcggaggcgatggcgctgttggccgaggcggagcgcaaagtgaagaactcgcagtccttcttctctggcctctttggctgctggaaacgcgttctgccaggctgcacagctgcacctgcagctccagagcaagcacgacgcagccacctgctttgtggacgctggcaacgcattcaagaaagccgacccccaagaggccattaactgtttgatgcgagcaatcgagatctacacagacatgggccgattcacgattgcggccaagcaccacatctccattgctgagatctatgagacagagttggtggacatcgagaaggccattgcccactacgagcagtctgcagactactacaaaggcgaggagtccaacagctcagccaacaagtgtctgctgaaggtggctggttacgctgcgctgctggagcagtatcagaaggccattgacatctacgaacaggtggggacaggtggggatggcggcttccaccctgccccctctcagggcctgtgcctcctcctaagccccggcaccttgttctggaaccac

SEQ ID NO: 378185 - DNA, 255 bp, Homo sapiens
tcccgggaatgcaagttgatgaaagtaagtgctgggtgctccggcctcccccttcccgaacctcagacgggggtggctggggctccaggtgggacaatcgccaagacttgtccagtagttctcagagggtgtctttgttttgttttgttttgttttgttttgtttggccatttgagtctccattttccagatgaagaaagtacaactcggggagtgctggagctcaggatggctaggtggacacacacacacaca

SEQ ID NO: 378186 - DNA, 900 bp, Homo sapiens
catccacagtgggagggagggagtgtcacatggggtccccccagcgtgcacggagccctgggtgatggccgagaaaaaggcaggcagctggccccctgggagagaggggcgggcgccgcctctcatgttcccaccgcctgccgccgctctgcccaccgccatgccagcctcccgttggtcctgacagccaggctgcctccttcccactgtctcaggctctcagaaggcccacgaacacctggctacagcctccacccccacccagccaccatcacaccctgatcttggtcgctcacgcactggccgctgacctctccaagctggtccctggctccctgcccttggggtcctgggttaacagggcctcacctcgggacatgaaccagctcccagctggccccccagtgcctggcagtggctctggccctctggctgcttgccctgagctcaccagtgccacttctccatggctacaggtggggaccaatgccatggacagccccctcctcaagtacagcgccaaagactacttcttcaaggcggccctctgccacttctgcatcgacatgctcaacgccaaggtagcacaccccacgcccgcaggaccaccgcaccaggccaccatgtgcttatctccaggccaggtcccgttgcccccgaagagggacgtgctcctccctcacgtctggcccctgccagccagcctttggatgagaagtgtggttctcacagctgtgtttctgtgctggcatcacctgcccacccagccctggaggcttttgcgggtccagctcctgcctcacttagtgctctttccttcatgggtgcactttttgaatcctcactgcaccccattaaagtcagcaccattgtcaccgcgtcttatgggtgaagatggtg

SEQ ID NO: 378187 - DNA, 1895 bp, Homo sapiens
  misc_feature (1895)..(1895): n is a, c, g, or t
gtcacgtggttcctggccgcaagcgacgcgcgccggtgcgacgtcaacgcagccgggcgagttttaccgatctgtgttccgcggcccggccgcggctgagtcttcccagggtcagggtcaggcgctttgctgagtccctttgtggccgccatggacaattccgggaaggaagcggaggcgatggcgctgttggccgaggcggagcgcaaagtgaagaactcgcagtccttcttctctggcctctttggaggctcatccaaaatagaggaagcatgcgaaatctacgccagagcagcaaacatgttcaaaatggccaaaaactggagtgctgctggaaacgcgttctgccaggctgcacagctgcacctgcagctccagagcaagcacgacgcagccacctgctttgtggacgctggcaacgcattcaagaaagccgacccccaagaggccattaactgtttgatgcgagcaatcgagatctacacagacatgggccgattcacgattgcggccaagcaccacatctccattgctgagatctatgagacagagttggtggacatcgagaaggccattgcccactacgagcagtctgcagactactacaaaggcgaggagtccaacagctcagccaacaagtgtctgctgaaggtggctggttacgctgcgctgctggagcagtatcagaaggccattgacatctacgaacaggtggggaccaatgccatggacagccccctcctcaagtacagcgccaaagactacttcttcaaggcggccctctgccacttctgcatcgacatgctcaacgccaagctggctgtccaaaagtatgaggagctgttcccagctttctctgattcccgggaatgcaagttgatgaaaaaattgctagaggcccacgaggagcagaatgtggacagctacaccgagtcggtgaaggaatacgactccatctcccggctggaccagtggctcaccaccatgctgctgcgcatcaagaagaccatccagggcgatgaggaggacctgcgctaagccccacccagccccccagtgcccgtcttcctgtcccatctgctcagagagaggtggggccgagacttgctggagagcttccctcctttcccatctggggagtcccgcgggccacagtgggcaggtggcaccgggggtcagcatgcaggggcgccagaggcccaggctgctggccggacagtcaccctctgttctcgctacatcccttgccccctgtccatttatttaagcccccataggtgcccttcacccccaaaaccagctgtacagaatctttgatacagacctatttgctaggggtgctgccggggatttggggtcagcatctggccccctatctcctgaccagctgagtcatgaggccggtttctctctctctcccacttttgtcccccagccaagctctaaagcacatgtagccgctgagacctgctgtttctgctgggggcaggctcctcttcccccagccccgggagcctcccccagcttcctgcagccccgacctctcaggttagaccctgggccctggagcttaggggattctccccaccccagccccacacctgctccttccctaatgctttgaggttttcttggttggaagctgcagctggcccaagaaagaaaataaaaaacaacacttttgaaaaaaaaaagcaaaaaaaaaaaaaaaaaaaaaaaaagcgccgagcgatctctagcgggggggggggaaaaagaaggtgtatcagacagggcgccatgtggcaacacagggttttcctgcgaccccctttttgttgacaccagagggggaataaccaggggatccccaatagagagcgcgcaataattgagaaacccggtaagccgttagn

SEQ ID NO: 378188 - DNA, 1595 bp, Homo sapiens
gtcacgtggttcctggccgcaagcgacgcgcgccggtgcgacgtcaacgcagccgggcgagttttaccgatctgtgttccgcggcccggccgcggctgagtcttcccagggtcagggtcaggcgctttgctgagtccctttgtggccgccatggacaattccgggaaggaagcggaggcgatggcgctgttggccgaggcggagcgcaaagtgaagaactcgcagtccttcttctctggcctctttggaggctcatccaaaatagaggaagcatgcgaaatctacgccagagcagcaaacatgttcaaaatggccaaaaactggagtgctgctggaaacgcgttctgccaggctgcacagctgcacctgcagctccagagcaagcacgacgcagccacctgctttgtggacgctggcaacgcattcaagaaagccgacccccaagaggccattaactgtttgatgcgagcaatcgagatctacacagacatgggccgattcacgattgcggccaagcaccacatctccattgctgagatctatgagacagagttggtggacatcgagaaggccattgcccactacgagcagtctgcagactactacaaaggcgaggagtccaacagctcagccaacaagtgtctgctgaaggtggctggttacgctgcgctgctggagcagtatcagaaggccattgacatctacgaacaggtggggaccaatgccatggacagccccctcctcaagtacagcgccaaagactacttcttcaaggcggccctctgccacttctgcatcgacatgctcaacgccaagctggctgtccaaaagtatgaggagctgttcccagctttctctgattcccgggaatgcaagttgatgaaaaaattgctagaggcccacgaggagcagaatgtggacagctacaccgagtcggtgaaggaatacgactccatctcccggctggaccagtggctcaccaccatgctgctgcgcatcaagaagaccatccagggcgatgaggaggacctgcgctaagccccacccagccccccagtgcccgtcttcctgtcccatctgctcagagagaggtggggccgagacttgctggagagcttccctcctttcccatctggggagtcccgcgggccacagtgggcaggtggcaccgggggtcagcatgcaggggcgccagaggcccaggctgctggccggacagtcaccctctgttctcgctacatcccttgccccctgtccatttatttaagcccccataggtgcccttcacccccaaaaccagctgtacagaatctttgatacagacctatttgctaggggtgctgccggggatttggggtcagcatctggccccctatctcctgaccagctgagtcatgaggccggtttctctctctctcccacttttgtcccccagcttcctgcagccccgacctctcaggttagaccctgggccctggagcttaggggattctccccaccccagccccacacctgctccttccctaatgctttgaggttttcttggttggaagctgcagctggcccaagaaagaaaataaaaaacaacacttttg

SEQ ID NO: 378189 - DNA, 1286 bp, Homo sapiens
gtcacgtggttcctggccgcaagcgacgcgcgccggtgcgacgtcaacgcagccgggcgagttttaccgatctgtgttccgcggcccggccgcggctgagtcttcccagggtcagggtcaggcgctttgctgagtccctttgtggccgccatggacaattccgggaaggaagcggaggcgatggcgctgttggccgaggcggagcgcaaagtgaagaactcgcagtccttcttctctggcctctttggaggctcatccaaaatagaggaagcatgcgaaatctacgccagagcagcaaacatgttcaaaatggccaaaaactggagtgctgctggaaacgcgttctgccaggctgcacagctgcacctgcagctccagagcaagcacgacgcagccacctgctttgtggacgctggcaacgcattcaagaaagccgacccccaagaggccattaactgtttgatgcgagcaatcgagatctacacagacatgggccgattcacgattgcggccaagcaccacatctccattgctgagatctatgagacagagttggtggacatcgagaaggccattgcccactacgagcagtctgcagactactacaaaggcgaggagtccaacagctcagccaacaagtgtctgctgaaggtggctggttacgctgcgctgctggagcagtatcagaaggccattgacatctacgaacaggtggggaccaatgccatggacagccccctcctcaagtacagcgccaaagactacttcttcaaggcggccctctgccacttctgcatcgacatgctcaacgccaagctggctgtccaaaagtatgaggagctgttcccagctttctctgattcccgggaatgcaagttgatgaaaaaattgctagaggcccacgaggagcagaatgtggacagctacaccgagtcggtgaaggaatacgactccatctcccggctggaccagtggctcaccaccatgctgctgcgcatcaagaagaccatccagggcgatgaggaggacctgcgctaagccccacccagccccccagtgcccgtcttcctgtcccatctgctcagagagagccaagctctaaagcacatgtagccgctgagacctgcttcctgcagccccgacctctcaggttagaccctgggccctggagcttaggggattctccccaccccagccccacacctgctccttccctaatgctttgaggttttcttggttggaagctgcagctggcccaagaaagaaaataaaaaacaacacttttg

SEQ ID NO: 378190 - DNA, 1096 bp, Homo sapiens
gtcacgtggttcctggccgcaagcgacgcgcgccggtgcgacgtcaacgcagccgggcgagttttaccgatctgtgttccgcggcccggccgcggctgagtcttcccagggtcagggtcaggcgctttgctgagtccctttgtggccgccatggacaattccgggaaggaagcggaggcgatggcgctgttggccgaggcggagcgcaaagtgaagaactcgcagtccttcttctctggcctctttggaggctcatccaaaatagaggaagcatgcgaaatctacgccagagcagcaaacatgttcaaaatggccaaaaactggagtgctgctggaaacgcgttctgccaggctgcacagctgcacctgcagctccagagcaagcacgacgcagccacctgctttgtggacgctggcaacgcattcaagaaagccgacccccaagaggccattaactgtttgatgcgagcaatcgagatctacacagacatgggccgattcacgattgcggccaagcaccacatctccattgctgagatctatgagacagagttggtggacatcgagaaggccattgcccactacgagcagtctgcagactactacaaaggcgaggagtccaacagctcagccaacaagtgtctgctgaaggtggctggttacgctgcgctgctggagcagtatcagaaggccattgacatctacgaacaggtggggaccaatgccatggacagccccctcctcaagtacagcgccaaagactacttcttcaaggcggccctctgccacttctgcatcgacatgctcaacgccaagctggctgtccaaaagtatgaggagctgttcccagctttctctgattcccgggaatgcaagttgatgaaaaaattgctagaggcccacgaggagcagaatgtggacagctacaccgagtcggtgaaggaatacgactccatctcccggctggaccagtggctcaccaccatgctgctgcgcatcaagaagaccaggtatgcccttttgggtttatgccacggagcttgcgccatgctcattacagaccgttctctttttttgttttgctgttacaggcatt

SEQ ID NO: 378191 - DNA, 1761 bp, Homo sapiens
acgcgcgatgttcgcggtgtgtcaccgtgggtgcagcacagcggacagcggcgcgcgcgatgcagactgtctaacgacatgtccagggtctgagtatttaaccagtatcttgtagatttcctgtcgagttctcgagctctgtagagcgtagactatctgtgccacagtggttgccagggatctaggcagcgttttggctttgacgtactcgtttgatgtcgctgcactggacgatatccggggaacgcgaatgcaggatggcgctgttggccgaggcggagcgcaaagtgaagaactcgcagtccttcttctctggcctctttggaggctcatccaaaatagaggaagcatgcgaaatctacgccagagcagcaaacatgttcaaaatggccaaaaactggagtgctgctggaaacgcgttctgccaggctgcacagctgcacctgcagctccagagcaagcacgacgcagccacctgctttgtggacgctggcaacgcattcaagaaagccgacccccaagaggccattaactgtttgatgcgagcaatcgagatctacacagacatgggccgattcacgattgcggccaagcaccacatctccattgctgagatctatgagacagagttggtggacatcgagaaggccattgcccactacgagcagtctgcagactactacaaaggcgaggagtccaacagctcagccaacaagtgtctgctgaaggtggctggttacgctgcgctgctggagcagtatcagaaggccattgacatctacgaacaggtggggaccaatgccatggacagccccctcctcaagtacagcgccaaagactacttcttcaaggcggccctctgccacttctgcatcgacatgctcaacgccaagctggctgtccaaaagtatgaggagctgttcccagctttctctgattcccgggaatgcaagttgatgaaaaaattgctagaggcccacgaggagcagaatgtggacagctacaccgagtcggtgaaggaatacgactccatctcccggctggaccagtggctcaccaccatgctgctgcgcatcaagaagaccatccagggcgatgaggaggacctgcgctaagccccacccagccccccagtgcccgtcttcctgtcccatctgctcagagagaggtggggccgagacttgctggagagcttccctcctttcccatctggggagtcccgcgggccacagtgggcaggtggcaccgggggtcagcatgcaggggcgccagaggcccaggctgctggccggacagtcaccctctgttctcgctacatcccttgccccctgtccatttatttaagcccccataggtgcccttcacccccaaaaccagctgtacagaatctttgatacagacctatttgctaggggtgctgccggggatttggggtcagcatctggccccctatctcctgaccagctgagtcatgaggccggtttctctctctctcccacttttgtcccccagccaagctctaaagcacatgtagccgctgagacctgctgtttctgctgggggcaggctcctcttcccccagccccgggagcctcccccagcttcctgcagccccgacctctcaggttagaccctgggccctggagcttaggggattctccccaccccagccccacacctgctccttccctaatgctttgaggttttcttggttggaagctgcagctggcccaagaaagaaaataaaaaacaacacttttg

SEQ ID NO: 378192 - DNA, 1725 bp, Homo sapiens
  misc_feature (230)..(230): n is a, c, g, or t
  misc_feature (238)..(238): n is a, c, g, or t
  misc_feature (245)..(245): n is a, c, g, or t
  misc_feature (282)..(282): n is a, c, g, or t
gtcacgtggttcctggccgcaagcgacgcgcgccggtgcgacgtcaacgcagccgggcgagttttaccgatctgtgttccgcggcccggccgcggctgagtcttcccagggtcagggtcaggcgctttgctgagtccctttgtggccgccatggacaattccgggaaggaagcggaggcgatatgatatggccccgaaggccgggagcgccaaaagttgaaaagaaaacnttcccggnccaaggnttccccattttccaatttttccaatacattggggccntctttggaggctcatccaaaatagaggaagcatgcgaaatctacgccagagcagcaaacatgttcaaaatggccaaaaactggagtgctgctggaaacgcgttctgccaggctgcacagctgcacctgcagctccagagcaagcacgacgcagccacctgctttgtggacgctggcaacgcattcaagaaagccgacccccaagaggccattaactgtttgatgcgagcaatcgagatctacacagacatgggccgattcacgattgcggccaagcaccacatctccattgctgagatctatgagacagagttggtggacatcgagaaggccattgcccactacgagcagtctgcagactactacaaaggcgaggagtccaacagctcagccaacaagtgtctgctgaaggtggctggttacgctgcgctgctggagcagtatcagaaggccattgacatctacgaacaggtggggaccaatgccatggacagccccctcctcaagtacagcgccaaagactacttcttcaaggcggccctctgccacttctgcatcgacatgctcaacgccaagctggctgtccaaaagtatgaggagctgttcccagctttctctgattcccgggaatgcaagttgatgaaaaaattgctagaggcccacgaggagcagaatgtggacagctacaccgagtcggtgaaggaatacgactccatctcccggctggaccagtggctcaccaccatgctgctgcgcatcaagaagaccatccagggcgatgaggaggacctgcgctaagccccacccagccccccagtgcccgtcttcctgtcccatctgctcagagagaggtggggccgagacttgctggagagcttccctcctttcccatctggggagtcccgcgggccacagtgggcaggtggcaccgggggtcagcatgcaggggcgccagaggcccaggctgctggccggacagtcaccctctgttctcgctacatcccttgccccctgtccatttatttaagcccccataggtgcccttcacccccaaaaccagctgtacagaatctttgatacagacctatttgctaggggtgctgccggggatttggggtcagcatctggccccctatctcctgaccagctgagtcatgaggccggtttctctctctctcccacttttgtcccccagccaagctctaaagcacatgtagccgctgagacctgctgtttctgctgggggcaggctcctcttcccccagccccgggagcctcccccagcttcctgcagccccgacctctcaggttagaccctgggccctggagcttaggggattctccccaccccagccccacacctgctccttccctaatgctttgaggttttcttggttggaagctgcagctggcccaagaaagaaaataaaaaacaacacttttg

SEQ ID NO: 378193 - DNA, 1487 bp, Homo sapiens
gtcacgtggttcctggccgcaagcgacgcgcgccggtgcgacgtcaacgcagccgggcgagttttaccgatctgtgttccgcggcccggccgcggctgagtcttcccagggtcagggtcaggcgctttgctgagtccctttgtggccgccatggacaattccgggaaggaagcggaggcgatggcgctgttggccgaggcggagcgcaaagtgaagaactcgcagtccttcttctctggcctctttggaggccattaactgtttgatgcgagcaatcgagatctacacagacatgggccgattcacgattgcggccaagcaccacatctccattgctgagatctatgagacagagttggtggacatcgagaaggccattgcccactacgagcagtctgcagactactacaaaggcgaggagtccaacagctcagccaacaagtgtctgctgaaggtggctggttacgctgcgctgctggagcagtatcagaaggccattgacatctacgaacaggtggggaccaatgccatggacagccccctcctcaagtacagcgccaaagactacttcttcaaggcggccctctgccacttctgcatcgacatgctcaacgccaagctggctgtccaaaagtatgaggagctgttcccagctttctctgattcccgggaatgcaagttgatgaaaaaattgctagaggcccacgaggagcagaatgtggacagctacaccgagtcggtgaaggaatacgactccatctcccggctggaccagtggctcaccaccatgctgctgcgcatcaagaagaccatccagggcgatgaggaggacctgcgctaagccccacccagccccccagtgcccgtcttcctgtcccatctgctcagagagaggtggggccgagacttgctggagagcttccctcctttcccatctggggagtcccgcgggccacagtgggcaggtggcaccgggggtcagcatgcaggggcgccagaggcccaggctgctggccggacagtcaccctctgttctcgctacatcccttgccccctgtccatttatttaagcccccataggtgcccttcacccccaaaaccagctgtacagaatctttgatacagacctatttgctaggggtgctgccggggatttggggtcagcatctggccccctatctcctgaccagctgagtcatgaggccggtttctctctctctcccacttttgtcccccagccaagctctaaagcacatgtagccgctgagacctgctgtttctgctgggggcaggctcctcttcccccagccccgggagcctcccccagcttcctgcagccccgacctctcaggttagaccctgggccctggagcttaggggattctccccaccccagccccacacctgctccttccctaatgctttgaggttttcttggttggaagctgcagctggcccaagaaagaaaataaaaaacaacacttttg

SEQ ID NO: 378194 - DNA, 1757 bp, Homo sapiens
gtcacgtggttcctggccgcaagcgacgcgcgccggtgcgacgtcaacgcagccgggcgagttttaccgatctgtgttccgcggcccggccgcggctgagtcttcccagggtcagggtcaggcgctttgctgagtccctttgtggccgccatggacaattccgggaaggaagcggaggcgatggcgctgttggccgaggcggagcgcaaagtgaagaactcgcagtccttcttctctggcctctttggaggctcatccaaaatagaggaagcatgcgaaatctacgccagagcagcaaacatgttcaaaatggccaaaaactggagtgctgctggaaacgcgttctgccaggctgcacagctgcacctgcagctccagagcaagcacgacgcagccacctgctttgtggacgctggcaacgcattcaagaaagccgacccccaagaggccattaactgtttgatgcgagcaatcgagatctacacagacatgggccgattcacgattgcggccaagcaccacatctccattgctgagatctatgagacagagttggtggacatcgagaaggccattgcccactacgagcagtctgcagactactacaaaggcgaggagtccaacaggtagcccccttcctgcctgccccagccccgcagggaccgccaccacttcccctcactactcctccccacacagctcagccaacaagtgtctgctgaaggtggctggttacgctgcgctgctggagcagtatcagaaggccattgacatctacgaacaggtggggaccaatgccatggacagccccctcctcaagtacagcgccaaagactacttcttcaaggcggccctctgccacttctgcatcgacatgctcaacgccaagctggctgtccaaaagtatgaggagctgttcccagctttctctgattcccgggaatgcaagttgatgaaaaaattgctagaggcccacgaggagcagaatgtggacagctacaccgagtcggtgaaggaatacgactccatctcccggctggaccagtggctcaccaccatgctgctgcgcatcaagaagaccatccagggcgatgaggaggacctgcgctaagccccacccagccccccagtgcccgtcttcctgtcccatctgctcagagagaggtggggccgagacttgctggagagcttccctcctttcccatctggggagtcccgcgggccacagtgggcaggtggcaccgggggtcagcatgcaggggcgccagaggcccaggctgctggccggacagtcaccctctgttctcgctacatcccttgccccctgtccatttatttaagcccccataggtgcccttcacccccaaaaccagctgtacagaatctttgatacagacctatttgctaggggtgctgccggggatttggggtcagcatctggccccctatctcctgaccagctgagtcatgaggccggtttctctctctctcccacttttgtcccccagccaagctctaaagcacatgtagccgctgagacctgctgtttctgctgggggcaggctcctcttcccccagccccgggagcctcccccagcttcctgcagccccgacctctcaggttagaccctgggccctggagcttaggggattctccccaccccagccccacacctgctccttccctaatgctttgaggttttcttggttggaagctgcagctggcccaagaaagaaaataaaaaacaacacttttg

SEQ ID NO: 378195 - DNA, 1705 bp, Homo sapiens
gtcacgtggttcctggccgcaagcgacgcgcgccggtgcgacgtcaacgcagccgggcgagttttaccgatctgtgttccgcggcccggccgcggctgagtcttcccagggtcagggtcaggcgctttgctgagtccctttgtggccgccatggacaattccgggaaggaagcggaggcgatggcgctgttggccgaggcggagcgcaaagtgaagaactcgcagtccttcttctctggcctctttggaggctcatccaaaatagaggaagcatgcgaaatctacgccagagcagcaaacatgttcaaaatggccaaaaactggagtgctgctggaaacgcgttctgccaggctgcacagctgcacctgcagctccagagcaagcacgacgcagccacctgctttgtggacgctggcaacgcattcaagaaagccgacccccaagaggccattaactgtttgatgcgagcaatcgagatctacacagacatgggccgattcacgattgcggccaagcaccacatctccattgctgagatctatgagacagagttggtggacatcgagaaggccattgcccactacgagcagtctgcagactactacaaaggcgaggagtccaacaggtagcccccttcctgcctgccccagccccgcagggaccgccaccacttcccctcactactcctccccacacagctcagccaacaagtgtctgctgaaggtggtcgtcggccattgacatctacgaacagtggacaagcctcatacagcgccaaagactacttcttcaaggcggccctctgccacttctgcatcgacatgctcaacgccaagctggctgtccaaaagtatgaggagctgttcccagctttctctgattcccgggaatgcaagttgatgaaaaaattgctagaggcccacgaggagcagaatgtggacagctacaccgagtcggtgaaggaatacgactccatctcccggctggaccagtggctcaccaccatgctgctgcgcatcaagaagaccatccagggcgatgaggaggacctgcgctaagccccacccagccccccagtgcccgtcttcctgtcccatctgctcagagagaggtggggccgagacttgctggagagcttccctcctttcccatctggggagtcccgcgggccacagtgggcaggtggcaccgggggtcagcatgcaggggcgccagaggcccaggctgctggccggacagtcaccctctgttctcgctacatcccttgccccctgtccatttatttaagcccccataggtgcccttcacccccaaaaccagctgtacagaatctttgatacagacctatttgctaggggtgctgccggggatttggggtcagcatctggccccctatctcctgaccagctgagtcatgaggccggtttctctctctctcccacttttgtcccccagccaagctctaaagcacatgtagccgctgagacctgctgtttctgctgggggcaggctcctcttcccccagccccgggagcctcccccagcttcctgcagccccgacctctcaggttagaccctgggccctggagcttaggggattctccccaccccagccccacacctgctccttccctaatgctttgaggttttcttggttggaagctgcagctggcccaagaaagaaaataaaaaacaacacttttg

SEQ ID NO: 378196 - DNA, 1449 bp, Homo sapiens
catccacagtgggagggagggagtgtcacatggggtccccccagcgtgcacggagccctgggtgatggccgagaaaaaggcaggcagctggccccctgggagagaggggcgggcgccgcctctcatgttcccaccgcctgccgccgctctgcccaccgccatgccagcctcccgttggtcctgacagccaggctgcctccttcccactgtctcaggctctcagaaggcccacgaacacctggctacagcctccacccccacccagccaccatcacaccctgatcttggtcgctcacgcactggccgctgacctctccaagctggtccctggctccctgcccttggggtcctgggttaacagggcctcacctcgggacatgaaccagctcccagctggccccccagtgcctggcagtggctctggccctctggctgcttgccctgagctcaccagtgccacttctccatggctacaggtggggaccaatgccatggacagccccctcctcaagtacagcgccaaagactacttcttcaaggcggccctctgccacttctgcatcgacatgctcaacgccaagctggctgtccaaaagtatgaggagctgttcccagctttctctgattcccgggaatgcaagttgatgaaaaaattgctagaggcccacgaggagcagaatgtggacagctacaccgagtcggtgaaggaatacgactccatctcccggctggaccagtggctcaccaccatgctgctgcgcatcaagaagaccatccagggcgatgaggaggacctgcgctaagccccacccagccccccagtgcccgtcttcctgtcccatctgctcagagagaggtggggccgagacttgctggagagcttccctcctttcccatctggggagtcccgcgggccacagtgggcaggtggcaccgggggtcagcatgcaggggcgccagaggcccaggctgctggccggacagtcaccctctgttctcgctacatcccttgccccctgtccatttatttaagcccccataggtgcccttcacccccaaaaccagctgtacagaatctttgatacagacctatttgctaggggtgctgccggggatttggggtcagcatctggccccctatctcctgaccagctgagtcatgaggccggtttctctctctctcccacttttgtcccccagccaagctctaaagcacatgtagccgctgagacctgctgtttctgctgggggcaggctcctcttcccccagccccgggagcctcccccagcttcctgcagccccgacctctcaggttagaccctgggccctggagcttaggggattctccccaccccagccccacacctgctccttccctaatgctttgaggttttcttggttggaagctgcagctggcccaagaaagaaaataaaaaacaacacttttg

SEQ ID NO: 378197 - DNA, 969 bp, Homo sapiens
  misc_feature (824)..(824): n is a, c, g, or t
  misc_feature (840)..(840): n is a, c, g, or t
  misc_feature (843)..(843): n is a, c, g, or t
gtcacgtggttcctggccgcaagcgacgcgcgccggtgcgacgtcaacgcagccgggcgagttttaccgatctgtgttccgcggcccggccgcggctgagtcttcccagggtcagggtcaggcgctttgctgagtccctttgtggccgccatggacaattccgggaaggaagcggaggcgatggcgctgttggccgaggcggagcgcaaagtgaagaactcgcagtccttcttctctggcctctttggaggctcatccaaaatagaggaagcatgcgaaatctacgccagagcagcaaacatgttcaaaatggccaaaaactggagtgctgctggaaacgcgttctgccaggctgcacagctgcacctgcagctccagagcaagcacgacgcagccacctgctttgtggacgctggcaacgcattcaagaaagccgacccccaagaggccattaactgtttgatgcgagcaatcgagatctacacagacatgggccgattcacgattgcggccaagcaccacatctccattgctgagatctatgagacagagttggtggacatcgagaaggccattgcccactacgagcagtctgcagactactacaaaggcgaggagtccaacagctcagccaacaagtgtctgctgaaggtggctggttacgctgcgctgctggagcagtatcagaaggccattgacatctacgaacaggtggggaccaatgccatggacagccccctcctcaagtacagcgccaaagactacttcttcaaggcggccctctgccacttctgcatcgacatgctcaacgccaagtggtgtcnaagtgggagtgtccanttnctgtcccggatgagtgtgaaaatgtgagcgagggatgggaggtaccgggcgaggaaaacctccggggccggccccgtggggctcaaaacccgggggcggggccccccggggtttctttaagggggt

SEQ ID NO: 378198 - DNA, 680 bp, Homo sapiens
gtcacgtggttcctggccgcaagcgacgcgcgccggtgcgacgtcaacgcagccgggcgagttttaccgatctgtgttccgcggcccggccgcggctgagtcttcccagggtcagggtcaggcgctttgctgagtccctttgtggccgccatggacaattccgggaaggaagcggaggcgatggcgctgttggccgaggcggagcgcaaagtgaagaactcgcagtccttcttctctggcctctttggaggctcatccaaaatagaggaagcatgcgaaatctacgccagagcagcaaacatgttcaaaatggccaaaaactggagtgctgctggaaacgcgttctgccaggctgcacagctgcacctgcagctccagagcaagcacgacgcagccacctgctttgtggacgctggcaacgcattcaagaaagccgacccccaagaggccattaactgtttgatgcgagcaatcgagatctacacagacatgggccgattcacgattgcggccaagcaccacatctccattgctgagatctatgagacagagttggtggacatcgagaaggtgagtggcagcagggccctgcatgggctggcagccaggaccagtgctgctctctcttcttcccaccaggggagtcctctggtgtctgagtgccgagaagggggcatggg

SEQ ID NO: 378199 - DNA, 677 bp, Homo sapiens
gtcacgtggttcctggccgcaagcgacgcgcgccggtgcgacgtcaacgcagccgggcgagttttaccgatctgtgttccgcggcccggccgcggctgagtcttcccagggtcagggtcaggcgctttgctgagtccctttgtggccgccatggacaattccgggaaggaagcggaggcgatggcgctgttggccgaggcggagcgcaaagtgaagaactcgcagtccttcttctctggcctctttggaggccattaactgtttgatgcgagcaatcgagatctacacagacatgggccgattcacgattgcggccaagcaccacatctccattgctgagatctatgagacagagttggtggacatcgagaaggccattgcccactacgagcagtctgcagactactacaaaggcgaggagtccaacaggtagcccccttcctgcctgccccagccccgcagggaccgccaccacttcccctcactactcctccccacacagctcagccaacaagtgtctgctgaaggtggctggttacgctgcgctgctggagcagtatcagaaggccattgacatctacgaacaggtggggacaggtggggatggcggcttccaccctgccccctctcagggcctgtgcctcctcctaagccccggcaccttgttctggaaccac

SEQ ID NO: 378200 - DNA, 439 bp, Homo sapiens
accctggggttgtggtggggtcaggaactcttcgccccactaccccagcaagcacccagtatctaccccagtactcccggagggagctggtctgcccgaagtgagtgtgccattgtatgcaggggcgggggccacagactcaagaggcctgggggaagctggcttcacaggtgaagggtgaggggtaggggcacgtctgtgcccggcactggagcagaatgcttgctttctcctggatagccgactagattgtctcctttttttctttcctttttccccagaggctcatccaaaatagaggaagcatgcgaaatctacgccagagcagcaaacatgttcaaaatggccaaaaactggagtggtatgtcatctccgctagagctcctccaaggtgctctcctcctccctcagcttccactcacacaggcctgcccgagag

SEQ ID NO: 378201 - DNA, 1865 bp, Homo sapiens
agcgcgacccgacagcctgggaaacggacagccgtgtcagaagggcaggtgccagtgggcaggaggccggagagaaagccgcagcttccttccacctcgcgccgggcccgcggccgcgcacggggaccgctccgagttcctcccggcgggaaccccccgccccagaactttggtctcgtcccacccacccccgcccgcgccatggtctcgccctagggagccatcgataactctacgctcggcctcgatcgactcgctccggctcccctcgccgtcctggacacggcggagtgcggagccgcccgtaagatgctctgacctttgacccctgccgttcagctctagggcccgtgcaggccacaccatgaacacctccccaggcacggtgggcagtgacccggtcatcctggccactgcaggctacgaccacaccgtgcgcttctggcaggcccacagcggcatctgcacccggacggtgcagcaccaggactcccaggtgaatgccttggaggtcacaccggaccgcagcatgattgctgctgcaggttaccagcacatccgcatgtatgatctcaactccaataaccctaaccccatcatcagctacgacggcgtcaacaagaacatcgcgtctgtgggcttccacgaagacggccgctggatgtacacgggcggcgaggactgcacagccaggatctgggacctcaggtcccggaacctgcagtgccagcggatcttccaggtgaacgcacccattaactgcgtgtgcctgcaccccaaccaggcagagctcatcgtgggtgaccagagcggggctatccacatctgggacttgaaaacagaccacaacgagcagctgatccctgagcccgaggtctccatcacgtccgcccacatcgatcccgacgccagctacatggcagctgtcaatagcaccggaaactgctatgtctggaatctgacggggggcattggtgacgaggtgacccagctcatccccaagactaagatccctgcccacacgcgctacgccctgcagtgtcgcttcagccccgactccacgctcctcgccacctgctcggctgatcagacgtgcaagatctggaggacgtccaacttctccctgatgacggagctgagcatcaagagcggcaaccccggggagtcctcccgcggctggatgtggggctgcgccttctcgggggactcccagtacatcgtcactgcttcctcggacaacctggcccggctctggtgtgtggagactggagagatcaagagagagtatggcggccaccagaaggctgttgtctgcctggccttcaatgacagtgtgctgggctagcctgtgacccctcgggactgcctggtgcaggtggtggcagctggagggacccatgcagcacccaggtcagagcagaccctcccctgccggcctgcgccagctggacctgatggccccctgtggcgccttgacctgctgggccaggctgccctgggactctcagcccccagttgcttatccagatgtgacagagctcgacccaagccaggctgcacactcctggactgggctagcctgcactgcctgggaaagtcggccgagggcccaaagctgctgaggggtctgaggctggtgcccacccccaagctagtgtgttctctgcccctccctgcccgcgtttcagggcctcggtccatagagaacaccaccaccatggccaggtggaagggtttattagtccctgccagcagctgtcctccctggtgcaggtggcctggccagcccactggattggggacgggccaggctgggccaggtcgggggctcagtctgggaggtaataaaagcagaccgacacgca

SEQ ID NO: 378202 - DNA, 1546 bp, Homo sapiens
cttgcgcacgcgcagcccgcccctgcggcagagtggcgcccgcgcgtgactcccccctgccggctgcggaggtgggggggggacggcgcccccgccgtgtgcgtggggcggggatggagcacgcgccctggagccccggagccagctctagggcccgtgcaggccacaccatgaacacctccccaggcacggtgggcagtgacccggtcatcctggccactgcaggctacgaccacaccgtgcgcttctggcaggcccacagcggcatctgcacccggacggtgcagcaccaggactcccaggtgaatgccttggaggtcacaccggaccgcagcatgattgctgctgcaggttaccagcacatccgcatgtatgatctcaactccaataaccctaaccccatcatcagctacgacggcgtcaacaagaacatcgcgtctgtgggcttccacgaagacggccgctggatgtacacgggcggcgaggactgcacagccaggatctgggacctcaggtcccggaacctgcagtgccagcggatcttccaggtgaacgcacccattaactgcgtgtgcctgcaccccaaccaggcagagctcatcgtgggtgaccagagcggggctatccacatctgggacttgaaaacagaccacaacgagcagctgatccctgagcccgaggtctccatcacgtccgcccacatcgatcccgacgccagctacatggcagctgtcaatagcaccgctcctcgccacctgctcggctgatcagacgtgcaagatctggaggacgtccaacttctccctgatgacggagctgagcatcaagagcggcaaccccggggagtcctcccgcggctggatgtggggctgcgccttctcgggggactcccagtacatcgtcactgcttcctcggacaacctggcccggctctggtgtgtggagactggagagatcaagagagagtatggcggccaccagaaggctgttgtctgcctggccttcaatgacagtgtgctgggctagcctgtgacccctcgggactgcctggtgcaggtggtggcagctggagggacccatgcagcacccaggtcagagcagaccctcccctgccggcctgcgccagctggacctgatggccccctgtggcgccttgacctgctgggccaggctgccctgggactctcagcccccagttgcttatccagatgtgacagagctcgacccaagccaggctgcacactcctggactgggctagcctgcactgcctgggaaagtcggccgagggcccaaagctgctgaggggtctgaggctggtgcccacccccaagctagtgtgttctctgcccctccctgcccgcgtttcagggcctcggtccatagagaacaccaccaccatggccaggtggaagggtttattagtccctgccagcagctgtcctccctggtgcaggtggcctggccagcccactggattggggacgggccaggctgggccaggtcgggggctcagtctgggaggtaataaaagcagaccgacacgca

SEQ ID NO: 378203 - DNA, 660 bp, Homo sapiens
ggccagcaggcctggttaaatcttcctcggacaacctggcccggctctggtgtgtggagactggagagatcaagagagagtatggcggccaccagaaggctgttgtctgcctggccttcaatgacagtgtgctgggctagcctgtgacccctcgggactgcctggtgcaggtggtggcagctggagggacccatgcagcacccaggtcagagcagaccctcccctgccggcctgcgccagctggacctgatggccccctgtggcgccttgacctgctgggccaggctgccctgggactctcagcccccagttgcttatccagatgtgacagagctcgacccaagccaggctgcacactcctggactgggctagcctgcactgcctgggaaagtcggccgagggcccaaagctgctgaggggtctgaggctggtgcccacccccaagctagtgtgttctctgcccctccctgcccgcgtttcagggcctcggtccatagagaacaccaccaccatggccaggtggaagggtttattagtccctgccagcagctgtcctccctggtgcaggtggcctggccagcccactggattggggacgggccaggctgggccaggtcgggggctcagtctgggaggtaataaaagcagaccgacacgca

SEQ ID NO: 378204 - DNA, 458 bp, Homo sapiens
agcgcgacccgacagcctgggaaacggacagccgtgtcagaagggcaggtgccagtgggcaggaggccggagagaaagccgcagcttccttccacctcgcgccgggcccgcggccgcgcacggggaccgctccgagttcctcccggcgggaaccccccgccccagaactttggtctcgtcccacccacccccgcccgcgccatggtctcgccctagggagccatcgataactctacgctcggcctcgatcgactcgctccggctcccctcgccgtcctggacacggcggagtgcggagccgcccgtaaggtacggaggccgcgagccaggggccgggaaccggctgctgggtggctgggagagcacggccaggggaagccggccagcaggacggagcaagggcggtcaccggaggaaaggggagctcgggggtccagccagactgcgccctttcccat

SEQ ID NO: 378205 - DNA, 1758 bp, Homo sapiens
taacgagcttacggccgcacgcgacactttgtgcgttagtcgtccgcaacactttctgtgccactgcacgcgggcccacgtgcggcagagtggcgcccgcgcgtgactcccccctgccggctgcggaggtgggggggggacggcgcccccgccgtgtgcgtggggcggggatggagcacgcgccctggagccccggagccagatgctctgacctttgacccctgccgttcagctctagggcccgtgcaggccacaccatgaacacctccccaggcacggtgggcagtgacccggtcatcctggccactgcaggctacgaccacaccgtgcgcttctggcaggcccacagcggcatctgcacccggacggtgcagcaccaggactcccaggtgaatgccttggaggtcacaccggaccgcagcatgattgctgctgcaggttaccagcacatccgcatgtatgatctcaactccaataaccctaaccccatcatcagctacgacggcgtcaacaagaacatcgcgtctgtgggcttccacgaagacggccgctggatgtacacgggcggcgaggactgcacagccaggatctgggacctcaggtcccggaacctgcagtgccagcggatcttccaggtgaacgcacccattaactgcgtgtgcctgcaccccaaccaggcagagctcatcgtgggtgaccagagcggggctatccacatctgggacttgaaaacagaccacaacgagcagctgatccctgagcccgaggtctccatcacgtccgcccacatcgatcccgacgccagctacatggcagctgtcaatagcaccggaaactgctatgtctggaatctgacggggggcattggtgacgaggtgacccagctcatccccaagactaagatccctgcccacacgcgctacgccctgcagtgtcgcttcagccccgactccacgctcctcgccacctgctcggctgatcagacgtgcaagatctggaggacgtccaacttctccctgatgacggagctgagcatcaagagcggcaaccccggggagtcctcccgcggctggatgtggggctgcgccttctcgggggactcccagtacatcgtcactgcttcctcggacaacctggcccggctctggtgtgtggagactggagagatcaagagagagtatggcggccaccagaaggctgttgtctgcctggccttcaatgacagtgtgctgggctagcctgtgacccctcgggactgcctggtgcaggtggtggcagctggagggacccatgcagcacccaggtcagagcagaccctcccctgccggcctgcgccagctggacctgatggccccctgtggcgccttgacctgctgggccaggctgccctgggactctcagcccccagttgcttatccagatgtgacagagctcgacccaagccaggctgcacactcctggactgggctagcctgcactgcctgggaaagtcggccgagggcccaaagctgctgaggggtctgaggctggtgcccacccccaagctagtgtgttctctgcccctccctgcccgcgtttcagggcctcggtccatagagaacaccaccaccatggccaggtggaagggtttattagtccctgccagcagctgtcctccctggtgcaggtggcctggccagcccactggattggggacgggccaggctgggccaggtcgggggctcagtctgggaggtaataaaagcagaccgacacgca

SEQ ID NO: 378206 - DNA, 1701 bp, Homo sapiens
cttgcgcacgcgcagcccgcccctgcggcagagtggcgcccgcgcgtgactcccccctgccggctgcggaggtgggggggggacggcgcccccgccgtgtgcgtggggcggggatggagcacgcgccctggagccccggagccagatgctctgacctttgacccctgccgttcagctctagggcccgtgcaggccacaccatgaacacctccccaggcacggtgggcagtgacccggtcatcctggccactgcaggctacgaccacaccgtgcgcttctggcaggcccacagcggcatctgcacccggacggtgcagcaccaggactcccaggtgaatgccttggaggtcacaccggaccgcagcatgattgctgctgcaggttaccagcacatccgcatgtatgatctcaactccaataaccctaaccccatcatcagctacgacggcgtcaacaagaacatcgcgtctgtgggcttccacgaagacggccgctggatgtacacgggcggcgaggactgcacagccaggatctgggacctcaggtcccggaacctgcagtgccagcggatcttccaggtgaacgcacccattaactgcgtgtgcctgcaccccaaccaggcagagctcatcgtgggtgaccagagcggggctatccacatctgggacttgaaaacagaccacaacgagcagctgatccctgagcccgaggtctccatcacgtccgcccacatcgatcccgacgccagctacatggcagctgtcaatagcaccggaaactgctatgtctggaatctgacggggggcattggtgacgaggtgacccagctcatccccaagactaagatccctgcccacacgcgctacgccctgcagtgtcgcttcagccccgactccacgctcctcgccacctgctcggctgatcagacgtgcaagatctggaggacgtccaacttctccctgatgacggagctgagcatcaagagcggcaaccccggggagtcctcccgcggctggatgtggggctgcgccttctcgggggactcccagtacatcgtcactgcttcctcggacaacctggcccggctctggtgtgtggagactggagagatcaagagagagtatggcggccaccagaaggctgttgtctgcctggccttcaatgacagtgtgctgggctagcctgtgacccctcgggactgcctggtgcaggtggtggcagctggagggacccatgcagcacccaggtcagagcagaccctcccctgccggcctgcgccagctggacctgatggccccctgtggcgccttgacctgctgggccaggctgccctgggactctcagcccccagttgcttatccagatgtgacagagctcgacccaagccaggctgcacactcctggactgggctagcctgcactgcctgggaaagtcggccgagggcccaaagctgctgaggggtctgaggctggtgcccacccccaagctagtgtgttctctgcccctccctgcccgcgtttcagggcctcggtccatagagaacaccaccaccatggccaggtggaagggtttattagtccctgccagcagctgtcctccctggtgcaggtggcctggccagcccactggattggggacgggccaggctgggccaggtcgggggctcagtctgggaggtaataaaagcagaccgacacgca

SEQ ID NO: 378207 - DNA, 1738 bp, Homo sapiens
aaacggctggtacgccggaattagggatcatcacgcgtgtgacgcgtgtccctgaacctacctgcgcttcttgtcccaactctaaaatgggaatgataagcgccattcggcagcgccttgtgggtctataatctacttagcacagagagtgtcttctaagtacttcacatccttctctgcagatgctctgacctttgacccctgccgttcagctctagggcccgtgcaggccacaccatgaacacctccccaggcacggtgggcagtgacccggtcatcctggccactgcaggctacgaccacaccgtgcgcttctggcaggcccacagcggcatctgcacccggacggtgcagcaccaggactcccaggtgaatgccttggaggtcacaccggaccgcagcatgattgctgctgcaggttaccagcacatccgcatgtatgatctcaactccaataaccctaaccccatcatcagctacgacggcgtcaacaagaacatcgcgtctgtgggcttccacgaagacggccgctggatgtacacgggcggcgaggactgcacagccaggatctgggacctcaggtcccggaacctgcagtgccagcggatcttccaggtgaacgcacccattaactgcgtgtgcctgcaccccaaccaggcagagctcatcgtgggtgaccagagcggggctatccacatctgggacttgaaaacagaccacaacgagcagctgatccctgagcccgaggtctccatcacgtccgcccacatcgatcccgacgccagctacatggcagctgtcaatagcaccggaaactgctatgtctggaatctgacggggggcattggtgacgaggtgacccagctcatccccaagactaagatccctgcccacacgcgctacgccctgcagtgtcgcttcagccccgactccacgctcctcgccacctgctcggctgatcagacgtgcaagatctggaggacgtccaacttctccctgatgacggagctgagcatcaagagcggcaaccccggggagtcctcccgcggctggatgtggggctgcgccttctcgggggactcccagtacatcgtcactgcttcctcggacaacctggcccggctctggtgtgtggagactggagagatcaagagagagtatggcggccaccagaaggctgttgtctgcctggccttcaatgacagtgtgctgggctagcctgtgacccctcgggactgcctggtgcaggtggtggcagctggagggacccatgcagcacccaggtcagagcagaccctcccctgccggcctgcgccagctggacctgatggccccctgtggcgccttgacctgctgggccaggctgccctgggactctcagcccccagttgcttatccagatgtgacagagctcgacccaagccaggctgcacactcctggactgggctagcctgcactgcctgggaaagtcggccgagggcccaaagctgctgaggggtctgaggctggtgcccacccccaagctagtgtgttctctgcccctccctgcccgcgtttcagggcctcggtccatagagaacaccaccaccatggccaggtggaagggtttattagtccctgccagcagctgtcctccctggtgcaggtggcctggccagcccactggattggggacgggccaggctgggccaggtcgggggctcagtctgggaggtaataaaagcagaccgacacgca

SEQ ID NO: 378208 - DNA, 1587 bp, Homo sapiens
gtacggtccggaatcctggatcgcccgtaagatgctctgacctttgacccctgccgttcagctctagggcccgtgcaggccacaccatgaacacctccccaggcacggtgggcagtgacccggtcatcctggccactgcaggctacgaccacaccgtgcgcttctggcaggcccacagcggcatctgcacccggacggtgcagcaccaggactcccaggtgaatgccttggaggtcacaccggaccgcagcatgattgctgctgcaggttaccagcacatccgcatgtatgatctcaactccaataaccctaaccccatcatcagctacgacggcgtcaacaagaacatcgcgtctgtgggcttccacgaagacggccgctggatgtacacgggcggcgaggactgcacagccaggatctgggacctcaggtcccggaacctgcagtgccagcggatcttccaggtgaacgcacccattaactgcgtgtgcctgcaccccaaccaggcagagctcatcgtgggtgaccagagcggggctatccacatctgggacttgaaaacagaccacaacgagcagctgatccctgagcccgaggtctccatcacgtccgcccacatcgatcccgacgccagctacatggcagctgtcaatagcaccggaaactgctatgtctggaatctgacggggggcattggtgacgaggtgacccagctcatccccaagactaagatccctgcccacacgcgctacgccctgcagtgtcgcttcagccccgactccacgctcctcgccacctgctcggctgatcagacgtgcaagatctggaggacgtccaacttctccctgatgacggagctgagcatcaagagcggcaaccccggggagtcctcccgcggctggatgtggggctgcgccttctcgggggactcccagtacatcgtcactgcttcctcggacaacctggcccggctctggtgtgtggagactggagagatcaagagagagtatggcggccaccagaaggctgttgtctgcctggccttcaatgacagtgtgctgggctagcctgtgacccctcgggactgcctggtgcaggtggtggcagctggagggacccatgcagcacccaggtcagagcagaccctcccctgccggcctgcgccagctggacctgatggccccctgtggcgccttgacctgctgggccaggctgccctgggactctcagcccccagttgcttatccagatgtgacagagctcgacccaagccaggctgcacactcctggactgggctagcctgcactgcctgggaaagtcggccgagggcccaaagctgctgaggggtctgaggctggtgcccacccccaagctagtgtgttctctgcccctccctgcccgcgtttcagggcctcggtccatagagaacaccaccaccatggccaggtggaagggtttattagtccctgccagcagctgtcctccctggtgcaggtggcctggccagcccactggattggggacgggccaggctgggccaggtcgggggctcagtctgggaggtaataaaagcagaccgacacgca

SEQ ID NO: 378209 - DNA, 1758 bp, Homo sapiens
  misc_feature (1695)..(1695): n is a, c, g, or t
atgagtgggaggtgaggacgtggaactagaaaaatgggagccatcgataactctacgctcggcctcgatcgactcgctccggctcccctcgccgtcctggacacggcggagtgcggagccgcccgtaagatgctctgacctttgacccctgccgttcagctctagggcccgtgcaggccacaccatgaacacctccccaggcacggtgggcagtgacccggtcatcctggccactgcaggctacgaccacaccgtgcgcttctggcaggcccacagcggcatctgcacccggacggtgcagcaccaggactcccaggtgaatgccttggaggtcacaccggaccgcagcatgattgctgctgcaggttaccagcacatccgcatgtatgatctcaactccaataaccctaaccccatcatcagctacgacggcgtcaacaagaacatcgcgtctgtgggcttccacgaagacggccgctggatgtacacgggcggcgaggactgcacagccaggatctgggacctcaggtcccggaacctgcagtgccagcggatcttccaggtgaacgcacccattaactgcgtgtgcctgcaccccaaccaggcagagctcatcgtgggtgaccagagcggggctatccacatctgggacttgaaaacagaccacaacgagcagctgatccctgagcccgaggtctccatcacgtccgcccacatcgatcccgacgccagctacatggcagctgtcaatagcaccggaaactgctatgtctggaatctgacggggggcattggtgacgaggtgacccagctcatccccaagactaagatccctgcccacacgcgctacgccctgcagtgtcgcttcagccccgactccacgctcctcgccacctgctcggctgatcagacgtgcaagatctggaggacgtccaacttctccctgatgacggagctgagcatcaagagcggcaaccccggggagtcctcccgcggctggatgtggggctgcgccttctcgggggactcccagtacatcgtcactgcttcctcggacaacctggcccggctctggtgtgtggagactggagagatcaagagagagtatggcggccaccagaaggctgttgtctgcctggccttcaatgacagtgtgctgggctagcctgtgacccctcgggactgcctggtgcaggtggtggcagctggagggacccatgcagcacccaggtcagagcagaccctcccctgccggcctgcgccagctggacctgatggccccctgtggcgccttgacctgctgggccaggctgccctgggactctcagcccccagttgcttatccagatgtgacagagctcgacccaagccaggctgcacactcctggactgggctagcctgcactgcctgggaaagtcggccgagggcccaaagctgctgaggggtctgaggctggtgcccacccccaagctagtgtgttctctgcccctccctgcccgcgtttcagggcctcggtccatagagaacaccaccaccatggccaggtggaagggtttattagtccctgccagcagctgtcctccctggtgcaggtggcctggccagcccactggattggggacgggccaggctgggccaggtcgggggctcagtctgggaggtaataaaagcagaccgacacgcaaaaaaaaaanaaacacacaacaacaaaaaacaacaaccaaccacaaccaaaaagcggggccccactacaaaac

SEQ ID NO: 378210 - DNA, 2659 bp, Homo sapiens
atgagtgggaggtgaggacgtggaactagaaaaatgggagccatcgataactctacgctcggcctcgatcgactcgctccggctcccctcgccgtcctggacacggcggagtgcggagccgcccgtaagatgctctgacctttgacccctgccgttcagctctagggcccgtgcaggccacaccatgaacacctccccaggcacggtgggcagtgacccggtcatcctggccactgcaggctacgaccacaccgtgcgcttctggcaggcccacagcggcatctgcacccggacggtgcagcaccaggactcccaggtgaatgccttggaggtcacaccggaccgcagcatgattgctgctgcaggttaccagcacatccgcatgtatgatctcaactccaataaccctaaccccatcatcagctacgacggcgtcaacaagaacatcgcgtctgtgggcttccacgaagacggccgctggatgtacacgggcggcgaggactgcacagccaggatctgggacctcaggtcccggaacctgcagtgccagcggatcttccaggtgaacgcacccattaactgcgtgtgcctgcaccccaaccaggcagagctcatcgtgggtgaccagagcggggctatccacatctgggacttgaaaacagaccacaacgagcagctgatccctgagcccgaggtctccatcacgtccgcccacatcgatcccgacgccagctacatggcagctgtcaatagcaccggaaactgctatgtctggaatctgacggggggcattggtgacgaggtgacccagctcatccccaagactaagatccctgcccacacgcgctacgccctgcagtgtcgcttcagccccgactccacgctcctcgccacctgctcggctgatcagacgtgcaagatctggaggacgtccaacttctccctgatgacggagctgagcatcaagagcggcaaccccggggagtcctcccgcggctggatgtggggctgcgccttctcgggggactcccagtacatcgtcactgcttcctcggacaacctggcccggctctggtgtgtggagactggagagatcaagagagagtatggcggccaccagaaggctgttgtctgcctggccttcaatgacagtgtgctgggctagcctgtgacccctcgggactgcctggtgcaggtggtggcagctggagggacccatgcagcacccaggtcagagcagaccctcccctgccggcctgcgccagctggacctgatggccccctgtggcgccttgacctgctgggccaggctgccctgggactctcagcccccagttgcttatccagatgtgacagagctcgacccaagccaggctgcacactcctggactgggctagcctgcactgcctgggaaagtcggccgagggcccaaagctgctgaggggtctgaggctggtgcccacccccaagctagtgtgttctctgcccctccctgcccgcgtttcagggcctcggtccatagagaacaccaccaccatggccaggtggaagggtttattagtccctgccagcagctgtcctccctggtgcaggtggcctggccagcccactggattggggacgggccaggctgggccaggtcgggggctcagtctgggaggtaataaaagcagaccgacacgcaaaaaaaaaaaaaaaaaaaaaaaaaaaaaaaaaaacaaaaaaaaaaaaaaaaacaaaaaagaaaacaaagagaaacaaaaaaaacaaaaaaaaaaaagaaaaaaaaaaagaaaaaaaacaaaagaaaaaccaaacaaacacaggacacaacacaaaaaacaccacacaaagacagacaaacaaaaaatagaagggagggggcccgcccgcatacctcccctgcgggcgcgaggcaccacacggcgccagccacaatgtggggcaggagccccggcgaggggtaataactaacaatataggcaaggcacgccacgcggcggtatctaaacacaccggctggctggagtactaacaccactacgagtcagatcacggttatattaagtacggaaccacacccactacatttgtggcgtggggggagtcaaccatattcatccgacacatgccctcacaaagacaattcgtaccgacacgccacgactagttagcatgatctacaacacatttctacagtcgcttgtctgagtgataacacccacccgtactatctgcttcctgctagacaaataattcttgggtcaccagtagctatcagcgtcagtaacaaaacttacggtcgcgcgcgcggggctgggatcttatctcagttagtaggcctgccaagtagaagtatgcaaggatactgaacatgaacgattctacagaaaacaaacttgtgaagagaatgaacattcaaacgcgcaaggcgaaatcgagaatgaagagcacgatgaagcaaatacaaaaaaacacagactataataccgacaaaagaagtcgaaccaacctccacaacacggacgaagaaagaagcgcaaaagcaatacaccttaccgaagaaggaatgacgaagacgagtaaaatcacaggagacgacagacaatgtgccagtacgataacgtgaacataaggaactacagatagagatggagg

SEQ ID NO: 378211 - DNA, 2013 bp, Homo sapiens
cttgcgcacgcgcagcccgcccctgcggcagagtggcgcccgcgcgtgactcccccctgccggctgcggaggtgggggggggacggcgcccccgccgtgtgcgtggggcggggatggagcacgcgccctggagccccggagccagatgctctgacctttgacccctgccgttcagctctagggcccgtgcaggccacaccatgaacacctccccaggcacggtgggcagtgacccggtcatcctggccactgcaggctacgaccacaccgtgcgcttctggcaggcccacagcggcatctgcacccggacggtgcagcaccaggactcccaggtgaatgccttggaggtcacaccggaccgcagcatgattgctgctgcaggttaccagcacatccgcatgtatgatctcaactccaataaccctaaccccatcatcagctacgacggcgtcaacaagaacatcgcgtctgtgggcttccacgaagacggccgctggatgtacacgggcggcgaggactgcacagccaggatctgggacctcaggttgggttctcttcaagcagaggctgagacagggagcttcctgtgggcgacttactgagagaagtgaggacaggaggagagtgaattgcatcagagcgcgagtcctgccttgagcccggagccagcttgttattccccttccaccagccactggcttaggctccctgctggagcagagggccctgcgtcccaagtatttcccaagaggcaggtccttcagcagagggaggggaggaatggccaggccgaggccatctgggtagggcaccaacaagcccagatggacagcatgtgccccggcccggcccgcaggtcccggaacctgcagtgccagcggatcttccaggtgaacgcacccattaactgcgtgtgcctgcaccccaaccaggcagagctcatcgtgggtgaccagagcggggctatccacatctgggacttgaaaacagaccacaacgagcagctgatccctgagcccgaggtctccatcacgtccgcccacatcgatcccgacgccagctacatggcagctgtcaatagcaccggaaactgctatgtctggaatctgacggggggcattggtgacgaggtgacccagctcatccccaagactaagatccctgcccacacgcgctacgccctgcagtgtcgcttcagccccgactccacgctcctcgccacctgctcggctgatcagacgtgcaagatctggaggacgtccaacttctccctgatgacggagctgagcatcaagagcggcaaccccggggagtcctcccgcggctggatgtggggctgcgccttctcgggggactcccagtacatcgtcactgcttcctcggacaacctggcccggctctggtgtgtggagactggagagatcaagagagagtatggcggccaccagaaggctgttgtctgcctggccttcaatgacagtgtgctgggctagcctgtgacccctcgggactgcctggtgcaggtggtggcagctggagggacccatgcagcacccaggtcagagcagaccctcccctgccggcctgcgccagctggacctgatggccccctgtggcgccttgacctgctgggccaggctgccctgggactctcagcccccagttgcttatccagatgtgacagagctcgacccaagccaggctgcacactcctggactgggctagcctgcactgcctgggaaagtcggccgagggcccaaagctgctgaggggtctgaggctggtgcccacccccaagctagtgtgttctctgcccctccctgcccgcgtttcagggcctcggtccatagagaacaccaccaccatggccaggtggaagggtttattagtccctgccagcagctgtcctccctggtgcaggtggcctggccagcccactggattggggacgggccaggctgggccaggtcgggggctcagtctgggaggtaataaaagcagaccgacacgca

SEQ ID NO: 378212 - DNA, 1801 bp, Homo sapiens
atgagtgggaggtgaggacgtggaactagaaaaatgggagccatcgataactctacgctcggcctcgatcgactcgctccggctcccctcgccgtcctggacacggcggagtgcggagccgcccgtaagatgctctgacctttgacccctgccgttcagctctagggcccgtgcaggccacaccatgaacacctccccaggcacggtgggcagtgacccggtcatcctggccactgcaggctacgaccacaccgtgcgcttctggcaggcccacagcggcatctgcacccggacggtgcagcaccaggactcccaggtgaatgccttggaggtcacaccggaccgcagcatgattgctgctgcaggttaccagcacatccgcatgtatgatctcaactccaataaccctaaccccatcatcagctacgacggcgtcaacaagaacatcgcgtctgtgggcttccacgaagacggccgctggatgtacacgggcggcgaggactgcacagccaggatctgggacctcaggtcccggaacctgcagtgccagcggatcttccaggtgaacgcacccattaactgcgtgtgcctgcaccccaaccaggcagagctcatcgtgggtgaccagagcggggctatccacatctgggacttgaaaacagaccacaacgagcagctgatccctgagcccgaggtctccatcacgtccgcccacatcgatcccgacgccagctacatggcagctgtcaatagcaccggaaactgctatgtctggaatctgacggggggcattggtgacgaggtgacccagctcatccccaagactaagatccctgcccacacgcgctacgccctgcagtgtcgcttcagccccgactccaccgtgcgtgcagggcctgctggcccgggaggggacctgcctgggctgggggctggagaggggaggggctgctggatggagtggctgctgctggacacgccccatgcccacccactaggctcctcgccacctgctcggctgatcagacgtgcaagatctggaggacgtccaacttctccctgatgacggagctgagcatcaagagcggcaaccccggggagtcctcccgcggctggatgtggggctgcgccttctcgggggactcccagtacatcgtcactgcttcctcggacaacctggcccggctctggtgtgtggagactggagagatcaagagagagtatggcggccaccagaaggctgttgtctgcctggccttcaatgacagtgtgctgggctagcctgtgacccctcgggactgcctggtgcaggtggtggcagctggagggacccatgcagcacccaggtcagagcagaccctcccctgccggcctgcgccagctggacctgatggccccctgtggcgccttgacctgctgggccaggctgccctgggactctcagcccccagttgcttatccagatgtgacagagctcgacccaagccaggctgcacactcctggactgggctagcctgcactgcctgggaaagtcggccgagggcccaaagctgctgaggggtctgaggctggtgcccacccccaagctagtgtgttctctgcccctccctgcccgcgtttcagggcctcggtccatagagaacaccaccaccatggccaggtggaagggtttattagtccctgccagcagctgtcctccctggtgcaggtggcctggccagcccactggattggggacgggccaggctgggccaggtcgggggctcagtctgggaggtaataaaagcagaccgacacgca

SEQ ID NO: 378213 - DNA, 1609 bp, Homo sapiens
atgagtgggaggtgaggacgtggaactagaaaaatgggagccatcgataactctacgctcggcctcgatcgactcgctccggctcccctcgccgtcctggacacggcggagtgcggagccgcccgtaagatgctctgacctttgacccctgccgttcagctctagggcccgtgcaggccacaccatgaacacctccccaggcacggtgggcagtgacccggtcatcctggccactgcaggctacgaccacaccgtgcgcttctggcaggcccacagcggcatctgcacccggacggtgcagcaccaggactcccaggtgaatgccttggaggtcacaccggaccgcagcatgattgctgctgcaggttaccagcacatccgcatgtatgatctcaactccaataaccctaaccccatcatcagctacgacggcgtcaacaagaacatcgcgtctgtgggcttccacgaagacggccgctggatgtacacgggcggcgaggactgcacagccaggatctgggacctcaggcagagctcatcgtgggtgaccagagcggggctatccacatctgggacttgaaaacagaccacaacgagcagctgatccctgagcccgaggtctccatcacgtccgcccacatcgatcccgacgccagctacatggcagctgtcaatagcaccggaaactgctatgtctggaatctgacggggggcattggtgacgaggtgacccagctcatccccaagactaagatccctgcccacacgcgctacgccctgcagtgtcgcttcagccccgactccacgctcctcgccacctgctcggctgatcagacgtgcaagatctggaggacgtccaacttctccctgatgacggagctgagcatcaagagcggcaaccccggggagtcctcccgcggctggatgtggggctgcgccttctcgggggactcccagtacatcgtcactgcttcctcggacaacctggcccggctctggtgtgtggagactggagagatcaagagagagtatggcggccaccagaaggctgttgtctgcctggccttcaatgacagtgtgctgggctagcctgtgacccctcgggactgcctggtgcaggtggtggcagctggagggacccatgcagcacccaggtcagagcagaccctcccctgccggcctgcgccagctggacctgatggccccctgtggcgccttgacctgctgggccaggctgccctgggactctcagcccccagttgcttatccagatgtgacagagctcgacccaagccaggctgcacactcctggactgggctagcctgcactgcctgggaaagtcggccgagggcccaaagctgctgaggggtctgaggctggtgcccacccccaagctagtgtgttctctgcccctccctgcccgcgtttcagggcctcggtccatagagaacaccaccaccatggccaggtggaagggtttattagtccctgccagcagctgtcctccctggtgcaggtggcctggccagcccactggattggggacgggccaggctgggccaggtcgggggctcagtctgggaggtaataaaagcagaccgacacgca

SEQ ID NO: 378214 - DNA, 1854 bp, Homo sapiens
aaacggctggtacgccggaattagggatcatcacgcgtgtgacgcgtgtccctgaacctacctgcgcttcttgtcccaactctaaaatgggaatgataagcgccattcggcagcgccttgtgggtctataatctacttagcacagagagtgtcttctaagtacttcacatccttctctgcagatgctctgacctttgacccctgccgttcagctctagggcccgtgcaggccacaccatgaacacctccccaggcacggtgggcagtgacccggtcatcctggccactgcaggctacgaccacaccgtgcgcttctggcaggcccacagcggcatctgcacccggacggtgcagcaccaggactcccaggtgaatgccttggaggtcacaccggaccgcagcatgattgctgctgcaggttaccagcacatccgcatgtatgatctcaactccaataaccctaaccccatcatcagctacgacggcgtcaacaagaacatcgcgtctgtgggcttccacgaagacggccgctggatgtacacgggcggcgaggactgcacagccaggatctgggacctcaggtcccggaacctgcagtgccagcggatcttccaggtgaacgcacccattaactgcgtgtgcctgcaccccaaccaggcagagctcatcgtgggtgaccagagcggggctatccacatctgggacttgaaaacagaccacaacgagcagctgatccctgagcccgaggtctccatcacgtccgcccacatcgatcccgacgccagctacatggcagctgtcaatagcaccggaaactgctatgtctggaatctgacggggggcattggtgacgaggtgacccagctcatccccaagactaagatccctgcccacacgcgctacgccctgcagtgtcgcttcagccccgactccaccgtgcgtgcagggcctgctggcccgggaggggacctgcctgggctgggggctggagaggggaggggctgctggatggagtggctgctgctggacacgccccatgcccacccactaggctcctcgccacctgctcggctgatcagacgtgcaagatctggaggacgtccaacttctccctgatgacggagctgagcatcaagagcggcaaccccggggagtcctcccgcggctggatgtggggctgcgccttctcgggggactcccagtacatcgtcactgcttcctcggacaacctggcccggctctggtgtgtggagactggagagatcaagagagagtatggcggccaccagaaggctgttgtctgcctggccttcaatgacagtgtgctgggctagcctgtgacccctcgggactgcctggtgcaggtggtggcagctggagggacccatgcagcacccaggtcagagcagaccctcccctgccggcctgcgccagctggacctgatggccccctgtggcgccttgacctgctgggccaggctgccctgggactctcagcccccagttgcttatccagatgtgacagagctcgacccaagccaggctgcacactcctggactgggctagcctgcactgcctgggaaagtcggccgagggcccaaagctgctgaggggtctgaggctggtgcccacccccaagctagtgtgttctctgcccctccctgcccgcgtttcagggcctcggtccatagagaacaccaccaccatggccaggtggaagggtttattagtccctgccagcagctgtcctccctggtgcaggtggcctggccagcccactggattggggacgggccaggctgggccaggtcgggggctcagtctgggaggtaataaaagcagaccgacacgca

SEQ ID NO: 378215 - DNA, 852 bp, Homo sapiens
agaatttgagtccttggccaggcgtggcctcctgttcttggcttgccaggctcctcgccacctgctcggctgatcagacgtgcaagatctggaggacgtccaacttctccctgatgacggagctgagcatcaagagcggcaaccccggggagtcctcccgcggctggatgtggggctgcgccttctcgggggactcccagtacatcgtcactgcttcctcggacaacctggcccggctctggtgtgtggagactggagagatcaagagagagtatggcggccaccagaaggctgttgtctgcctggccttcaatgacagtgtgctgggctagcctgtgacccctcgggactgcctggtgcaggtggtggcagctggagggacccatgcagcacccaggtcagagcagaccctcccctgccggcctgcgccagctggacctgatggccccctgtggcgccttgacctgctgggccaggctgccctgggactctcagcccccagttgcttatccagatgtgacagagctcgacccaagccaggctgcacactcctggactgggctagcctgcactgcctgggaaagtcggccgagggcccaaagctgctgaggggtctgaggctggtgcccacccccaagctagtgtgttctctgcccctccctgcccgcgtttcagggcctcggtccatagagaacaccaccaccatggccaggtggaagggtttattagtccctgccagcagctgtcctccctggtgcaggtggcctggccagcccactggattggggacgggccaggctgggccaggtcgggggctcagtctgggaggtaataaaagcagaccgacacgca

SEQ ID NO: 378216 - DNA, 1065 bp, Homo sapiens
atgagtgggaggtgaggacgtggaactagaaaaatgggagccatcgataactctacgctcggcctcgatcgactcgctccggctcccctcgccgtcctggacacggcggagtgcggagccgcccgtaagatgctctgacctttgacccctgccgttcagctctagggcccgtgcaggccacaccatgaacacctccccaggcacggtgggcagtgacccggtcatcctggccactgcaggctacgaccacaccgtgcgcttctggcaggcccacagcggcatctgcacccggacggtgcagcaccaggactcccaggtgaatgccttggaggtcacaccggaccgcagcatgattgctgctgcaggttaccagcacatccgcatgtatgatctcaactccaataaccctaaccccatcatcagctacgacggcgtcaacaagaacatcgcgtctgtgggcttccacgaagacggccgctggatgtacacgggcggcgaggactgcacagccaggatctgggacctcaggtcccggaacctgcagtgccagcggatcttccaggtgaacgcacccattaactgcgtgtgcctgcaccccaaccaggcagagctcatcgtgggtgaccagagcggggctatccacatctgggacttgaaaacagaccacaacgagcagctgatccctgagcccgaggtctccatcacgtccgcccacatcgatcccgacgccagctacatggcagctgtcaatagcaccggaaactgctatgtctggaatctgacggggggcattggtgacgaggtgacccagctcatccccaagactaagatccctgcccacacgcgctacgccctgcagtgtcgcttcagccccgactccacgctcctcgccacctgctcggctgatcagacgtgcaagatctggaggacgtccaacttctccctgatgacggagctgagcatcaagagcggcaaccccggggagtcctcccgcggctggatgtggggctgcgccttctcgggggactcccagtacatcgtcactggtgagccccgccctggcct

SEQ ID NO: 378217 - DNA, 1065 bp, Homo sapiens
atgagtgggaggtgaggacgtggaactagaaaaatgggagccatcgataactctacgctcggcctcgatcgactcgctccggctcccctcgccgtcctggacacggcggagtgcggagccgcccgtaagatgctctgacctttgacccctgccgttcagctctagggcccgtgcaggccacaccatgaacacctccccaggcacggtgggcagtgacccggtcatcctggccactgcaggctacgaccacaccgtgcgcttctggcaggcccacagcggcatctgcacccggacggtgcagcaccaggactcccaggtgaatgccttggaggtcacaccggaccgcagcatgattgctgctgcaggttaccagcacatccgcatgtatgatctcaactccaataaccctaaccccatcatcagctacgacggcgtcaacaagaacatcgcgtctgtgggcttccacgaagacggccgctggatgtacacgggcggcgaggactgcacagccaggatctgggacctcaggtcccggaacctgcagtgccagcggatcttccaggtgaacgcacccattaactgcgtgtgcctgcaccccaaccaggcagagctcatcgtgggtgaccagagcggggctatccacatctgggacttgaaaacagaccacaacgagcagctgatccctgagcccgaggtctccatcacgtccgcccacatcgatcccgacgccagctacatggcagctgtcaatagcaccggaaactgctatgtctggaatctgacggggggcattggtgacgaggtgacccagctcatccccaagactaagatccctgcccacacgcgctacgccctgcagtgtcgcttcagccccgactccacgctcctcgccacctgctcggctgatcagacgtgcaagatctggaggacgtccaacttctccctgatgacggagctgagcatcaagagcggcaaccccggggagtcctcccgcggctggatgtggggctgctgggacccacagaaccaactccccagcctttcagccttcgcttggtatcccat

SEQ ID NO: 378218 - DNA, 1269 bp, Homo sapiens
acccacgcgtcctgcccacgcgtcgagtcggccgagggcccaaagctgctgaggggtctgaggctggtgcccacccccaagctagtgtgttctctgcccctccctgcccgcgtttcagggcctcggtccatagagaacaccaccaccatggccaggtggaagggtttattagtccctgccagcagctgtcctccctggtgcaggtggcctggccagcccactggattggggacgggccaggctgggccaggtcgggggctcagtctgggaggtaataaaagcagaccgacacgcaaaaaaaaaaaaaaaaaaaaaaaaaaaaaaaaaaacaaaaaaaaaaaaaaaaacaaaaaagaaaacaaagagaaacaaaaaaaacaaaaaaaaaaaagaaaaaaaaaaagaaaaaaaacaaaagaaaaaccaaacaaacacaggacacaacacaaaaaacaccacacaaagacagacaaacaaaaaatagaagggagggggcccgcccgcatacctcccctgcgggcgcgaggcaccacacggcgccagccacaatgtggggcaggagccccggcgaggggtaataactaacaatataggcaaggcacgccacgcggcggtatctaaacacaccggctggctggagtactaacaccactacgagtcagatcacggttatattaagtacggaaccacacccactacatttgtggcgtggggggagtcaaccatattcatccgacacatgccctcacaaagacaattcgtaccgacacgccacgactagttagcatgatctacaacacatttctacagtcgcttgtctgagtgataacacccacccgtactatctgcttcctgctagacaaataattcttgggtcaccagtagctatcagcgtcagtaacaaaacttacggtcgcgcgcgcggggctgggatcttatctcagttagtaggcctgccaagtagaagtatgcaaggatactgaacatgaacgattctacagaaaacaaacttgtgaagagaatgaacattcaaacgcgcaaggcgaaatcgagaatgaagagcacgatgaagcaaatacaaaaaaacacagactataataccgacaaaagaagtcgaaccaacctccacaacacggacgaagaaagaagcgcaaaagcaatacaccttaccgaagaaggaatgacgaagacgagtaaaatcacaggagacgacagacaatgtgccagtacgataacgtgaacataaggaactacagatagagatggagg

SEQ ID NO: 378219 - DNA, 1685 bp, Homo sapiens
atgagtgggaggtgaggacgtggaactagaaaaatgggagccatcgataactctacgctcggcctcgatcgactcgctccggctcccctcgccgtcctggacacggcggagtgcggagccgcccgtaagatgctctgacctttgacccctgccgttcagctctagggcccgtgcaggccacaccatgaacacctccccaggcacggtgggcagtgacccggtcatcctggccactgcaggctacgaccacaccgtgcgcttctggcaggcccacagcggcatctgcacccggacggtgcagcaccaggactcccaggtgaatgccttggaggtcacaccggaccgcagcatgattgctgctgcaggttaccagcacatccgcatgtatgatctcaactccaataaccctaaccccatcatcagctacgacggcgtcaacaagaacatcgcgtctgtgggcttccacgaagacggccgctggatgtacacgggcggcgaggactgcacagccaggatctgggacctcaggtcccggaacctgcagtgccagcggatcttccaggtgaacgcacccattaactgcgtgtgcctgcaccccaaccaggcagagctcatcgtgggtgaccagagcggggctatccacatctgggacttgaaaacagaccacaacgagcagctgatccctgagcccgaggtctccatcacgtccgcccacatcgatcccgacgccagctacatggcagctgtcaatagcaccggaaactgctatgtctggaatctgacggggggcattggtgacgaggtgacccagctcatccccaagactaagatccctgcccacacgcgctacgccctgcagtgtcgcttcagccccgactccacgctcctcgccacctgctcggctgatcagacgtgcaagatctggaggacgtccaacttctccctgatgacggagctgagcatcaagagcggcaaccccggggagtcctcccgcggctggatgtggggctgcgccttctcgggggactcccagtacatcgtcactgcttcctcggacaacctggcccggctctggtgtgtggagactggagagatcaagagagagtatggcggccaccagaaggctgttgtctgcctggccttcaatgacagtgtgctgggctagcctgtgacccctcgggactgcctggtgcaggtggtggcagctggagggacccatgcagcacccaggtcagagcagaccctcccctgccggcctgcgccagctggacctgatggccccctgtggcgccttgacctgctgggccaggctgccctgggactctcagcccccagttgcttatccagatgtgacagagctcgacccaagccaggctgcacactcctggactgggctagcctgcactgcctgggaaagtcggccgagggcccaaagctgctgaggggtctgaggctggtgcccacccccaagctagtgtgttctctgcccctccctgcccgcgtttcagggcctcggtccatagagaacaccaccaccatggccaggtggaagggtttattagtccctgccagcagctgtcctccctggtgcaggtggcctggccagcccactggattggggacgggccaggctgggccaggtcgggggctcagtctgggaggtaataaaagcagaccgacacgca

SEQ ID NO: 378220 - DNA, 1708 bp, Homo sapiens
  misc_feature (10)..(10): n is a, c, g, or t
gcaggctggntacggtccgaagtccgtttgtgcggcagagtggcgcccgcgcgtgactcccccctgccggctgcggaggtgggggggggacggcgcccccgccgtgtgcgtggggcggggatggagcacgcgccctggagccccggagccagatgctctgacctttgacccctgccgttcagctctagggcccgtgcaggccacaccatgaacacctccccaggcacggtgggcagtgacccggtcatcctggccactgcaggctacgaccacaccgtgcgcttctggcaggcccacagcggcatctgcacccggacggtgcagcaccaggactcccaggtgaatgccttggaggtcacaccggaccgcagcatgattgctgctgcaggttaccagcacatccgcatgtatgatctcaactccaataaccctaaccccatcatcagctacgacggcgtcaacaagaacatcgcgtctgtgggcttccacgaagacggccgctggatgtacacgggcggcgaggactgcacagccaggatctgggacctcaggtcccggaacctgcagtgccagcggatcttccaggtgaacgcacccattaactgcgtgtgcctgcaccccaaccaggcagagctcatcgtgggtgaccagagcggggctatccacatctgggacttgaaaacagaccacaacgagcagctgatccctgagcccgaggtctccatcacgtccgcccacatcgatcccgacgccagctacatggcagctgtcaatagcaccggaaactgctatgtctggaatctgacggggggcattggtgacgaggtgacccagctcatccccaagactaagatccctgcccacacgcgctacgccctgcagtgtcgcttcagccccgactccacgctcctcgccacctgctcggctgatcagacgtgcaagatctggaggacgtccaacttctccctgatgacggagctgagcatcaagagcggcaaccccggggagtcctcccgcggctggatgtggggctgcgccttctcgggggactcccagtacatcgtcactgcttcctcggacaacctggcccggctctggtgtgtggagactggagagatcaagagagagtatggcggccaccagaaggctgttgtctgcctggccttcaatgacagtgtgctgggctagcctgtgacccctcgggactgcctggtgcaggtggtggcagctggagggacccatgcagcacccaggtcagagcagaccctcccctgccggcctgcgccagctggacctgatggccccctgtggcgccttgacctgctgggccaggctgccctgggactctcagcccccagttgcttatccagatgtgacagagctcgacccaagccaggctgcacactcctggactgggctagcctgcactgcctgggaaagtcggccgagggcccaaagctgctgaggggtctgaggctggtgcccacccccaagctagtgtgttctctgcccctccctgcccgcgtttcagggcctcggtccatagagaacaccaccaccatggccaggtggaagggtttattagtccctgccagcagctgtcctccctggtgcaggtggcctggccagcccactggattggggacgggccaggctgggccaggtcgggggctcagtctgggaggtaataaaagcagaccgacacgca

SEQ ID NO: 378221 - DNA, 1655 bp, Homo sapiens
atgagtgggaggtgaggacgtggaactagaaaaatgggagccatcgataactctacgctcggcctcgatcgactcgctccggctcccctcgccgtcctggacacggcggagtgcggagccgcccgtaagctctagggcccgtgcaggccacaccatgaacacctccccaggcacggtgggcagtgacccggtcatcctggccactgcaggctacgaccacaccgtgcgcttctggcaggcccacagcggcatctgcacccggacggtgcagcaccaggactcccaggtgaatgccttggaggtcacaccggaccgcagcatgattgctgctgcaggttaccagcacatccgcatgtatgatctcaactccaataaccctaaccccatcatcagctacgacggcgtcaacaagaacatcgcgtctgtgggcttccacgaagacggccgctggatgtacacgggcggcgaggactgcacagccaggatctgggacctcaggtcccggaacctgcagtgccagcggatcttccaggtgaacgcacccattaactgcgtgtgcctgcaccccaaccaggcagagctcatcgtgggtgaccagagcggggctatccacatctgggacttgaaaacagaccacaacgagcagctgatccctgagcccgaggtctccatcacgtccgcccacatcgatcccgacgccagctacatggcagctgtcaatagcaccggaaactgctatgtctggaatctgacggggggcattggtgacgaggtgacccagctcatccccaagactaagatccctgcccacacgcgctacgccctgcagtgtcgcttcagccccgactccacgctcctcgccacctgctcggctgatcagacgtgcaagatctggaggacgtccaacttctccctgatgacggagctgagcatcaagagcggcaaccccggggagtcctcccgcggctggatgtggggctgcgccttctcgggggactcccagtacatcgtcactgcttcctcggacaacctggcccggctctggtgtgtggagactggagagatcaagagagagtatggcggccaccagaaggctgttgtctgcctggccttcaatgacagtgtgctgggctagcctgtgacccctcgggactgcctggtgcaggtggtggcagctggagggacccatgcagcacccaggtcagagcagaccctcccctgccggcctgcgccagctggacctgatggccccctgtggcgccttgacctgctgggccaggctgccctgggactctcagcccccagttgcttatccagatgtgacagagctcgacccaagccaggctgcacactcctggactgggctagcctgcactgcctgggaaagtcggccgagggcccaaagctgctgaggggtctgaggctggtgcccacccccaagctagtgtgttctctgcccctccctgcccgcgtttcagggcctcggtccatagagaacaccaccaccatggccaggtggaagggtttattagtccctgccagcagctgtcctccctggtgcaggtggcctggccagcccactggattggggacgggccaggctgggccaggtcgggggctcagtctgggaggtaataaaagcagaccgacacgca

SEQ ID NO: 378222 - DNA, 1723 bp, Homo sapiens
atgagtgggaggtgaggacgtggaactagaaaaatgggagccatcgataactctacgctcggcctcgatcgactcgctccggctcccctcgccgtcctggacacggcggagtgcggagccgcccgtaagatgctctgacctttgacccctgccgttcagctctagggcccgtgcaggccacaccatgaacacctccccaggcacggtgggcagtgacccggtcatcctggccactgcaggctacgaccacaccgtgcgcttctggcaggcccacagcggcatctgcacccggacggtgcagcaccaggactcccaggtgaatgccttggaggtcacaccggaccgcagcatgattgctgctgcaggttaccagcacatccgcatgtatgatctcaactccaataaccctaaccccatcatcagctacgacggcgtcaacaagaacatcgcgtctgtgggcttccacgaagacggccgctggatgtacacgggcggcgaggactgcacagccaggatctgggacctcaggtcccggaacctgcagtgccagcggatcttccaggtgaacgcacccattaactgcgtgtgcctgcaccccaaccaggcagagctcatcgtgggtgaccagagcggggctatccacatctgggacttgaaaacagaccacaacgagcagctgatccctgagcccgaggtctccatcacgtccgcccacatcgatcccgacgccagctacatggcagctgtcaatagcaccggaaactgctatgtctggaatctgacggggggcattggtgacgaggtgacccagctcatccccaagactaagatccctgcccacacgcgctacgccctgcagtgtcgcttcagccccgactccacgctcctcgccacctgctcggctgatcagacgtgcaagatctggaggacgtccaacttctccctgatgacggagctgagcatcaagagcggcaaccccggggagtcctcccgcggctggatgtggggctgcgccttctcgggggactcccagtacatcgtcactgcttcctcggacaacctggcccggctctggtgtgtggagactggagagatcaagagagagtatggcggccaccagaaggctgttgtctgcctggccttcaatgacagtgtgctgggctagcctgtgacccctcgggactgcctggtgcaggtggtggcagctggagggacccatgcagcacccaggtcagagcagaccctcccctgccggcctgcgccagctggacctgatggccccctgtggcgccttgacctgctgggccaggctgccctgggactctcagcccccagttgcttatccagatgtgacagagctcgacccaagccaggctgcacactcctggactgggctagcctgcactgcctgggaaagtcggccgagggcccaaagctgctgaggggtctgaggctggtgcccacccccaagctagtgtgttctctgcccctccctgcccgcgtttcagggcctcggtccatagagaacaccaccaccatggccaggtggaagggtttattagtccctgccagcagctgtcctccctggtgcaggtggcctggccagcccactggattggggacgggccaggctgggccaggtcgggggctcagtctgggaggtaataaaagcagaccgacacgcagatgttgctcgggaagcaaatgtcgatgcagagataaa

SEQ ID NO: 378223 - DNA, 1671 bp, Homo sapiens
cttgcgcacgcgcagcccgcccctgcggcagagtggcgcccgcgcgtgactcccccctgccggctgcggaggtgggggggggacggcgcccccgccgtgtgcgtggggcggggatggagcacgcgccctggagccccggagccagctctagggcccgtgcaggccacaccatgaacacctccccaggcacggtgggcagtgacccggtcatcctggccactgcaggctacgaccacaccgtgcgcttctggcaggcccacagcggcatctgcacccggacggtgcagcaccaggactcccaggtgaatgccttggaggtcacaccggaccgcagcatgattgctgctgcaggttaccagcacatccgcatgtatgatctcaactccaataaccctaaccccatcatcagctacgacggcgtcaacaagaacatcgcgtctgtgggcttccacgaagacggccgctggatgtacacgggcggcgaggactgcacagccaggatctgggacctcaggtcccggaacctgcagtgccagcggatcttccaggtgaacgcacccattaactgcgtgtgcctgcaccccaaccaggcagagctcatcgtgggtgaccagagcggggctatccacatctgggacttgaaaacagaccacaacgagcagctgatccctgagcccgaggtctccatcacgtccgcccacatcgatcccgacgccagctacatggcagctgtcaatagcaccggaaactgctatgtctggaatctgacggggggcattggtgacgaggtgacccagctcatccccaagactaagatccctgcccacacgcgctacgccctgcagtgtcgcttcagccccgactccacgctcctcgccacctgctcggctgatcagacgtgcaagatctggaggacgtccaacttctccctgatgacggagctgagcatcaagagcggcaaccccggggagtcctcccgcggctggatgtggggctgcgccttctcgggggactcccagtacatcgtcactgcttcctcggacaacctggcccggctctggtgtgtggagactggagagatcaagagagagtatggcggccaccagaaggctgttgtctgcctggccttcaatgacagtgtgctgggctagcctgtgacccctcgggactgcctggtgcaggtggtggcagctggagggacccatgcagcacccaggtcagagcagaccctcccctgccggcctgcgccagctggacctgatggccccctgtggcgccttgacctgctgggccaggctgccctgggactctcagcccccagttgcttatccagatgtgacagagctcgacccaagccaggctgcacactcctggactgggctagcctgcactgcctgggaaagtcggccgagggcccaaagctgctgaggggtctgaggctggtgcccacccccaagctagtgtgttctctgcccctccctgcccgcgtttcagggcctcggtccatagagaacaccaccaccatggccaggtggaagggtttattagtccctgccagcagctgtcctccctggtgcaggtggcctggccagcccactggattggggacgggccaggctgggccaggtcgggggctcagtctgggaggtaataaaagcagaccgacacgca

SEQ ID NO: 378224 - DNA, 1945 bp, Homo sapiens
  misc_feature (10)..(10): n is a, c, g, or t
gcaggctggntacggtccgaagtccgtttgtgcggcagagtggcgcccgcgcgtgactcccccctgccggctgcggaggtgggggggggacggcgcccccgccgtgtgcgtggggcggggatggagcacgcgccctggagccccggagccagatcacgcgtgtgacgcgtgtccctgaacctacctgcgcttcttgtcccaactctaaaatgggaatgataagcgccattcggcagcgccttgtgggtctataatctacttagcacagagagtgtcttctaagtacttcacatccttctctgcagatgctctgacctttgacccctgccgttcagctctagggcccgtgcaggccacaccatgaacacctccccaggcacggtgggcagtgacccggtcatcctggccactgcaggctacgaccacaccgtgcgcttctggcaggcccacagcggcatctgcacccggacggtgcagcaccaggactcccaggtgaatgccttggaggtcacaccggaccgcagcatgattgctgctgcaggtatctgtgatccttgatctctaaactcctgagctctggtgggtcgacctgagcacagccaagcttcagttcagcctgtgtcccgttaccagcacatccgcatgtatgatctcaactccaataaccctaaccccatcatcagctacgacggcgtcaacaagaacatcgcgtctgtgggcttccacgaagacggccgctggatgtacacgggcggcgaggactgcacagccaggatctgggacctcaggtcccggaacctgcagtgccagcggatcttccaggtgaacgcacccattaactgcgtgtgcctgcaccccaaccaggcagagctcatcgtgggtgaccagagcggggctatccacatctgggacttgaaaacagaccacaacgagcagctgatccctgagcccgaggtctccatcacgtccgcccacatcgatcccgacgccagctacatggcagctgtcaatagcaccggaaactgctatgtctggaatctgacggggggcattggtgacgaggtgacccagctcatccccaagactaagatccctgcccacacgcgctacgccctgcagtgtcgcttcagccccgactccacgctcctcgccacctgctcggctgatcagacgtgcaagatctggaggacgtccaacttctccctgatgacggagctgagcatcaagagcggcaaccccggggagtcctcccgcggctggatgtggggctgcgccttctcgggggactcccagtacatcgtcactgcttcctcggacaacctggcccggctctggtgtgtggagactggagagatcaagagagagtatggcggccaccagaaggctgttgtctgcctggccttcaatgacagtgtgctgggctagcctgtgacccctcgggactgcctggtgcaggtggtggcagctggagggacccatgcagcacccaggtcagagcagaccctcccctgccggcctgcgccagctggacctgatggccccctgtggcgccttgacctgctgggccaggctgccctgggactctcagcccccagttgcttatccagatgtgacagagctcgacccaagccaggctgcacactcctggactgggctagcctgcactgcctgggaaagtcggccgagggcccaaagctgctgaggggtctgaggctggtgcccacccccaagctagtgtgttctctgcccctccctgcccgcgtttcagggcctcggtccatagagaacaccaccaccatggccaggtggaagggtttattagtccctgccagcagctgtcctccctggtgcaggtggcctggccagcccactggattggggacgggccaggctgggccaggtcgggggctcagtctgggaggtaataaaagcagaccgacacgca

SEQ ID NO: 378225 - DNA, 1872 bp, Homo sapiens
atgagtgggaggtgaggacgtggaactagaaaaatgggagccatcgataactctacgctcggcctcgatcgactcgctccggctcccctcgccgtcctggacacggcggagtgcggagccgcccgtaagatgctctgacctttgacccctgccgttcagctctagggcccgtgcaggccacaccatgaacacctccccaggcacggtgggcagtgacccggtcatcctggccactgcaggctacgaccacaccgtgcgcttctggcaggcccacagcggcatctgcacccggacggtgcagcaccaggactcccaggtgaatgccttggaggtcacaccggaccgcagcatgattgctgctgcaggttaccagcacatccgcatgtatgatctcaactccaataaccctaaccccatcatcagctacgacggcgtcaacaagaacatcgcgtctgtgggcttccacgaagacggccgctggatgtacacgggcggcgaggactgcacagccaggatctgggacctcagaggctgagacagggagcttcctgtgggcgacttactgagagaagtgaggacaggaggagagtgaattgcatcagagcgcgagtcctgccttgagcccggagccagcttgttattccccttccaccagccactggcttaggctccctgctggagcagagggccctgcgtcccaagtatttcccaagaggtcccggaacctgcagtgccagcggatcttccaggtgaacgcacccattaactgcgtgtgcctgcaccccaaccaggcagagctcatcgtgggtgaccagagcggggctatccacatctgggacttgaaaacagaccacaacgagcagctgatccctgagcccgaggtctccatcacgtccgcccacatcgatcccgacgccagctacatggcagctgtcaatagcaccggaaactgctatgtctggaatctgacggggggcattggtgacgaggtgacccagctcatccccaagactaagatccctgcccacacgcgctacgccctgcagtgtcgcttcagccccgactccacgctcctcgccacctgctcggctgatcagacgtgcaagatctggaggacgtccaacttctccctgatgacggagctgagcatcaagagcggcaaccccggggagtcctcccgcggctggatgtggggctgcgccttctcgggggactcccagtacatcgtcactgcttcctcggacaacctggcccggctctggtgtgtggagactggagagatcaagagagagtatggcggccaccagaaggctgttgtctgcctggccttcaatgacagtgtgctgggctagcctgtgacccctcgggactgcctggtgcaggtggtggcagctggagggacccatgcagcacccaggtcagagcagaccctcccctgccggcctgcgccagctggacctgatggccccctgtggcgccttgacctgctgggccaggctgccctgggactctcagcccccagttgcttatccagatgtgacagagctcgacccaagccaggctgcacactcctggactgggctagcctgcactgcctgggaaagtcggccgagggcccaaagctgctgaggggtctgaggctggtgcccacccccaagctagtgtgttctctgcccctccctgcccgcgtttcagggcctcggtccatagagaacaccaccaccatggccaggtggaagggtttattagtccctgccagcagctgtcctccctggtgcaggtggcctggccagcccactggattggggacgggccaggctgggccaggtcgggggctcagtctgggaggtaataaaagcagaccgacacgca

SEQ ID NO: 378226 - DNA, 1199 bp, Homo sapiens
  misc_feature (3)..(3): n is a, c, g, or t
ggnacgaggaagttgagatcatacatgcggatgtgctggtaacctgcagcagcaatcatgctggggtccggtgtgacctccaaggcattcacctgggagtcctggtgctgcaccccaagcagagctcatcgtgggtgaccagagcggggctatccacatctgggacttgaaaacagaccacaacgagcagctgatccctgagcccgaggtctccatcacgtccgcccacatcgatcccgacgccagctacatggcagctgtcaatagcaccggaaactgctatgtctggaatctgacggggggcattggtgacgaggtgacccagctcatccccaagactaagatccctgcccacacgcgctacgccctgcagtgtcgcttcagccccgactccacgctcctcgccacctgctcggctgatcagacgtgcaagatctggaggacgtccaacttctccctgatgacggagctgagcatcaagagcggcaaccccggggagtcctcccgcggctggatgtggggctgcgccttctcgggggactcccagtacatcgtcactgcttcctcggacaacctggcccggctctggtgtgtggagactggagagatcaagagagagtatggcggccaccagaaggctgttgtctgcctggccttcaatgacagtgtgctgggctagcctgtgacccctcgggactgcctggtgcaggtggtggcagctggagggacccatgcagcacccaggtcagagcagaccctcccctgccggcctgcgccagctggacctgatggccccctgtggcgccttgacctgctgggccaggctgccctgggactctcagcccccagttgcttatccagatgtgacagagctcgacccaagccaggctgcacactcctggactgggctagcctgcactgcctgggaaagtcggccgagggcccaaagctgctgaggggtctgaggctggtgcccacccccaagctagtgtgttctctgcccctccctgcccgcgtttcagggcctcggtccatagagaacaccaccaccatggccaggtggaagggtttattagtccctgccagcagctgtcctccctggtgcaggtggcctggccagcccactggattggggacgggccaggctgggccaggtcgggggctcagtctgggaggtaataaaagcagaccgacacgca

SEQ ID NO: 378227 - DNA, 1740 bp, Homo sapiens
agcgcgacccgacagcctgggaaacggacagccgtgtcagaagggcaggtgccagtgggcaggaggccggagagaaagccgcagcttccttccacctcgcgccgggcccgcggccgcgcacggggaccgctccgagttcctcccggcgggaaccccccgccccagaactttggtctcgtcccacccacccccgcccgcgccatggtctcgccctagggagccatcgataactctacgctcggcctcgatcgactcgctccggctcccctcgccgtcctggacacggcggagtgcggagccgcccgtaagatgctctgacctttgacccctgccgttcagctctagggcccgtgcaggccacaccatgaacacctccccaggcacggtgggcagtgacccggtcatcctggccactgcaggctacgaccacaccgtgcgcttctggcaggcccacagcggcatctgcacccggacggtgcagcaccaggactcccaggtgaatgccttggaggtcacaccggaccgcagcatgattgctgctgcaggttaccagcacatccgcatgtatgatctcaactccaataaccctaaccccatcatcagctacgacggcgtcaacaagaacatcgcgtctgtgggcttccacgaagacggccgctggatgtacacgggcggcgaggactgcacagccaggatctgggacctcaggtcccggaacctgcagtgccagcggatcttccaggtgaacgcacccattaactgcgtgtgcctgcaccccaaccaggcagagctcatcgtgggtgaccagagcggggctatccacatctgggacttgaaaacagaccacaacgagcagctgatccctgagcccgaggtctccatcacgtccgcccacatcgatcccgacgccagctacatggcagctgtcaatagcaccgctcctcgccacctgctcggctgatcagacgtgcaagatctggaggacgtccaacttctccctgatgacggagctgagcatcaagagcggcaaccccggggagtcctcccgcggctggatgtggggctgcgccttctcgggggactcccagtacatcgtcactgcttcctcggacaacctggcccggctctggtgtgtggagactggagagatcaagagagagtatggcggccaccagaaggctgttgtctgcctggccttcaatgacagtgtgctgggctagcctgtgacccctcgggactgcctggtgcaggtggtggcagctggagggacccatgcagcacccaggtcagagcagaccctcccctgccggcctgcgccagctggacctgatggccccctgtggcgccttgacctgctgggccaggctgccctgggactctcagcccccagttgcttatccagatgtgacagagctcgacccaagccaggctgcacactcctggactgggctagcctgcactgcctgggaaagtcggccgagggcccaaagctgctgaggggtctgaggctggtgcccacccccaagctagtgtgttctctgcccctccctgcccgcgtttcagggcctcggtccatagagaacaccaccaccatggccaggtggaagggtttattagtccctgccagcagctgtcctccctggtgcaggtggcctggccagcccactggattggggacgggccaggctgggccaggtcgggggctcagtctgggaggtaataaaagcagaccgacacgca

SEQ ID NO: 378228 - DNA, 1094 bp, Homo sapiens
agcgcgacccgacagcctgggaaacggacagccgtgtcagaagggcaggtgccagtgggcaggaggccggagagaaagccgcagcttccttccacctcgcgccgggcccgcggccgcgcacggggaccgctccgagttcctcccggcgggaaccccccgccccagaactttggtctcgtcccacccacccccgcccgcgccatggtctcgccctagggagccatcgataactctacgctcggcctcgatcgactcgctccggctcccctcgccgtcctggacacggcggagtgcggagccgcccgtaagatgctctgacctttgacccctgccgttcagctctagggcccgtgcaggccacaccatgaacacctccccaggcacggtgggcagtgacccggtcatcctggccactgcaggctacgaccacaccgtgcgcttctggcaggcccacagcggcatctgcacccggacggtgcagcaccaggactcccaggtgaatgccttggaggtcacaccggaccgcagcatgattgctgctgcaggttaccagcacatccgcatgtatgatctcaactccaataaccctaaccccatcatcagctacgacggcgtcaacaagaacatcgcgtctgtgggcttccacgaagacggccgctggatgtacacgggcggcgaggactgcacagccaggatctgggacctcaggtcccggaacctgcagtgccagcggatcttccaggtgaacgcacccattaactgcgtgtgcctgcaccccaaccaggcagagctcatcgtgggtgaccagagcggggctatccacatctgggacttgaaaacagaccacaacgagcagctgatccctgagcccgaggtctccatcacgtccgcccacatcgatcccgacgccagctacatggcagctgtcaatagcaccgaaactgtatgtctggattctgacgggggccttggtgacgaggtggcccgtctttccccaggatagattccggcccagcgctaggctgtgttttgtttgccgatccagctctgccctgtcgtgtcgcgtggctgggggcgctccggggggggtaagc

SEQ ID NO: 378229 - DNA, 2201 bp, Homo sapiens
agaaaagcccgttccttattaaccaaaaggtaagatggccattgttaggcattttaaagccccataaactcaacagtgattgaaaaactccagaggggacatgtagctttttacccacctgagcatagaccaaatttacaactgttgctgtttatttcagctcttatatttttgtatgtaggagttctcaaatgccagactgttatttttaattagtgtttaaaagactttgctatatatagtcattaggctgtgttttaatcagggtggagtaccaccaaacctccaggaccctgtgatgggcatggacagaccagaggggaggatcagagcaggcaccgggcacctgtcacttgatgtccggaaaccatgaggtggcccccttccgtttagcataaaacatgtcctgttcttgcagctcaacttagttgttatatataacctcttagaacctttgagaagaacggctgtgggtgctaaggccagtgttgaattaggtggctggttcagaaacacctgcccaggctaacggggcagatctctatacagcgcaggggtgcttgggacctggtgggggcagatttctttaccttctgtgcccctatatttttgagataacgcagaaaggcttcccttgctctacatgtgaccgagatgcatatgtaaagctgcctttccagaagggtaagcttgctgcctccagctgttcctgctcctcatggcaaagtgcactgaggagttttgttggctgagcagcgtgttcgggatgtagcggctgcaagtgagaagcctattccatggttgctttagctcctgggctgccatcccggtctgtccctccctcttttcatgtggatgggccggtacaggcccacccacacagagaaggaagaaaggagggacgagattactattaaccattctttctatgtgtggtgcttctgtgtatgggctgtgttcacagagcatctgatctgttggtctgattttctgagtgtagcactgagtctgctgcggctgcttgccaagggcttgaatgtcgaggggttgtggggccagggttctgaatactatctcaggttatgcacaccctgcctgccctccatgtgcctgcatcacgtgatgtgaagacccaggtgtatgctcttcatggaggcaatgcccccgtgttcagaatgtgaaaggaaaagtgctcaaggacagacagagttgagagcatgggtggagtaggcaaaccatcccaggctacctcctgccttgccacccctctgcagggcgggcacaggctgcgctccttgatgctccttggcctggagagtgaagctgacctcaaagtcagccatcttgtatgtagcaggcctcaggactatgggcgggtgtgggccactgcagccagcacggaaaatgagccgaaggaaaatccgttccacagaagcaccttgtctttctgcagtttttgagtatatttctcaaatagccataaaagtttaaaaaatatatttgacagctaactctgggaacaaaacatgttatctaagatccctttttaagtaacacatttcctgcctgccttagcaggttctcttaagctgtaaaaatagctacccatggcagtgagatgaggatccctggaccttgcctttctgacctctttcccccaggaagtccatgactgaccttcaggcagcagcatctctgcaggctccacttgagcgctttcagatctccgcagactccactgagcgcttttagatctccgcagactccactgagcgctttcagatctctgcagactccactgagcgctttcagactggggccatgcctcaggggatgggctccccctgtgttgttttgctggtggccacgaatccgaaaggcccatgctgcagcgtgccctgctttgagtttggttgatatgcttaataagaacattagttttctgggagaatttggtagcacccgttcttcccttcactgtgtgggggaaatagtgttgattgaaaggaagaggactccgagattggattggagcaagaaagtgtgggtatcgtgtgttgtgactgtgtcttctccggggtgctgcttcactggaggtctcccttcagggtctggccctcatgcctggccccaggtgctcgtgtgcacgtgagcggctcttcctgctgactgactacagctaattgacaaaaggcagtttc

SEQ ID NO: 378230 - DNA, 1435 bp, Homo sapiens
ggggcgcagggctcgggacgtcaaagccctgcgtccttcggcccccagagcggagaagcgcgcaaggcaccggtggcagcggcgacggcagctgcgacagcaacccctgctgggccgaaactgggcagagcggagcagacgtctgaagcagcgcgagtgaggcgcgagggtagcgcccgcgcccgggaagacccctcggcgcgaaccggcagcccagccccgggtcccggttcccaaggccccgcctctagggcctggggactaatcggattgagagcgcgccggcccgggccgcgaactcgccaattgcggagggcggtggccaccgcccaatccggagcagacaggtgcgaggtccggaaggcggaggccaatcggcggcggttgcgacctgctggggcaggtctcggccaataaggaggctcgagtgacatcttcgcgcaccaatcgggagtgagggagcattcgtgcccgctcgcccttccggccagacctctatttaccaggggcgtgcagcccgcttgccaatcagagcgcggctgagcggccccgcagccaacccccgaggagcggccggctggcgtccgccgcgcccaggagttggggatgtcctacaaacccatcgcccctgctcccagcagcacccctggctccagcacccctgggccgggcaccccggtccctacaggaagcgtcccgtcgccgtcgggctcagtgccaggagccggcgctcctttcagaccgctgtttaacgactttggaccgccttccatgggctacgtgcaggcgatgaagccacccggcgcccagggctcccagagcacctacacggacctgctgtcagtcatagaggagatgggcaaagagatccggcctacctatgctggcagcaagagcgccatggagcgcctgaagagaggtatcatccatgcccgggccctagtcagagagtgcctggcagagacagagcggaacgcccgcacgtaacaggaagcgcctcggcctcagcgtctggacctatccggccactgcagagcacccgcttctccctggccttcatcccgagttgcactaaccatcctgggcttcctgtcctgtgtcccttggtgggtcccctccaggaaccaaggagtggccctccaggtggcagcactaaggacacccccccacaacaagagttagcagcgaggtccccatgagtcccacccatgacctgccgacagtgttgcccaccggaacttttgtggcccctaccgctcagcccttcccagcacttctcccactttgtcccgagcctccttctcccccagcaggggcacaggcctggcacctccctgccttgtgtcctgagccatagtgactcttttatctgtgtgtcttttgctaaatatgccctttttatattaataaaagatgatttggagttgtgctctca

SEQ ID NO: 378231 - DNA, 2138 bp, Homo sapiens
ttgcaatgtaaaaatatatcttggtctctgcatgatgatatattaacatctataccatggaacttttaaaaggaaaattgtgtggtataattaaaagaatattgcatgttatagagaaacttcacctgttgatttagcaggtgccattgtgtagatgctaagcaaatcttaatatgtttccttggatttttgaaatttgaatttgttgtgtaactttgctagttaaaagatttagagggatttggctgggcgcatggctcacgcttgtaatcccagcactttgggaggccgaggtaggcagatcacgaggtcaggagttcgagaccagcctggccaatacagtgaaaccctgtctcttctaaaaatacaaaaattagctgggcctcgtggcgggcgcctgtaatcccagctacttgggaggctggcaggagaatcacttgaaccagggaggtggaggttgcaatgagccgagatggcgccactgcaccccagcctgggtggcagagctagactctgtctcaaaaaaaaaaaaaagagtgggatttatcatagtttttttttcttaactgttattgactatttttaatttttattttttaattcagtggcctctcaggattattacctgcatttttttttcaggaaaatcccaattctgcaactaactctgtggccttagacaagtctcttgccttatccagggctgtttccttgtctgtaaaataaagagttggactagatgatctctaaggtcccttttacatctatagtttccttggtactatattagtgtttgatacaaaacaatttaatatatctaagccagttctccctgttatcgttgttgttttctatcattttatcattggaaacaacttggatttggttatggtaatttatatgatgcctcttggtacagttttgtgtatagtgttcctacatgcttgcatttgccagtacaaattacattcagcctataaaatagagatgaacttctgtattcaccagcacttcctttttccaattgtaacttttcattttccttctaaattcagagttttaaagtagaagtacttgctagtaatgcagatagagtcagttctctcaccagtatggatttaaattgtcctttccatctcagtttactcttttttttaaaaaaaacaaaccaatatgctacctgaaactagaaacacatttttaattctgcagctctcctaacagattattttgctttagtacagagctgggctgcaggctgagttgggagttggtaaaggattgaggacagcaatgtaggtcgcctcttcctacaggaaaaaattgaggaacgttgtgtattactggttaaaagattgattaggattatttcaagggatggttgagttgtcgttttacttatttcacccaatattttgtgtctctacttaagcagtgttgttttaaatgttactggataattgtaacataatcaaattaaattttatatttaactgatacccaagcatttgatgaaaacatgttgcaggaatgggagagtattccatagcttttgttttattgtgatttgattaaatgtgacaactaatagtttaaagacaggacttcactgttttagctgatttcctgtagaaagtgtggctaagtttaattgaaagaaatgtcttcttactagaactgattttgggggactttatccactcttacttggaacactaactgttggctataagggttcaaaaaggaagcaacagttgcttatttggcatgttgaaatatcactggctattttagagtatgaagcaaactttatcaatatgttttcttttccctccttacacacaatgtagactgatagaaaattagttttagttcttctagaatttatataaattttgtaagctcccacccatgacctgccgacagtgttgcccaccggaacttttgtggcccctaccgctcagcccttcccagcacttctcccactttgtcccgagcctccttctcccccagcaggggcacaggcctggcacctccctgccttgtgtcctgagccatagtgactcttttatctgtgtgtcttttgctaaatatgccctttttatattaataaaagatgatttggagttgtgctctca

SEQ ID NO: 378232 - DNA, 1576 bp, Homo sapiens
ggggcgcagggctcgggacgtcaaagccctgcgtccttcggcccccagagcggagaagcgcgcaaggcaccggtggcagcggcgacggcagctgcgacagcaacccctgctgggccgaaactgggcagagcggagcagacgtctgaagcagcgcgagtgaggcgcgagggtagcgcccgcgcccgggaagacccctcggcgcgaaccggcagcccagccccgggtcccggttcccaaggccccgcctctagggcctggggactaatcggattgagagcgcgccggcccgggccgcgaactcgccaattgcggagggcggtggccaccgcccaatccggagcagacaggtgcgaggtccggaaggcggaggccaatcggcggcggttgcgacctgctggggcaggtctcggccaataaggaggctcgagtgacatcttcgcgcaccaatcgggagtgagggagcattcgtgcccgctcgcccttccggccagacctctatttaccaggggcgtgcagcccgcttgccaatcagagcgcggctgagcggccccgcagccaacccccgaggagcggccggctggcgtccgccgcgcccaggagttggggatgtcctacaaacccatcgcccctgctcccagcagcacccctggctccagcacccctgggccgggcaccccggtccctacaggtgaggatccagctccacccctgctcgcctgccgggcggtcgaggtctcgaagagaagacggcctgagttctgcaatactgggcctgccgcctaccctcgctgagcctcagtttgctggcctgtgaagtgggcgtggtcacgaagcgtcccgtcgccgtcgggctcagtgccaggagccggcgctcctttcagaccgctgtttaacgactttggaccgccttccatgggctacgtgcaggcgatgaagccacccggcgcccagggctcccagagcacctacacggacctgctgtcagtcatagaggagatgggcaaagagatccggcctacctatgctggcagcaagagcgccatggagcgcctgaagagaggtatcatccatgcccgggccctagtcagagagtgcctggcagagacagagcggaacgcccgcacgtaacaggaagcgcctcggcctcagcgtctggacctatccggccactgcagagcacccgcttctccctggccttcatcccgagttgcactaaccatcctgggcttcctgtcctgtgtcccttggtgggtcccctccaggaaccaaggagtggccctccaggtggcagcactaaggacacccccccacaacaagagttagcagcgaggtccccatgagtcccacccatgacctgccgacagtgttgcccaccggaacttttgtggcccctaccgctcagcccttcccagcacttctcccactttgtcccgagcctccttctcccccagcaggggcacaggcctggcacctccctgccttgtgtcctgagccatagtgactcttttatctgtgtgtcttttgctaaatatgccctttttatattaataaaagatgatttggagttgtgctctca

SEQ ID NO: 378233 - DNA, 934 bp, Homo sapiens
ataggctaggtactgaggcctggtgttaaatcggccgagggagcggccccgcagccaacccccgaggagcggccggctggcgtccgccgcgcccaggagttggggatgtcctacaaacccatcgcccctgctcccagcagcacccctggctccagcacccctgggccgggcaccccggtccctacaggaagcgtcccgtcgccgtcgggctcagtgccaggagccggcgctcctttcagaccgctgtttaacgactttggaccgccttccatgggctacgtgcaggcgatgaagccacccggcgcccagggctcccagagcacctacacggacctgctgtcagtcatagaggagatgggcaaagagatccggcctacctatgctggcagcaagagcgccatggagcgcctgaagagaggtatcatccatgcccgggccctagtcagagagtgcctggcagagacagagcggaacgcccgcacgtaacaggaagcgcctcggcctcagcgtctggacctatccggccactgcagagcacccgcttctccctggccttcatcccgagttgcactaaccatcctgggcttcctgtcctgtgtcccttggtgggtcccctccaggaaccaaggagtggccctccaggtggcagcactaaggacacccccccacaacaagagttagcagcgaggtccccatgagtcccacccatgacctgccgacagtgttgcccaccggaacttttgtggcccctaccgctcagcccttcccagcacttctcccactttgtcccgagcctccttctcccccagcaggggcacaggcctggcacctccctgccttgtgtcctgagccatagtgactcttttatctgtgtgtcttttgctaaatatgccctttttatattaataaaagatgatttggagttgtgctctca

SEQ ID NO: 378234 - DNA, 1307 bp, Homo sapiens
ggggcgcagggctcgggacgtcaaagccctgcgtccttcggcccccagagcggagaagcgcgcaaggcaccggtggcagcggcgacggcagctgcgacagcaacccctgctgggccgaaactgggcagagcggagcagacgtctgaagcagcgcgagtgaggcgcgagggtagcgcccgcgcccgggaagacccctcggcgcgaaccggcagcccagccccgggtcccggttcccaaggccccgcctctagggcctggggactaatcggattgagagcgcgccggcccgggccgcgaactcgccaattgcggagggcggtggccaccgcccaatccggagcagacaggtgcgaggtccggaaggcggaggccaatcggcggcggttgcgacctgctggggcaggtctcggccaataaggaggctcgagtgacatcttcgcgcaccaatcgggagtgagggagcattcgtgcccgctcgcccttccggccagacctctatttaccaggggcgtgcagcccgcttgccaatcagagcgcggctgagcggccccgcagccaacccccgaggagcggccggctggcgtccgccgcgcccaggagttggggatgtcctacaaacccatcgcccctgctcccagcagcacccctggctccagcacccctgggccgggcaccccggtccctacaggaagcgtcccgtcgccgtcgggctcagtgccaggagccggcgctcctttcagaccgctgtttaacgactttggaccgccttccatgggctacgtgcaggcgatgaagccacccggcgcccagggctcccagagcacctacacggacctgctgtcagtcatagaggagatgggcaaagagatccggcctacctatgctggcagcaagagcgccatggagcgcctgaagagaggtatcatccatgcccgggccctagtcagagagtgcctggcagagacagagcggaacgcccgcacgtaacaggaagcgcctcggcctcagcgtctggacctatccggccactgcagagcacccgcttctccctggccttcatcccgagttgcactaaccatcctgggcttcctgtcctgtgtcccttggtgggtcccctccaggaaccaaggagtggccctccaggtggcagcactaaggacacccccccacaacaagagttagcaggggcacaggcctggcacctccctgccttgtgtcctgagccatagtgactcttttatctgtgtgtcttttgctaaatatgccctttttatattaataaaagatgatttggagttgtgctctca

SEQ ID NO: 378235 - DNA, 1386 bp, Homo sapiens
ggggcgcagggctcgggacgtcaaagccctgcgtccttcggcccccagagcggagaagcgcgcaaggcaccggtggcagcggcgacggcagctgcgacagcaacccctgctgggccgaaactgggcagagcggagcagacgtctgaagcagcgcgagtgaggcgcgagggtagcgcccgcgcccgggaagacccctcggcgcgaaccggcagcccagccccgggtcccggttcccaaggccccgcctctagggcctggggactaatcggattgagagcgcgccggcccgggccgcgaactcgccaattgcggagggcggtggccaccgcccaatccggagcagacaggtgcgaggtccggaaggcggaggccaatcggcggcggttgcgacctgctggggcaggtctcggccaataaggaggctcgagtgacatcttcgcgcaccaatcgggagtgagggagcattcgtgcccgctcgcccttccggccagacctctatttaccaggggcgtgcagcccgcttgccaatcagagcgcggctgagcggccccgcagccaacccccgaggagcggccggctggcgtccgccgcgcccaggagttggggatgtcctacaaacccatcgcccctgctcccagcagcacccctggctccagcacccctgggccgggcaccccggtccctacaggtgaggatccagctccacccctgctcgcctgccgggcggtcgaggtctcgaagagaagacggcctgagttctgcaatactgggcctgccgcctaccctcgctgagcctcagtttgctggcctgtgaagtgggcgtggtcacgtaagggcttgtaggtggagcgcagtgggagggatttgtccctgaagttgatcagcatggaatgaagcatcctttggagggaatcgggcgaacccggtcctgggcttggaaaagctgggaggcggcgtccctgccccgcgctgacctcttactcgcgcctgttgctgcaggaagcgtcccgtcgccgtcgggctcagtgccaggagccggcgctcctttcagaccgctgtttaacgactttggaccgccttccatgggctacgtgcaggcgatgaagccacccggcgcccagggctcccagagcacctacacggacctgctgtcagtcatagaggagatgggcaaagagatccggcctacctatgctggcagcaagagcgccatggagcgcctgaagagagaggtaagtgaggccaggccgccctgctcaggaaaccgacactggactatccttcatgagggaaggaaggacatctggaggccacctgagccaagcctagaggatgtccagtattactaccagagaggtgttttgaatcgaattgaaattgagtcca

SEQ ID NO: 378236 - DNA, 1605 bp, Homo sapiens
  misc_feature (1600)..(1600): n is a, c, g, or t
ggggcgcagggctcgggacgtcaaagccctgcgtccttcggcccccagagcggagaagcgcgcaaggcaccggtggcagcggcgacggcagctgcgacagcaacccctgctgggccgaaactgggcagagcggagcagacgtctgaagcagcgcgagtgaggcgcgagggtagcgcccgcgcccgggaagacccctcggcgcgaaccggcagcccagccccgggtcccggttcccaaggccccgcctctagggcctggggactaatcggattgagagcgcgccggcccgggccgcgaactcgccaattgcggagggcggtggccaccgcccaatccggagcagacaggtgcgaggtccggaaggcggaggccaatcggcggcggttgcgacctgctggggcaggtctcggccaataaggaggctcgagtgacatcttcgcgcaccaatcgggagtgagggagcattcgtgcccgctcgcccttccggccagacctctatttaccaggggcgtgcagcccgcttgccaatcagagcgcggctgagcggccccgcagccaacccccgaggagcggccggctggcgtccgccgcgcccaggagttggggatgtcctacaaacccatcgcccctgctcccagcagcacccctggctccagcacccctgggccgggcaccccggtccctacaggaagcgtcccgtcgccgtcgggctcagtgccaggagccggcgctcctttcagaccgctgtttaacgactttggaccgccttccatgggctacgtgcaggcgatgaagccacccggcgcccagggctcccagagcacctacacggacctgctgtcagtcatagaggagatgggcaaagagatccggcctacctatgctggcagcaagagcgccatggagcgcctgaagagaggtatcatccatgcccgggccctagtcagagagtgcctggcagagacagagcggaacgcccgcacgtaacaggaagcgcctcggcctcagcgtctggacctatccggccactgcagagcacccgcttctccctggccttcatcccgagttgcactaaccatcctgggcttcctgtcctgtgtcccttggtgggtcccctccaggaaccaaggagtggccctccaggtggcagcactaaggacacccccccacaacaagagttagcagcgaggtccccatgagtcccacccatgacctgccgacagtgttgcccaccggaacttttgtggcccctaccgctcagcccttcccagcacttctcccactttgtcccgagcctccttctcccccagcaggggcacaggcctggcacctccctgccttgtgtcctgagccatagtgactcttttatctgtgtgtcttttgctaaatatgccctttttatattaataaaagatgatttggagttgtgctctcaaaaaaaaaaaaaaactcgtgccgaattcggcacgaggctctagggagattcttcaagcaatcactatgtcaacagacacaggtgcttcccttccttcatatgaggaagatcagggatcaaaactcattcgtcgtgcatatggattatataaactgaagagcaggngaact

SEQ ID NO: 378237 - DNA, 1746 bp, Homo sapiens
ggggcgcagggctcgggacgtcaaagccctgcgtccttcggcccccagagcggagaagcgcgcaaggcaccggtggcagcggcgacggcagctgcgacagcaacccctgctgggccgaaactgggcagagcggagcagacgtctgaagcagcgcgagtgaggcgcgagggtagcgcccgcgcccgggaagacccctcggcgcgaaccggcagcccagccccgggtcccggttcccaaggccccgcctctagggcctggggactaatcggattgagagcgcgccggcccgggccgcgaactcgccaattgcggagggcggtggccaccgcccaatccggagcagacaggtgcgaggtccggaaggcggaggccaatcggcggcggttgcgacctgctggggcaggtctcggccaataaggaggctcgagtgacatcttcgcgcaccaatcgggagtgagggagcattcgtgcccgctcgcccttccggccagacctctatttaccaggggcgtgcagcccgcttgccaatcagagcgcggctgagcggccccgcagccaacccccgaggagcggccggctggcgtccgccgcgcccaggagttggggatgtcctacaaacccatcgcccctgctcccagcagcacccctggctccagcacccctgggccgggcaccccggtccctacaggtgaggatccagctccacccctgctcgcctgccgggcggtcgaggtctcgaagagaagacggcctgagttctgcaatactgggcctgccgcctaccctcgctgagcctcagtttgctggcctgtgaagtgggcgtggtcacgtaagggcttgtaggtggagcgcagtgggagggatttgtccctgaagttgatcagcatggaatgaagcatcctttggagggaatcgggcgaacccggtcctgggcttggaaaagctgggaggcggcgtccctgccccgcgctgacctcttactcgcgcctgttgctgcaggaagcgtcccgtcgccgtcgggctcagtgccaggagccggcgctcctttcagaccgctgtttaacgactttggaccgccttccatgggctacgtgcaggcgatgaagccacccggcgcccagggctcccagagcacctacacggacctgctgtcagtcatagaggagatgggcaaagagatccggcctacctatgctggcagcaagagcgccatggagcgcctgaagagaggtatcatccatgcccgggccctagtcagagagtgcctggcagagacagagcggaacgcccgcacgtaacaggaagcgcctcggcctcagcgtctggacctatccggccactgcagagcacccgcttctccctggccttcatcccgagttgcactaaccatcctgggcttcctgtcctgtgtcccttggtgggtcccctccaggaaccaaggagtggccctccaggtggcagcactaaggacacccccccacaacaagagttagcagcgaggtccccatgagtcccacccatgacctgccgacagtgttgcccaccggaacttttgtggcccctaccgctcagcccttcccagcacttctcccactttgtcccgagcctccttctcccccagcaggggcacaggcctggcacctccctgccttgtgtcctgagccatagtgactcttttatctgtgtgtcttttgctaaatatgccctttttatattaataaaagatgatttggagttgtgctctca

SEQ ID NO: 378238 - DNA, 1416 bp, Homo sapiens
ggggcgcagggctcgggacgtcaaagccctgcgtccttcggcccccagagcggagaagcgcgcaaggcaccggtggcagcggcgacggcagctgcgacagcaacccctgctgggccgaaactgggcagagcggagcagacgtctgaagcagcgcgagtgaggcgcgagggtagcgcccgcgcccgggaagacccctcggcgcgaaccggcagcccagccccgggtcccggttcccaaggccccgcctctagggcctggggactaatcggattgagagcgcgccggcccgggccgcgaactcgccaattgcggagggcggtggccaccgcccaatccggagcagacaggtgcgaggtccggaaggcggaggccaatcggcggcggttgcgacctgctggggcaggtctcggccaataaggaggctcgagtgacatcttcgcgcaccaatcgggagtgagggagcattcgtgcccgctcgcccttccggccagacctctatttaccaggggcgtgcagcccgcttgccaatcagagcgcggctgagcggccccgcagccaacccccgaggagcggccggctggcgtccgccgcgcccaggagttggggatgtcctacaaacccatcgcccctgctcccagcagcacccctggctccagcacccctgggccgggcaccccggtccctacaggaagcgtcccgtcgccgtcgggctcagtgccaggagccggcgctcctttcagaccgctgtttaacgactttggaccgccttccatgggctacgtgcaggcgatgaagccacccggcgcccagggctcccagagcacctacacggacctgctgtcagtcatagaggagatgggcaaagagatccggcctacctatgctggcagcaagagcgccatggagcgcctgaagagagcctagtcagagagtgcctggcagagacagagcggaacgcccgcacgtaacaggaagcgcctcggcctcagcgtctggacctatccggccactgcagagcacccgcttctccctggccttcatcccgagttgcactaaccatcctgggcttcctgtcctgtgtcccttggtgggtcccctccaggaaccaaggagtggccctccaggtggcagcactaaggacacccccccacaacaagagttagcagcgaggtccccatgagtcccacccatgacctgccgacagtgttgcccaccggaacttttgtggcccctaccgctcagcccttcccagcacttctcccactttgtcccgagcctccttctcccccagcaggggcacaggcctggcacctccctgccttgtgtcctgagccatagtgactcttttatctgtgtgtcttttgctaaatatgccctttttatattaataaaagatgatttggagttgtgctctca

SEQ ID NO: 378239 - DNA, 1296 bp, Homo sapiens
ggggcgcagggctcgggacgtcaaagccctgcgtccttcggcccccagagcggagaagcgcgcaaggcaccggtggcagcggcgacggcagctgcgacagcaacccctgctgggccgaaactgggcagagcggagcagacgtctgaagcagcgcgagtgaggcgcgagggtagcgcccgcgcccgggaagacccctcggcgcgaaccggcagcccagccccgggtcccggttcccaaggccccgcctctagggcctggggactaatcggattgagagcgcgccggcccgggccgcgaactcgccaattgcggagggcggtggccaccgcccaatccggagcagacaggtgcgaggtccggaaggcggaggccaatcggcggcggttgcgacctgctggggcaggtctcggccaataaggaggctcgagtgacatcttcgcgcaccaatcgggagtgagggagcattcgtgcccgctcgcccttccggccagacctctatttaccaggggcgtgcagcccgcttgccaatcagagcgcggctgagcggccccgcagccaacccccgaggagcggccggctggcgtccgccgcgcccaggagttggggatgtcctacaaacccatcgcccctgctcccagcagcacccctggctccagcacccctgggccgggcaccccggtccctacaggtgaggatccagctccacccctgctcgcctgccgggcggtcgaggtctcgaagagaagacggcctgagttctgcaatactgggcctgccgcctaccctcgctgagcctcagtttgctggcctgtgaagtgggcgtggtcacgtaagggcttgtaggtggagcgcagtgggagggatttgtccctgaagttgatcagcatggaatgaagcatcccgcttctccctggccttcatcccgagttgcactaaccatcctgggcttcctgtcctgtgtcccttggtgggtcccctccaggaaccaaggagtggccctccaggtggcagcactaaggacacccccccacaacaagagttagcagcgaggtccccatgagtcccacccatgacctgccgacagtgttgcccaccggaacttttgtggcccctaccgctcagcccttcccagcacttctcccactttgtcccgagcctccttctcccccagcaggggcacaggcctggcacctccctgccttgtgtcctgagccatagtgactcttttatctgtgtgtcttttgctaaatatgccctttttatattaataaaagatgatttggagttgtgctctca

SEQ ID NO: 378240 - DNA, 311 bp, Homo sapiens
agggcttattttttatgttagacatcaatgtcaatgttactacattctcggatgctaacataaattttgaaattgctcttgtgctttaagcatatattgaaagtatggaagttaaatgttcaggcttttcagtaagctcaaaaagttaactgtaagcgatagtgttggtgttttctaaaatacaaaaatgttccagtgtaattaaaaggaattaaaatcttgaagatattttcctgtaatttaaggatactttttaaatgtaagaaaagacatgtcattaatttattgtcatgtttatacctctgtgagat

SEQ ID NO: 378241 - DNA, 354 bp, Homo sapiens
ttgagatggagtgttgctctgtcgcccaggctggagtacagtggcgcaatctcggctcactgtgatctctgtctcctgggttcaagtgattctcctgccacagcctcctgagtagctgggattacaggcgtgtgccaccatgcccagctaatttttctatttttagtacagatggggtttcaccatgttggtcaggctggtctcgaactcctgaccttgtgatccacttgcctcagcctcccaaagtgctgggattataggcatgagccaacgtgcctggccctttttttccttcataattgagatttcactggttgtgttgaagatcagtacacagacatttcaatttgtacc

SEQ ID NO: 378242 - DNA, 416 bp, Homo sapiens
  misc_feature (30)..(30): n is a, c, g, or t
  misc_feature (43)..(43): n is a, c, g, or t
  misc_feature (52)..(52): n is a, c, g, or t
  misc_feature (63)..(63): n is a, c, g, or t
  misc_feature (159)..(159): n is a, c, g, or t
  misc_feature (161)..(161): n is a, c, g, or t
  misc_feature (163)..(163): n is a, c, g, or t
  misc_feature (165)..(165): n is a, c, g, or t
  misc_feature (168)..(168): n is a, c, g, or t
ccagctggccgaaaagggggatgtgcctgncaaagccgaattnaagttgggntaaacgccccnggttttccccaagtccacgacgttgtaaaaacgacgggcccaagtggaattgtaaatacgactcaactaatagggcgaaattgggtacccgggccncncncnccnccgcgaattcggcacgagtaacggtttaattctgtcttgttcattttgagtatttttaaaaaatatgtcgtagaattccttcgaaaggccttcagacacatgctatgttctgtcttcccaaacccagtctcctctccattttagcccagtgttttctttgaggaccccttaatcttgctttctttagaatttttacccaattggattggaatgcagaggtctccaaactgattaaatatttgaagaga

SEQ ID NO: 378243 - DNA, 2766 bp, Homo sapiens
ttctgcccgggcgctcgcagccgagcgcggccggggaagggctctcctcccagcgccgagcactgggccctggcagacgccccaagattgttgtgaggagtctagccagttggtgagcgctgtaatctgaaccagctgtgtccagactgaggccccatttgcattgtttaacatacttagaaaatgaagtgttcatttttaacattcctcctccaattggtttaatgctgaattactgaagagggctaagcaaaaccaggtgcttgcgctgagggctctgcagtggctgggaggaccccggcgctctccccgtgtcctctccacgactcgctcggcccctctggaataaaacacccgcgagccccgagggcccagaggaggccgacgtgcccgagctcctccgggggtcccgcccgcgagctttcttctcgccttcgcatctcctcctcgcgcgtcttggacatgccaggaataaaaaggatactcactgttaccattctggctctctgtcttccaagccctgggaatgcacagcaacaggagagatggacccctgtgtgtcagccctgaaatgtgggcagatccctcctgaaaactccgagtggcctctctgtgtctctggctcaggaaagaagtgagagaagccctatctctgagcaggctgagggctgcaggcaggcacagtgcacgaatggctttgacctggatcgccagtcaggacagtgtttagatattgatgaatgccgaaccatccccgaggcctgccgaggagacatgatgtgtgttaaccaaaatggcgggtatttatgcattccccggacaaaccctgtgtatcgagggccctactcgaacccctactcgaccccctactcaggtccgtacccagcagctgccccaccactctcagctccaaactatcccacgatctccaggcctcttatatgccgctttggataccagatggatgaaagcaaccaatgtgtggatgtggacgagtgtgcaacagattcccaccagtgcaaccccacccagatctgcatcaatactgaaggcgggtacacctgctcctgcaccgacggatattggcttctggaaggccagtgcttagacattgatgaatgtcgctatggttactgccagcagctctgtgcgaatgttcctggatcctattcttgtacatgcaaccctggttttaccctcaatgaggatggaaggtcttgccaagatgtgaacgagtgtgccaccgagaacccctgcgtgcaaacctgcgtcaacacctacggctctttcatctgccgctgtgacccaggatatgaacttgaggaagatggcgttcattgcagtgatatggacgagtgcagcttctctgagttcctctgccaacatgagtgtgtgaaccagcccggcacatacttctgctcctgccctccaggctacatcctgctggatgacaaccgaagctgccaagacatcaacgaatgtgagcacaggaaccacacgtgcaacctgcagcagacgtgctacaatttacaagggggcttcaaatgcatcgaccccatccgctgtgaggagccttatctgaggatcagtgataaccgctgtatgtgtcctgctgagaaccctggctgcagagaccagccctttaccatcttgtaccgggacatggacgtggtgtcaggacgctccgttcccgctgacatcttccaaatgcaagccacgacccgctaccctggggcctattacattttccagatcaaatctgggaatgagggcagagaattttacatgcggcaaacgggccccatcagtgccaccctggtgatgacacgccccatcaaagggccccgggaaatccagctggacttggaaatgatcactgtcaacactgtcatcaacttcagaggcagctccgtgatccgactgcggatatatgtgtcgcagtacccattctgagcctcgggctggagcctccgacgctgcctctcattggcaccaagggacaggagaagagaggaaataacagagagaatgagagcgacacagacgttaggcatttcctgctgaacgtttccccgaagagtcagccccgacttcctgactctcacctgtactattgcagacctgtcaccctgcaggacttgccacccccagttcctatgacacagttatcaaaaagtattatcattgctcccctgatagaagattgttggtgaattttcaaggccttcagtttatttccactattttcaaagaaaatagattaggtttgcgggggtctgagtctatgttcaaagactgtgaacagcttgctgtcacttcttcacctcttccactccttctctcactgtgttactgctttgcaaagacccgggagctggcggggaaccctgggagtagctagtttgctttttgcgtacacagagaaggctatgtaaacaaaccacagcaggatcgaagggtttttagagaatgtgtttcaaaaccatgcctggtattttcaaccataaaagaagtttcagttgtccttaaatttgtataacggtttaattctgtcttgttcattttgagtatttttaaaaaatatgtcgtagaattccttcgaaaggccttcagacacatgctatgttctgtcttcccaaacccagtctcctctccattttagcccagtgttttctttgaggaccccttaatcttgctttctttagaatttttacccaattggattggaatgcagaggtctccaaactgattaaatatttgaagaga

SEQ ID NO: 378244 - DNA, 1286 bp, Homo sapiens
tttttgagacagggtcttgctctgccgcccaggctggagtggcatatttggcctacgtggcaaatgtaaagtatcttggagaatgttctaatgttctgaaaaccagagatctaagccgctgtatgtgtcctgctgagaaccctggctgcagagaccagccctttaccatcttgtaccgggacatggacgtggtgtcaggacgctccgttcccgctgacatcttccaaatgcaagccacgacccgctaccctggggcctattacattttccagatcaaatctgggaatgagggcagagaattttacatgcggcaaacgggccccatcagtgccaccctggtgatgacacgccccatcaaagggccccgggaaatccagctggacttggaaatgatcactgtcaacactgtcatcaacttcagaggcagctccgtgatccgactgcggatatatgtgtcgcagtacccattctgagcctcgggctggagcctccgacgctgcctctcattggcaccaagggacaggagaagagaggaaataacagagagaatgagagcgacacagacgttaggcatttcctgctgaacgtttccccgaagagtcagccccgacttcctgactctcacctgtactattgcagacctgtcaccctgcaggacttgccacccccagttcctatgacacagttatcaaaaagtattatcattgctcccctgatagaagattgttggtgaattttcaaggccttcagtttatttccactattttcaaagaaaatagattaggtttgcgggggtctgagtctatgttcaaagactgtgaacagcttgctgtcacttcttcacctcttccactccttctctcactgtgttactgctttgcaaagacccgggagctggcggggaaccctgggagtagctagtttgctttttgcgtacacagagaaggctatgtaaacaaaccacagcaggatcgaagggtttttagagaatgtgtttcaaaaccatgcctggtattttcaaccataaaagaagtttcagttgtccttaaatttgtataacggtttaattctgtcttgttcattttgagtatttttaaaaaatatgtcgtagaattccttcgaaaggccttcagacacatgctatgttctgtcttcccaaacccagtctcctctccattttagcccagtgttttctttgaggaccccttaatcttgctttctttagaatttttacccaattggattggaatgcagaggtctccaaactgattaaatatttgaagaga

SEQ ID NO: 378245 - DNA, 1009 bp, Homo sapiens
gcgattctcaagtcaagtcaagacccatgggatgcaaacgggccccatcagtgccaccctggtgatgacacgccccatcaaagggccccgggaaatccagctggacttggaaatgatcactgtcaacactgtcatcaacttcagaggcagctccgtgatccgactgcggatatatgtgtcgcagtacccattctgagcctcgggctggagcctccgacgctgcctctcattggcaccaagggacaggagaagagaggaaataacagagagaatgagagcgacacagacgttaggcatttcctgctgaacgtttccccgaagagtcagccccgacttcctgactctcacctgtactattgcagacctgtcaccctgcaggacttgccacccccagttcctatgacacagttatcaaaaagtattatcattgctcccctgatagaagattgttggtgaattttcaaggccttcagtttatttccactattttcaaagaaaatagattaggtttgcgggggtctgagtctatgttcaaagactgtgaacagcttgctgtcacttcttcacctcttccactccttctctcactgtgttactgctttgcaaagacccgggagctggcggggaaccctgggagtagctagtttgctttttgcgtacacagagaaggctatgtaaacaaaccacagcaggatcgaagggtttttagagaatgtgtttcaaaaccatgcctggtattttcaaccataaaagaagtttcagttgtccttaaatttgtataacggtttaattctgtcttgttcattttgagtatttttaaaaaatatgtcgtagaattccttcgaaaggccttcagacacatgctatgttctgtcttcccaaacccagtctcctctccattttagcccagtgttttctttgaggaccccttaatcttgctttctttagaatttttacccaattggattggaatgcagaggtctccaaactgattaaatatttgaagaga

SEQ ID NO: 378246 - DNA, 656 bp, Homo sapiens
gttcatcattcaatatatgttttctgaacaccttctgtgttcaaggcaccatgctggcttctagggggactcagtggtgaaaagcctgaccccagtacctgttcttacagaactcatagcctagtgggagcctagatatcagacacggatcaggtagacagtatggacaatcatacatggtcataaatgctttccatcctgtacaaagtaaaggctgcagcgtcagaggtcgcagggggacctgacttagattggggaaccagagaaggctcctcttaggaagtgacctttcagatgagacctgaagggtttgcagaaaagaaccaggtggagagtgggcaaagccagggaaagagcatggcacagttgaggcaccgagggggtgccagtttgactgacggaggcaagggagcgcccaggtggggctgcagggccaccatgcaggccttttctcactggtgttccccggttctgtccatagcaaacgggccccatcagtgccaccctggtgatgacacgccccatcaaagggccccgggaaatccagctggacttggaaatgatcactgtcaacactgtcatcaacttcagaggcagctccgtgatccgactgcggatatatgtgtcgcagtacccattctgagcctcgggctgga

SEQ ID NO: 378247 - DNA, 2622 bp, Homo sapiens
ttctgcccgggcgctcgcagccgagcgcggccggggaagggctctcctcccagcgccgagcactgggccctggcagacgccccaagattgttgtgaggagtctagccagttggtgagcgctgtaatctgaaccagctgtgtccagactgaggccccatttgcattgtttaacatacttagaaaatgaagtgttcatttttaacattcctcctccaattggtttaatgctgaattactgaagagggctaagcaaaaccaggtgcttgcgctgagggctctgcagtggctgggaggaccccggcgctctccccgtgtcctctccacgactcgctcggcccctctggaataaaacacccgcgagccccgagggcccagaggaggccgacgtgcccgagctcctccgggggtcccgcccgcgagctttcttctcgccttcgcatctcctcctcgcgcgtcttggacatgccaggaataaaaaggatactcactgttaccattctggctctctgtcttccaagccctgggaatgcacaggcacagtgcacgaatggctttgacctggatcgccagtcaggacagtgtttagatattgatgaatgccgaaccatccccgaggcctgccgaggagacatgatgtgtgttaaccaaaatggcgggtatttatgcattccccggacaaaccctgtgtatcgagggccctactcgaacccctactcgaccccctactcaggtccgtacccagcagctgccccaccactctcagctccaaactatcccacgatctccaggcctcttatatgccgctttggataccagatggatgaaagcaaccaatgtgtggatgtggacgagtgtgcaacagattcccaccagtgcaaccccacccagatctgcatcaatactgaaggcgggtacacctgctcctgcaccgacggatattggcttctggaaggccagtgcttagacattgatgaatgtcgctatggttactgccagcagctctgtgcgaatgttcctggatcctattcttgtacatgcaaccctggttttaccctcaatgaggatggaaggtcttgccaagatgtgaacgagtgtgccaccgagaacccctgcgtgcaaacctgcgtcaacacctacggctctttcatctgccgctgtgacccaggatatgaacttgaggaagatggcgttcattgcagtgatatggacgagtgcagcttctctgagttcctctgccaacatgagtgtgtgaaccagcccggcacatacttctgctcctgccctccaggctacatcctgctggatgacaaccgaagctgccaagacatcaacgaatgtgagcacaggaaccacacgtgcaacctgcagcagacgtgctacaatttacaagggggcttcaaatgcatcgaccccatccgctgtgaggagccttatctgaggatcagtgataaccgctgtatgtgtcctgctgagaaccctggctgcagagaccagccctttaccatcttgtaccgggacatggacgtggtgtcaggacgctccgttcccgctgacatcttccaaatgcaagccacgacccgctaccctggggcctattacattttccagatcaaatctgggaatgagggcagagaattttacatgcggcaaacgggccccatcagtgccaccctggtgatgacacgccccatcaaagggccccgggaaatccagctggacttggaaatgatcactgtcaacactgtcatcaacttcagaggcagctccgtgatccgactgcggatatatgtgtcgcagtacccattctgagcctcgggctggagcctccgacgctgcctctcattggcaccaagggacaggagaagagaggaaataacagagagaatgagagcgacacagacgttaggcatttcctgctgaacgtttccccgaagagtcagccccgacttcctgactctcacctgtactattgcagacctgtcaccctgcaggacttgccacccccagttcctatgacacagttatcaaaaagtattatcattgctcccctgatagaagattgttggtgaattttcaaggccttcagtttatttccactattttcaaagaaaatagattaggtttgcgggggtctgagtctatgttcaaagactgtgaacagcttgctgtcacttcttcacctcttccactccttctctcactgtgttactgctttgcaaagacccgggagctggcggggaaccctgggagtagctagtttgctttttgcgtacacagagaaggctatgtaaacaaaccacagcaggatcgaagggtttttagagaatgtgtttcaaaaccatgcctggtattttcaaccataaaagaagtttcagttgtccttaaatttgtataacggtttaattctgtcttgttcattttgagtatttttaaaaaatatgtcgtagaattccttcgaaaggccttcagacacatgctatgttctgtcttcccaaacccagtctcctctccattttagcccagtgttttctttgaggaccccttaatcttgctttctttagaatttttacccaattggattggaatgcagaggtctccaaactgattaaatatttgaagaga

SEQ ID NO: 378248 - DNA, 2560 bp, Homo sapiens
ttctgcccgggcgctcgcagccgagcgcggccggggaagggctctcctcccagcgccgagcactgggccctggcagacgccccaagattgttgtgaggagtctagccagttggtgagcgctgtaatctgaaccagctgtgtccagactgaggccccatttgcattgtttaacatacttagaaaatgaagtgttcatttttaacattcctcctccaattggtttaatgctgaattactgaagagggctaagcaaaaccaggtgcttgcgctgagggctctgcagtggctgggaggaccccggcgctctccccgtgtcctctccacgactcgctcggcccctctggaataaaacacccgcgagccccgagggcccagaggaggccgacgtgcccgagctcctccgggggtcccgcccgcgagctttcttctcgccttcgcatctcctcctcgcgcgtcttggacatgccaggaataaaaaggatactcactgttaccattctggctctctgtcttccaagccctgggaatgcacaggcacagtgcacgaatggctttgacctggatcgccagtcaggacagtgtttagatattgatgaatgccgaaccatccccgaggcctgccgaggagacatgatgtgtgttaaccaaaatggcgggtatttatgcattccccggacaaaccctgtgtatcgagggccctactcgaacccctactcgaccccctactcaggtccgtacccagcagctgccccaccactctcagctccaaactatcccacgatctccaggcctcttatatgccgctttggataccagatggatgaaagcaaccaatgtgtggatgtggacgagtgtgcaacagattcccaccagtgcaaccccacccagatctgcatcaatactgaaggcgggtacacctgctcctgcaccgacggatattggcttctggaaggccagtgcttagacattgatgaatgtcgctatggttactgccagcagctctgtgcgaatgttcctggatcctattcttgtacatgcaaccctggttttaccctcaatgaggatggaaggtcttgccaagatgtgaacgagtgtgccaccgagaacccctgcgtgcaaacctgcgtcaacacctacggctctttcatctgccgctgtgacccaggatatgaacttgaggaagatggcgttcattgcagtgatatggacgagtgcagcttctctgagttcctctgccaacatgagtgtgtgaaccagcccggcacatacttctgctcctgccctccaggctacatcctgctggatgacaaccgaagctgccaagacatcaacgaatgtgagcacaggaaccacacgtgcaacctgcagcagacgtgctacaatttacaagggggcttcaaatgcatcgaccccatccgctgtgaggagccttatctgaggatcagtgataaccgctgtatgtgtcctgctgagaaccctggctgcagagaccagccctttaccatcttgtaccgggacatggacgtggtgtcaggacgctccgttcccgctgacatcttccaaatgcaagccacgacccgctaccctggggcctattacattttccagatcaaatctgggaatgagggcagagaattttacatgcggcaaacgggccccatcagtgccaccctggtgatgacacgccccatcaaagggccccgggaaatccagctggacttggaaatgatcactgtcaacactgtcatcaacttcagaggcagctccgtgatccgactgcggatatatgtgtcgcagtacccattctgagcctcgggctggagcctccgacgctgcctctcattggcaccaagggacaggagaagagaggaaataacagagagaatgagagcgacacagacgttaggcatttcctgctgaacgtttccccgaagagtcagccccgacttcctgactctcacctgtactattgcagacctgtcaccctgcaggacttgccacccccagttcctatgacacagttatcaaaaagtattatcattgctcccctgatagaagattgttggtgaattttcaaggccttcaaagactgtgaacagcttgctgtcacttcttcacctcttccactccttctctcactgtgttactgctttgcaaagacccgggagctggcggggaaccctgggagtagctagtttgctttttgcgtacacagagaaggctatgtaaacaaaccacagcaggatcgaagggtttttagagaatgtgtttcaaaaccatgcctggtattttcaaccataaaagaagtttcagttgtccttaaatttgtataacggtttaattctgtcttgttcattttgagtatttttaaaaaatatgtcgtagaattccttcgaaaggccttcagacacatgctatgttctgtcttcccaaacccagtctcctctccattttagcccagtgttttctttgaggaccccttaatcttgctttctttagaatttttacccaattggattggaatgcagaggtctccaaactgattaaatatttgaagaga

SEQ ID NO: 378249 - DNA, 972 bp, Homo sapiens
ctctttttaccacactgtctatatactgcatgagccatttatatgaaactatctgacactccaaggcatcttatactatatattcaaccatgtatccctagtacctagcacagtcctggcatatagtttgctactaaacttttacagaatgaaggaattatcttgtatccagtttccaagttttaaggtgattcttcactaaaaaaaaagtattacagttcacaaataacctacttccctttttacaaatgggatcaattttaatcttatctcctaataacattactttcatttactctgatctaaatatactgtcctaagagagcaatagcggagagagagccggacagactccattttagtttcttcacgtgcagccccctttaccttccacccttaattgcataactagtgtaaactaactcaaagcaggtccaggaatgcacttactgataagatattgaggcaagctgcaccagctgctcctgggtacgcactcggtgaatgtcacgcaaaacccctgcatttctctctttgtgatagtttaagcccctgcacctggaactgtttatttgttttgtaactgctattgtaaccaattaatattttaactatttgccagctctgcttctgtaaaacttgtttcagctaaactcccccctcccctatttagaccacggtataaaaacaaaaccagccccttcctcggggccaagagaattttgagcattacatgcctctcggttgccggctaataaaggactccttaatttgtctcaaagtgtggcgttcctctataactcgcttggttacaacagtccacactgtggcctgaggtgcatcgcccacctgagcttcatctgttatgtatgtcagggaatataagcagggtgagagtggcctcatcagaggaccccagatctctggcttacccatctggcaagcgcacctctgtgagcaaagacttcagag

SEQ ID NO: 378250 - DNA, 875 bp, Homo sapiens
gcgacagcgacagagcctggagagggaggctctgctcaggatttatccccagtgccttatttagttcacttggtgaggtcatgttttcctggatggtgttgatgctagtagatgttcttcagtgtctggacattaaaatcttgggcatgcagcaccatatgagaagtttaaaaaataaaatttaaagagagaaaagtggtgggattgctgaatcagacggagccaatagatgatcagtaatggtggccaatcatcagctagaaagaaagtgcttagcagggcttgaaaacaccaaaactctgagaccactgaccttcaaaaacttcaacagccctgagtgaaaagcccaaacacatttatctaccattcaaagacgcttcattgtctgttctctgtgcatctcagtagtctctttttaccacactgtctatatactgcatgagccatttatatgaaactatctgacactccaaggcatcttatactatatattcaaccatgtatccctagtacctagcacagtcctggcatatagtttgctactaaacttttacagaatgaaggaattatcttgtatccagtttccaagttttaaggtgattcttcactaaaaaaaaagtattacagttcacaaataacctacttccctttttacaaatgggatcaattttaatcttatctcctaataacattactttcatttactctgatctaaatatactgtcctaagagagcaataagaaagagagttgaagctggagtttgaagaattgtacatggtcctgtgataccctaccttgttttaacctgagtgactctctcctagcggagagagagccggacagactccattttagtttcttcacgtgcagccc

SEQ ID NO: 378251 - DNA, 266 bp, Homo sapiens
  misc_feature (221)..(221): n is a, c, g, or t
  misc_feature (223)..(223): n is a, c, g, or t
aacatgcgaacggactgatccaacaatctcagtctgtaaagcagttacttccaagtggaaacggaaggtcttatgggcttgggtcagagcagaggtcccaggcaccagcaagatactccctgcagtctgctaatgcctcttctctctcatcgggccagttaaagtctccttccctctctcagtcacaggcatccagagtgttaggtcagtccagttcgcangntggggatactctagatcgactatcagaatcaggtgcactgccg

SEQ ID NO: 378252 - DNA, 4703 bp, Homo sapiens
ctgaggtgagaggatcacttgagcccagaaggttgaggctatggtgaatcgtgagtgcactgcagtcaatgaaccatgagtgcactgcactccagcctgcgcgacagagtaagactctgtcttaagaaaaggaaggaaggatggatggatggatatatcaagccatatgcacatgaaagcaggtgtgtgtctgtgtgtgtacacactagctgaggatatctatgcaccttttttgtcagatgggtaggttttatgatcctatcatcagtggaattagtaaatattacaagttgtacgtgttttgactttgacttaaatttttttttccaatagaaactatgttccaacttcctgtcaacaatcttggcagtttaagaaaagcccggaaaactgtgaaaaaaatacttagtgacattgggttggaatactgtaaagaacatatagaagattttaaacaatttgaacctaatgacttttatttgaaaaacactacatgggaggatgtaggactgtgggacccatcacttacgaaaaaccaggactatcggacaaaacctttctgctgcagcgcttgtccattttcctcaaaattcttctctgcctacaaaagtcatttccgcaatgtccatagtgaagactttgaaaataggattctccttaattgcccctactgtaccttcaatgcagacaaaaagactttggaaacacacattaaaatatttcatgctccgaacgccagcgcaccaagtagcagcctcagcactttcaaagataaaaacaaaaatgatggccttaaacctaagcaggctgacagtgtagagcaagctgtttattactgtaagaagtgcacttaccgagatcctctttatgaaatagttaggaagcacatttacagggaacattttcagcatgtggcagcaccttacatagcaaaggcaggagaaaaatcactcaatggggcagtccccttaggctcgaatgcccgagaagagagtagtattcactgcaagcgatgccttttcatgccaaagtcctatgaagctttggtacagcatgtcatcgaagaccatgaacgtataggctatcaggtcactgccatgattgggcacacaaatgtagtggttccccgatccaaacccttgatgctaattgctcccaaacctcaagacaagaagagcatgggactcccaccaaggatcggttcccttgcttctggaaatgtccggtctttaccatcacagcagatggtgaatcgactctcaataccaaagcctaacttaaattctacaggagtcaacatgatgtccagtgttcatctgcagcagaacaactatggagtcaaatctgtaggccagggttacagtgttggtcagtcaatgagactgggtctaggtggcaacgcaccagtttccattcctcaacaatctcagtctgtaaagcagttacttccaagtggaaacggaaggtcttatgggcttgggtcagagcagaggtcccaggcaccagcaagatactccctgcagtctgctaatgcctcttctctctcatcgggccagttaaagtctccttccctctctcagtcacaggcatccagagtgttaggtcagtccagttccaaacctgctgcagctgccacaggccctcccccaggtaacacttcctcaactcaaaagtggaaaatatgtacaatctgtaatgagctttttcctgaaaatgtctatagtgtgcacttcgaaaaagaacataaagctgagaaagtcccagcagtagccaactacattatgaaaatacacaattttactagcaaatgcctctactgtaatcgctatttacccacagatactctgctcaaccatatgttaattcatggtctgtcttgtccatattgccgttcaactttcaatgatgtggaaaagatggccgcacacatgcggatggttcacattgatgaagagatgggacctaaaacagattctactttgagttttgatttgacattgcagcagggtagtcacactaacatccatctcctggtaactacatacaatctgagggatgccccagctgaatctgttgcttaccatgcccaaaataatcctccagttcctccaaagccacagccaaaggttcaggaaaaggcagatatccctgtaaaaagttcacctcaagctgcagtgccctataaaaaagatgttgggaaaaccctttgtcctctttgcttttcaatcctaaaaggacccatatctgatgcacttgcacatcacttacgagagaggcaccaagttattcagacggttcatccagttgagaaaaagctcacctacaaatgtatccattgccttggtgtgtataccagcaacatgaccgcctcaactatcactctgcatctagttcactgcaggggcgttggaaagacccaaaatggccaggataagacaaatgcaccctctcggcttaatcagtctccaagtctggcacctgtgaagcgcacttacgagcaaatggaatttcccttactgaaaaaacgaaagttagatgatgatagtgattcacccagcttctttgaagagaagcctgaagagcctgttgttttagctttagaccccaagggtcatgaagatgattcctatgaagccaggaaaagctttctaacaaagtatttcaacaaacagccctatcccaccaggagagaaattgagaagctagcagccagtttatggttatggaagagtgacatcgcttcccattttagtaacaaaaggaagaagtgtgtccgtgattgtgaaaagtacaagcctggcgtgttgctggggtttaacatgaaagaattaaataaagtcaagcatgagatggattttgatgctgagtggctatttgaaaatcatgatgagaaggattccagagtcaatgctagtaagactgctgacaaaaagctcaaccttgggaaggaagatgacagttcctcagacagttttgaaaatttggaagaagaatccaatgaaagtggtagcccttttgaccctgtttttgaagttgaacctaaaatctctaacgataacccagaggaacatgtactgaaggtaattcctgaggatgcttcagaatctgaggagaagctagaccaaaaagaggatggttcaaaatacgaaactattcatttgactgaggaaccaaccaaactaatgcacaatgcatctgatagtgaggttgaccaagacgatgttgttgagtggaaagacggtgcttctccatctgagagtgggcctggatcccaacaagtgtcagactttgaggacaatacctgcgaaatgaaaccaggaacctggtctgacgagtcttcccaaagcgaagatgcaaggagcagtaagccagctgccaaaaaaaaggctaccatgcaaggtgacagagagcagttgaaatggaagaatagttcctatggaaaagttgaagggttttggtctaaggaccagtcacagtggaagaatgcatctgagaatgatgagcgcttatctaacccccagattgagtggcagaatagcacaattgacagtgaggatggggaacagtttgacaacatgactgatggagtagctgagcccatgcatggcagcttagccggagttaaactgagcagccaacaggcctaagtgccaggttccctggcgttggtgacatgctgcagcctggaactctgatctccagtgtgactgcaaagctgtcttctcactggtactgccttgtgagtactggttggactgtggggcatgtggccgctgcagttccagtggttatttctaagtctatgacaggacaggctgttcttgcttcagaaccttctctgacagacacggtaactaaatgtgaaaaaccaataagctggtgactcatgaatacacacgaggaaaagcagaggtttattttatctgccttttcaacatttctttccctctgtgaaatgattggtcagatgtctttgagaagtgttaaactaattcacatggtagtgtagggccaacatacaagctaccagtctaatgtgtatagtagactttgggaaaagcgattttttttcatgtattcattctgaatagttgaaatgtatatttgtacagtcttttagacctattcaagtgatgctcatgatcctgttactgtgtgcccatcatagatttctttttttagtgttgcccttgctgtgtaataaacgctctatctagtttacctagcaaaagctcaaaactgcgctagtatggactttttggacagacttagtttttgcacataaccttgtacaatcttgcaacagaggccagccacgtaagatatatatctggactctcttgtattataggatttttcttgttctgaatatccttgacattacagctgtcaaaaacaaaaactggtatttcagatctgttttctgaaatcttttaagctaaaatcacatgcaagaattgactttgcagctactaattttgacaccttttagatctgtataaaagtgtgttgtgttgaagcagcaaaccaatgagtgctgcattttggatatttagttttatctttagttcaacaccatcatggtggattcatttataccatctaatatatgacacactgttgtagtatgtataattttgtgatctttattttccctttgtattcattttaagcatctaaataaattgctgtattgtgcttaa

SEQ ID NO: 378253 - DNA, 6482 bp, Homo sapiens
ctgaggtgagaggatcacttgagcccagaaggttgaggctatggtgaatcgtgagtgcactgcagtcaatgaaccatgagtgcactgcactccagcctgcgcgacagagtaagactctgtcttaagaaaaggaaggaaggatggatggatggatatatcaagccatatgcacatgaaagcaggtgtgtgtctgtgtgtgtacacactagctgaggatatctatgcaccttttttgtcagatgggtaggttttatgatcctatcatcagtggaattagtaaatattacaagttgtacgtgttttgactttgacttaaatttttttttccaatagaaactatgttccaacttcctgtcaacaatcttggcagtttaagaaaagcccggaaaactgtgaaaaaaatacttagtgacattgggttggaatactgtaaagaacatatagaagtaagtagcatgtcatttttaaattttaacatgactcagcttctgatccattactttgtgtcagtggccaagatggctaaatcttagatgtgattctgaatttcagccacagcagtagcttcacgaaaacattctcaatagcattaacttgtgcctttctccctaaaatgggctttttcatttttgcatcctgaagcagaaggctaccattgaggacttaagcatgtcaggcgttgaactaggtgccgtaaagttgtctatacatttaatccttagaacaaccatggaggcgggaggcagtgtagcagttcttatctccacttcacagatgaagaacaaataaataggcccagccttgcagctgagaaagtggcagtgtctgtgggactcaaagcctgttctcattctgatacgcctgaatgttctggttgaccttcttctaattgttgaggcgtgcttgtgtgggtgcttgttgtctctttccttaggatttgagcatttgttgccccttttgacccatcatagactattactttcccccttgtataacagtttgggctttatgaactgtttttcaagctgttttattctatgagctttataacagctctgtgggatagccatgcagtggtctccttttcaacatctcactgttccaggtcttatggtttgttggtcagagcccctgattgaaaagaaatgtttgaagctgtttcccccactaacctttaagttctaggtggctagggaacatagctaccttgtttatccatttagccccagcacctagcacagtgttttgcacgtaataggtgatcagtaagtgtttgaatggaattggaagtaaaaaagcaaattcattcatacaacaggttttcttaatttgagttccactaataatacttgaagagtatggcatggaaacagaagctgctcaaaagttgacttctctagtcacgttgttccaagtgtggaagtagcccttctccaaccccagagttcaggtagatctgcccaaatgaaacagtccattcactttgcactctgtggggtcatcttcatagaaataattaataccaacatcacagtacatttctgtcatgcatttgatttgttcctcctatgattatttatgtgtagacttcattttccaccttgaactgtgaactttttaggaacaagtgggattttaccctaagacttttaatcttcctagtctggagggaagtggaccattaaatttttacatgagagtataaatttaacatcatactgcttaactttctttgaatagctttctttctgcctttttgggtttgaaatttgagttttcttcctgatctgatctcctgccccctcccctcgaaaaaaatcttttttttgcacagaaccagaaatcatatttgcagtgctgtaagcaaacattgctattttaaacaccattccagtactgcaactgacgagttagagtacagtactctaatgaaaagtgctttgatattagtgtgtggctgaattttttacttaattagaacttccagcaatttccttggaaacctgactgaccatcaggaaagtggttggttgatataaaatgtagactgcaacttccatatgcctttttatatttaagagccttatcactcctagtttaagtccttgttgacgttggttttcctgtgcctctccccatcttagttaagaggtgagatttacatgtaagattgggttagcgtttataccactatgtttttgtaaacttatttcactgttttctaggattttaaacaatttgaacctaatgacttttatttgaaaaacactacatgggaggatgtaggactgtgggacccatcacttacgaaaaaccaggactatcggacaaaacctttctgctgcagcgcttgtccattttcctcaaaattcttctctgcctacaaaagtcatttccgcaatgtccatagtgaagactttgaaaataggattctccttaattgcccctactgtaccttcaatgcagacaaaaagactttggaaacacacattaaaatatttcatgctccgaacgccagcgcaccaagtagcagcctcagcactttcaaagataaaaacaaaaatgatggccttaaacctaagcaggctgacagtgtagagcaagctgtttattactgtaagaagtgcacttaccgagatcctctttatgaaatagttaggaagcacatttacagggaacattttcagcatgtggcagcaccttacatagcaaaggcaggagaaaaatcactcaatggggcagtccccttaggctcgaatgcccgagaagagagtagtattcactgcaagcgatgccttttcatgccaaagtcctatgaagctttggtacagcatgtcatcgaagaccatgaacgtataggctatcaggtcactgccatgattgggcacacaaatgtagtggttccccgatccaaacccttgatgctaattgctcccaaacctcaagacaagaagagcatgggactcccaccaaggatcggttcccttgcttctggaaatgtccggtctttaccatcacagcagatggtgaatcgactctcaataccaaagcctaacttaaattctacaggagtcaacatgatgtccagtgttcatctgcagcagaacaactatggagtcaaatctgtaggccagggttacagtgttggtcagtcaatgagactgggtctaggtggcaacgcaccagtttccattcctcaacaatctcagtctgtaaagcagttacttccaagtggaaacggaaggtcttatgggcttgggtcagagcagaggtcccaggcaccagcaagatactccctgcagtctgctaatgcctcttctctctcatcgggccagttaaagtctccttccctctctcagtcacaggcatccagagtgttaggtcagtccagttccaaacctgctgcagctgccacaggccctcccccaggtaacacttcctcaactcaaaagtggaaaatatgtacaatctgtaatgagctttttcctgaaaatgtctatagtgtgcacttcgaaaaagaacataaagctgagaaagtcccagcagtagccaactacattatgaaaatacacaattttactagcaaatgcctctactgtaatcgctatttacccacagatactctgctcaaccatatgttaattcatggtctgtcttgtccatattgccgttcaactttcaatgatgtggaaaagatggccgcacacatgcggatggttcacattgatgaagagatgggacctaaaacagattctactttgagttttgatttgacattgcagcagggtagtcacactaacatccatctcctggtaactacatacaatctgagggatgccccagctgaatctgttgcttaccatgcccaaaataatcctccagttcctccaaagccacagccaaaggttcaggaaaaggcagatatccctgtaaaaagttcacctcaagctgcagtgccctataaaaaagatgttgggaaaaccctttgtcctctttgcttttcaatcctaaaaggacccatatctgatgcacttgcacatcacttacgagagaggcaccaagttattcagacggttcatccagttgagaaaaagctcacctacaaatgtatccattgccttggtgtgtataccagcaacatgaccgcctcaactatcactctgcatctagttcactgcaggggcgttggaaagacccaaaatggccaggataagacaaatgcaccctctcggcttaatcagtctccaagtctggcacctgtgaagcgcacttacgagcaaatggaatttcccttactgaaaaaacgaaagttagatgatgatagtgattcacccagcttctttgaagagaagcctgaagagcctgttgttttagctttagaccccaagggtcatgaagatgattcctatgaagccaggaaaagctttctaacaaagtatttcaacaaacagccctatcccaccaggagagaaattgagaagctagcagccagtttatggttatggaagagtgacatcgcttcccattttagtaacaaaaggaagaagtgtgtccgtgattgtgaaaagtacaagcctggcgtgttgctggggtttaacatgaaagaattaaataaagtcaagcatgagatggattttgatgctgagtggctatttgaaaatcatgatgagaaggattccagagtcaatgctagtaagactgctgacaaaaagctcaaccttgggaaggaagatgacagttcctcagacagttttgaaaatttggaagaagaatccaatgaaagtggtagcccttttgaccctgtttttgaagttgaacctaaaatctctaacgataacccagaggaacatgtactgaaggtaattcctgaggatgcttcagaatctgaggagaagctagaccaaaaagaggatggttcaaaatacgaaactattcatttgactgaggaaccaaccaaactaatgcacaatgcatctgatagtgaggttgaccaagacgatgttgttgagtggaaagacggtgcttctccatctgagagtgggcctggatcccaacaagtgtcagactttgaggacaatacctgcgaaatgaaaccaggaacctggtctgacgagtcttcccaaagcgaagatgcaaggagcagtaagccagctgccaaaaaaaaggctaccatgcaaggtgacagagagcagttgaaatggaagaatagttcctatggaaaagttgaagggttttggtctaaggaccagtcacagtggaagaatgcatctgagaatgatgagcgcttatctaacccccagattgagtggcagaatagcacaattgacagtgaggatggggaacagtttgacaacatgactgatggagtagctgagcccatgcatggcagcttagccggagttaaactgagcagccaacaggcctaagtgccaggttccctggcgttggtgacatgctgcagcctggaactctgatctccagtgtgactgcaaagctgtcttctcactggtactgccttgtgagtactggttggactgtggggcatgtggccgctgcagttccagtggttatttctaagtctatgacaggacaggctgttcttgcttcagaaccttctctgacagacacggtaactaaatgtgaaaaaccaataagctggtgactcatgaatacacacgaggaaaagcagaggtttattttatctgccttttcaacatttctttccctctgtgaaatgattggtcagatgtctttgagaagtgttaaactaattcacatggtagtgtagggccaacatacaagctaccagtctaatgtgtatagtagactttgggaaaagcgattttttttcatgtattcattctgaatagttgaaatgtatatttgtacagtcttttagacctattcaagtgatgctcatgatcctgttactgtgtgcccatcatagatttctttttttagtgttgcccttgctgtgtaataaacgctctatctagtttacctagcaaaagctcaaaactgcgctagtatggactttttggacagacttagtttttgcacataaccttgtacaatcttgcaacagaggccagccacgtaagatatatatctggactctcttgtattataggatttttcttgttctgaatatccttgacattacagctgtcaaaaacaaaaactggtatttcagatctgttttctgaaatcttttaagctaaaatcacatgcaagaattgactttgcagctactaattttgacaccttttagatctgtataaaagtgtgttgtgttgaagcagcaaaccaatgagtgctgcattttggatatttagttttatctttagttcaacaccatcatggtggattcatttataccatctaatatatgacacactgttgtagtatgtataattttgtgatctttattttccctttgtattcattttaagcatctaaataaattgctgtattgtgcttaa

SEQ ID NO: 378254 - DNA, 4300 bp, Homo sapiens
tgctgggattacaggcgtgagccaccacgcgcggcctaaaatcaatgcattattaagaatatccgggggggatctggaatctgttaactgcctatctgaagtggcattctaattctagtttttgtgtttactttaggactatcggacaaaacctttctgctgcagcgcttgtccattttcctcaaaattcttctctgcctacaaaagtcatttccgcaatgtccatagtgaagactttgaaaataggattctccttaattgcccctactgtaccttcaatgcagacaaaaagactttggaaacacacattaaaatatttcatgctccgaacgccagcgcaccaagtagcagcctcagcactttcaaagataaaaacaaaaatgatggccttaaacctaagcaggctgacagtgtagagcaagctgtttattactgtaagaagtgcacttaccgagatcctctttatgaaatagttaggaagcacatttacagggaacattttcagcatgtggcagcaccttacatagcaaaggcaggagaaaaatcactcaatggggcagtccccttaggctcgaatgcccgagaagagagtagtattcactgcaagcgatgccttttcatgccaaagtcctatgaagctttggtacagcatgtcatcgaagaccatgaacgtataggctatcaggtcactgccatgattgggcacacaaatgtagtggttccccgatccaaacccttgatgctaattgctcccaaacctcaagacaagaagagcatgggactcccaccaaggatcggttcccttgcttctggaaatgtccggtctttaccatcacagcagatggtgaatcgactctcaataccaaagcctaacttaaattctacaggagtcaacatgatgtccagtgttcatctgcagcagaacaactatggagtcaaatctgtaggccagggttacagtgttggtcagtcaatgagactgggtctaggtggcaacgcaccagtttccattcctcaacaatctcagtctgtaaagcagttacttccaagtggaaacggaaggtcttatgggcttgggtcagagcagaggtcccaggcaccagcaagatactccctgcagtctgctaatgcctcttctctctcatcgggccagttaaagtctccttccctctctcagtcacaggcatccagagtgttaggtcagtccagttccaaacctgctgcagctgccacaggccctcccccaggtaacacttcctcaactcaaaagtggaaaatatgtacaatctgtaatgagctttttcctgaaaatgtctatagtgtgcacttcgaaaaagaacataaagctgagaaagtcccagcagtagccaactacattatgaaaatacacaattttactagcaaatgcctctactgtaatcgctatttacccacagatactctgctcaaccatatgttaattcatggtctgtcttgtccatattgccgttcaactttcaatgatgtggaaaagatggccgcacacatgcggatggttcacattgatgaagagatgggacctaaaacagattctactttgagttttgatttgacattgcagcagggtagtcacactaacatccatctcctggtaactacatacaatctgagggatgccccagctgaatctgttgcttaccatgcccaaaataatcctccagttcctccaaagccacagccaaaggttcaggaaaaggcagatatccctgtaaaaagttcacctcaagctgcagtgccctataaaaaagatgttgggaaaaccctttgtcctctttgcttttcaatcctaaaaggacccatatctgatgcacttgcacatcacttacgagagaggcaccaagttattcagacggttcatccagttgagaaaaagctcacctacaaatgtatccattgccttggtgtgtataccagcaacatgaccgcctcaactatcactctgcatctagttcactgcaggggcgttggaaagacccaaaatggccaggataagacaaatgcaccctctcggcttaatcagtctccaagtctggcacctgtgaagcgcacttacgagcaaatggaatttcccttactgaaaaaacgaaagttagatgatgatagtgattcacccagcttctttgaagagaagcctgaagagcctgttgttttagctttagaccccaagggtcatgaagatgattcctatgaagccaggaaaagctttctaacaaagtatttcaacaaacagccctatcccaccaggagagaaattgagaagctagcagccagtttatggttatggaagagtgacatcgcttcccattttagtaacaaaaggaagaagtgtgtccgtgattgtgaaaagtacaagcctggcgtgttgctggggtttaacatgaaagaattaaataaagtcaagcatgagatggattttgatgctgagtggctatttgaaaatcatgatgagaaggattccagagtcaatgctagtaagactgctgacaaaaagctcaaccttgggaaggaagatgacagttcctcagacagttttgaaaatttggaagaagaatccaatgaaagtggtagcccttttgaccctgtttttgaagttgaacctaaaatctctaacgataacccagaggaacatgtactgaaggtaattcctgaggatgcttcagaatctgaggagaagctagaccaaaaagaggatggttcaaaatacgaaactattcatttgactgaggaaccaaccaaactaatgcacaatgcatctgatagtgaggttgaccaagacgatgttgttgagtggaaagacggtgcttctccatctgagagtgggcctggatcccaacaagtgtcagactttgaggacaatacctgcgaaatgaaaccaggaacctggtctgacgagtcttcccaaagcgaagatgcaaggagcagtaagccagctgccaaaaaaaaggctaccatgcaaggtgacagagagcagttgaaatggaagaatagttcctatggaaaagttgaagggttttggtctaaggaccagtcacagtggaagaatgcatctgagaatgatgagcgcttatctaacccccagattgagtggcagaatagcacaattgacagtgaggatggggaacagtttgacaacatgactgatggagtagctgagcccatgcatggcagcttagccggagttaaactgagcagccaacaggcctaagtgccaggttccctggcgttggtgacatgctgcagcctggaactctgatctccagtgtgactgcaaagctgtcttctcactggtactgccttgtgagtactggttggactgtggggcatgtggccgctgcagttccagtggttatttctaagtctatgacaggacaggctgttcttgcttcagaaccttctctgacagacacggtaactaaatgtgaaaaaccaataagctggtgactcatgaatacacacgaggaaaagcagaggtttattttatctgccttttcaacatttctttccctctgtgaaatgattggtcagatgtctttgagaagtgttaaactaattcacatggtagtgtagggccaacatacaagctaccagtctaatgtgtatagtagactttgggaaaagcgattttttttcatgtattcattctgaatagttgaaatgtatatttgtacagtcttttagacctattcaagtgatgctcatgatcctgttactgtgtgcccatcatagatttctttttttagtgttgcccttgctgtgtaataaacgctctatctagtttacctagcaaaagctcaaaactgcgctagtatggactttttggacagacttagtttttgcacataaccttgtacaatcttgcaacagaggccagccacgtaagatatatatctggactctcttgtattataggatttttcttgttctgaatatccttgacattacagctgtcaaaaacaaaaactggtatttcagatctgttttctgaaatcttttaagctaaaatcacatgcaagaattgactttgcagctactaattttgacaccttttagatctgtataaaagtgtgttgtgttgaagcagcaaaccaatgagtgctgcattttggatatttagttttatctttagttcaacaccatcatggtggattcatttataccatctaatatatgacacactgttgtagtatgtataattttgtgatctttattttccctttgtattcattttaagcatctaaataaattgctgtattgtgcttaa

SEQ ID NO: 378255 - DNA, 2576 bp, Homo sapiens
ctgaggtgagaggatcacttgagcccagaaggttgaggctatggtgaatcgtgagtgcactgcagtcaatgaaccatgagtgcactgcactccagcctgcgcgacagagtaagactctgtcttaagaaaaggaaggaaggatggatggatggatatatcaagccatatgcacatgaaagcaggtgtgtgtctgtgtgtgtacacactagctgaggatatctatgcaccttttttgtcagatgggtaggttttatgatcctatcatcagtggaattagtaaatattacaagttgtacgtgttttgactttgacttaaatttttttttccaatagaaactatgttccaacttcctgtcaacaatcttggcagtttaagaaaagcccggaaaactgtgaaaaaaatacttagtgacattgggttggaatactgtaaagaacatatagaagtaagtagcatgtcatttttaaattttaacatgactcagcttctgatccattactttgtgtcagtggccaagatggctaaatcttagatgtgattctgaatttcagccacagcagtagcttcacgaaaacattctcaatagcattaacttgtgcctttctccctaaaatgggctttttcatttttgcatcctgaagcagaaggctaccattgaggacttaagcatgtcaggcgttgaactaggtgccgtaaagttgtctatacatttaatccttagaacaaccatggaggcgggaggcagtgtagcagttcttatctccacttcacagatgaagaacaaataaataggcccagccttgcagctgagaaagtggcagtgtctgtgggactcaaagcctgttctcattctgatacgcctgaatgttctggttgaccttcttctaattgttgaggcgtgcttgtgtgggtgcttgttgtctctttccttaggatttgagcatttgttgccccttttgacccatcatagactattactttcccccttgtataacagtttgggctttatgaactgtttttcaagctgttttattctatgagctttataacagctctgtgggatagccatgcagtggtctccttttcaacatctcactgttccaggtcttatggtttgttggtcagagcccctgattgaaaagaaatgtttgaagctgtttcccccactaacctttaagttctaggtggctagggaacatagctaccttgtttatccatttagccccagcacctagcacagtgttttgcacgtaataggtgatcagtaagtgtttgaatggaattggaagtaaaaaagcaaattcattcatacaacaggttttcttaatttgagttccactaataatacttgaagagtatggcatggaaacagaagctgctcaaaagttgacttctctagtcacgttgttccaagtgtggaagtagcccttctccaaccccagagttcaggtagatctgcccaaatgaaacagtccattcactttgcactctgtggggtcatcttcatagaaataattaataccaacatcacagtacatttctgtcatgcatttgatttgttcctcctatgattatttatgtgtagacttcattttccaccttgaactgtgaactttttaggaacaagtgggattttaccctaagacttttaatcttcctagtctggagggaagtggaccattaaatttttacatgagagtataaatttaacatcatactgcttaactttctttgaatagctttctttctgcctttttgggtttgaaatttgagttttcttcctgatctgatctcctgccccctcccctcgaaaaaaatcttttttttgcacagaaccagaaatcatatttgcagtgctgtaagcaaacattgctattttaaacaccattccagtactgcaactgacgagttagagtacagtactctaatgaaaagtgctttgatattagtgtgtggctgaattttttacttaattagaacttccagcaatttccttggaaacctgactgaccatcaggaaagtggttggttgatataaaatgtagactgcaacttccatatgcctttttatatttaagagccttatcactcctagtttaagtccttgttgacgttggttttcctgtgcctctccccatcttagttaagaggtgagatttacatgtaagattgggttagcgtttataccactatgtttttgtaaacttatttcactgttttctaggattttaaacaatttgaacctaatgacttttatttgaaaaacactacatgggaggatgtaggactgtgggacccatcacttacgaaaaaccaggtaagtggcacaggagacttcctcagatggcagcatgcttggtatactcccttttcagctctaggccttttataacggtgcagtgattgcgggcaagtgccaaacatcgaaagtgtcaaaattgcatttcatattttcctgaccagtgggaagactaagaaaaactttttgtccttttttgtcattggactaaaacttgaggtgtaagaagaaacaaaattttgttacttaaaagttacgaagcctgctgtatcccac

SEQ ID NO: 378256 - DNA, 1735 bp, Homo sapiens
ctgaggtgagaggatcacttgagcccagaaggttgaggctatggtgaatcgtgagtgcactgcagtcaatgaaccatgagtgcactgcactccagcctgcgcgacagagtaagactctgtcttaagaaaaggaaggaaggatggatggatggatatatcaagccatatgcacatgaaagcaggtgtgtgtctgtgtgtgtacacactagctgaggatatctatgcaccttttttgtcagatgggtaggttttatgatcctatcatcagtggaattagtaaatattacaagttgtacgtgttttgactttgacttaaatttttttttccaatagaaactatgttccaacttcctgtcaacaatcttggcagtttaagaaaagcccggaaaactgtgaaaaaaatacttagtgacattgggttggaatactgtaaagaacatatagaagtaagtagcatgtcatttttaaattttaacatgactcagcttctgatccattactttgtgtcagtggccaagatggctaaatcttagatgtgattctgaatttcagccacagcagtagcttcacgaaaacattctcaatagcattaacttgtgcctttctccctaaaatgggctttttcatttttgcatcctgaagcagaaggctaccattgaggacttaagcatgtcaggcgttgaactaggtgccgtaaagttgtctatacatttaatccttagaacaaccatggaggcgggaggcagtgtagcagttcttatctccacttcacagatgaagaacaaataaataggcccagccttgcagctgagaaagtggcagtgtctgtgggactcaaagcctgttctcattctgatacgcctgaatgttctggttgaccttcttctaattgttgaggcgtgcttgtgtgggtgcttgttgtctctttccttaggatttgagcatttgttgccccttttgacccatcatagactattactttcccccttgtataacagtttgggctttatgaactgtttttcaagctgttttattctatgagctttataacagctctgtgggatagccatgcagtggtctccttttcaacatctcactgttccaggtcttatggtttgttggtcagagcccctgattgaaaagaaatgtttgaagctgtttcccccactaacctttaagttctaggtggctagggaacatagctaccttgtttatccatttagccccagcacctagcacagtgttttgcacgtaataggtgatcagtaagtgtttgaatggaattggaagtaaaaaagcaaattcattcatacaacaggttttcttaatttgagttccactaataatacttgaagagtatggcatggaaacagaagctgctcaaaagttgacttctctagtcacgttgttccaagtgtggaagtagcccttctccaaccccagagttcaggtagatctgcccaaatgaaacagtccattcactttgcactctgtggggtcatcttcatagaaataattaataccaacatcacagtacatttctgtcatgcatttgatttgttcctcctatgattatttatgtgtagacttcattttccaccttgaactgtgaactttttaggaacaagtgggattttaccctaagacttgtttcctactctatttgaggtcatcggagaccatcctttatcatggatgggaaaattttcaggtgagctcaagagatcctctgacg

SEQ ID NO: 378257 - DNA, 466 bp, Homo sapiens
attcattatctcagcagccaaccacctttacaaaaatgttgataccagtcttctgtgagcacccaccttcttagggtgtgttgatttccatagattttactcctcttgttatttccataggtgtgagatgcacaatgcgaaacctaggccccagcttttacaccatgatgcgcagggttgtactttttgtactgaactgataggtggcctagtggttatgccctgtactaccattttgaggatctggactccgtttcctgccttgctctttggaccacattgtcaattcacaccggtgggtatattcattttggagggtgggaactgcagcaacagggaagccagagacttccttctccttggtcaccaccaaaaccaacacttccaaaatttcagcctagccacattcctcaaggaaccggttagagctggttgcagtagtgggttctgaacacttattaacata

SEQ ID NO: 378258 - DNA, 4710 bp, Homo sapiens
cggccgcggcgcgagccggagtccgccgagccggagcgcgacgaggccccgggcgcgccctccccgctgccgccaccgccgtgccgccgccatccgcccgccgccgccgccgctgtccggcccccgagcacgccggccccgcgcgcgcctcgaggccgagtcaaggtgtgagatgcacaatgcgaaacctaggccccagcttttacaccatgatgcgcagggttgtactttttgtactgaactgataggtggcctagtggttatgccctgtactaccattttgaggatctggactccgtttcctgccttgctctttggaccacattgtcaattcacaccgaaactatgttccaacttcctgtcaacaatcttggcagtttaagaaaagcccggaaaactgtgaaaaaaatacttagtgacattgggttggaatactgtaaagaacatatagaagattttaaacaatttgaacctaatgacttttatttgaaaaacactacatgggaggatgtaggactgtgggacccatcacttacgaaaaaccaggactatcggacaaaacctttctgctgcagcgcttgtccattttcctcaaaattcttctctgcctacaaaagtcatttccgcaatgtccatagtgaagactttgaaaataggattctccttaattgcccctactgtaccttcaatgcagacaaaaagactttggaaacacacattaaaatatttcatgctccgaacgccagcgcaccaagtagcagcctcagcactttcaaagataaaaacaaaaatgatggccttaaacctaagcaggctgacagtgtagagcaagctgtttattactgtaagaagtgcacttaccgagatcctctttatgaaatagttaggaagcacatttacagggaacattttcagcatgtggcagcaccttacatagcaaaggcaggagaaaaatcactcaatggggcagtccccttaggctcgaatgcccgagaagagagtagtattcactgcaagcgatgccttttcatgccaaagtcctatgaagctttggtacagcatgtcatcgaagaccatgaacgtataggctatcaggtcactgccatgattgggcacacaaatgtagtggttccccgatccaaacccttgatgctaattgctcccaaacctcaagacaagaagagcatgggactcccaccaaggatcggttcccttgcttctggaaatgtccggtctttaccatcacagcagatggtgaatcgactctcaataccaaagcctaacttaaattctacaggagtcaacatgatgtccagtgttcatctgcagcagaacaactatggagtcaaatctgtaggccagggttacagtgttggtcagtcaatgagactgggtctaggtggcaacgcaccagtttccattcctcaacaatctcagtctgtaaagcagttacttccaagtggaaacggaaggtcttatgggcttgggtcagagcagaggtcccaggcaccagcaagatactccctgcagtctgctaatgcctcttctctctcatcgggccagttaaagtctccttccctctctcagtcacaggcatccagagtgttaggtcagtccagttccaaacctgctgcagctgccacaggccctcccccaggtaacacttcctcaactcaaaagtggaaaatatgtacaatctgtaatgagctttttcctgaaaatgtctatagtgtgcacttcgaaaaagaacataaagctgagaaagtcccagcagtagccaactacattatgaaaatacacaattttactagcaaatgcctctactgtaatcgctatttacccacagatactctgctcaaccatatgttaattcatggtctgtcttgtccatattgccgttcaactttcaatgatgtggaaaagatggccgcacacatgcggatggttcacattgatgaagagatgggacctaaaacagattctactttgagttttgatttgacattgcagcagggtagtcacactaacatccatctcctggtaactacatacaatctgagggatgccccagctgaatctgttgcttaccatgcccaaaataatcctccagttcctccaaagccacagccaaaggttcaggaaaaggcagatatccctgtaaaaagttcacctcaagctgcagtgccctataaaaaagatgttgggaaaaccctttgtcctctttgcttttcaatcctaaaaggacccatatctgatgcacttgcacatcacttacgagagaggcaccaagttattcagacggttcatccagttgagaaaaagctcacctacaaatgtatccattgccttggtgtgtataccagcaacatgaccgcctcaactatcactctgcatctagttcactgcaggggcgttggaaagacccaaaatggccaggataagacaaatgcaccctctcggcttaatcagtctccaagtctggcacctgtgaagcgcacttacgagcaaatggaatttcccttactgaaaaaacgaaagttagatgatgatagtgattcacccagcttctttgaagagaagcctgaagagcctgttgttttagctttagaccccaagggtcatgaagatgattcctatgaagccaggaaaagctttctaacaaagtatttcaacaaacagccctatcccaccaggagagaaattgagaagctagcagccagtttatggttatggaagagtgacatcgcttcccattttagtaacaaaaggaagaagtgtgtccgtgattgtgaaaagtacaagcctggcgtgttgctggggtttaacatgaaagaattaaataaagtcaagcatgagatggattttgatgctgagtggctatttgaaaatcatgatgagaaggattccagagtcaatgctagtaagactgctgacaaaaagctcaaccttgggaaggaagatgacagttcctcagacagttttgaaaatttggaagaagaatccaatgaaagtggtagcccttttgaccctgtttttgaagttgaacctaaaatctctaacgataacccagaggaacatgtactgaaggtaattcctgaggatgcttcagaatctgaggagaagctagaccaaaaagaggatggttcaaaatacgaaactattcatttgactgaggaaccaaccaaactaatgcacaatgcatctgatagtgaggttgaccaagacgatgttgttgagtggaaagacggtgcttctccatctgagagtgggcctggatcccaacaagtgtcagactttgaggacaatacctgcgaaatgaaaccaggaacctggtctgacgagtcttcccaaagcgaagatgcaaggagcagtaagccagctgccaaaaaaaaggctaccatgcaaggtgacagagagcagttgaaatggaagaatagttcctatggaaaagttgaagggttttggtctaaggaccagtcacagtggaagaatgcatctgagaatgatgagcgcttatctaacccccagattgagtggcagaatagcacaattgacagtgaggatggggaacagtttgacaacatgactgatggagtagctgagcccatgcatggcagcttagccggagttaaactgagcagccaacaggcctaagtgccaggttccctggcgttggtgacatgctgcagcctggaactctgatctccagtgtgactgcaaagctgtcttctcactggtactgccttgtgagtactggttggactgtggggcatgtggccgctgcagttccagtggttatttctaagtctatgacaggacaggctgttcttgcttcagaaccttctctgacagacacggtaactaaatgtgaaaaaccaataagctggtgactcatgaatacacacgaggaaaagcagaggtttattttatctgccttttcaacatttctttccctctgtgaaatgattggtcagatgtctttgagaagtgttaaactaattcacatggtagtgtagggccaacatacaagctaccagtctaatgtgtatagtagactttgggaaaagcgattttttttcatgtattcattctgaatagttgaaatgtatatttgtacagtcttttagacctattcaagtgatgctcatgatcctgttactgtgtgcccatcatagatttctttttttagtgttgcccttgctgtgtaataaacgctctatctagtttacctagcaaaagctcaaaactgcgctagtatggactttttggacagacttagtttttgcacataaccttgtacaatcttgcaacagaggccagccacgtaagatatatatctggactctcttgtattataggatttttcttgttctgaatatccttgacattacagctgtcaaaaacaaaaactggtatttcagatctgttttctgaaatcttttaagctaaaatcacatgcaagaattgactttgcagctactaattttgacaccttttagatctgtataaaagtgtgttgtgttgaagcagcaaaccaatgagtgctgcattttggatatttagttttatctttagttcaacaccatcatggtggattcatttataccatctaatatatgacacactgttgtagtatgtataattttgtgatctttattttccctttgtattcattttaagcatctaaataaattgctgtattgtgcttaa

SEQ ID NO: 378259 - DNA, 4535 bp, Homo sapiens
cggccgcggcgcgagccggagtccgccgagccggagcgcgacgaggccccgggcgcgccctccccgctgccgccaccgccgtgccgccgccatccgcccgccgccgccgccgctgtccggcccccgagcacgccggccccgcgcgcgcctcgaggccgagtcaagaaactatgttccaacttcctgtcaacaatcttggcagtttaagaaaagcccggaaaactgtgaaaaaaatacttagtgacattgggttggaatactgtaaagaacatatagaagattttaaacaatttgaacctaatgacttttatttgaaaaacactacatgggaggatgtaggactgtgggacccatcacttacgaaaaaccaggactatcggacaaaacctttctgctgcagcgcttgtccattttcctcaaaattcttctctgcctacaaaagtcatttccgcaatgtccatagtgaagactttgaaaataggattctccttaattgcccctactgtaccttcaatgcagacaaaaagactttggaaacacacattaaaatatttcatgctccgaacgccagcgcaccaagtagcagcctcagcactttcaaagataaaaacaaaaatgatggccttaaacctaagcaggctgacagtgtagagcaagctgtttattactgtaagaagtgcacttaccgagatcctctttatgaaatagttaggaagcacatttacagggaacattttcagcatgtggcagcaccttacatagcaaaggcaggagaaaaatcactcaatggggcagtccccttaggctcgaatgcccgagaagagagtagtattcactgcaagcgatgccttttcatgccaaagtcctatgaagctttggtacagcatgtcatcgaagaccatgaacgtataggctatcaggtcactgccatgattgggcacacaaatgtagtggttccccgatccaaacccttgatgctaattgctcccaaacctcaagacaagaagagcatgggactcccaccaaggatcggttcccttgcttctggaaatgtccggtctttaccatcacagcagatggtgaatcgactctcaataccaaagcctaacttaaattctacaggagtcaacatgatgtccagtgttcatctgcagcagaacaactatggagtcaaatctgtaggccagggttacagtgttggtcagtcaatgagactgggtctaggtggcaacgcaccagtttccattcctcaacaatctcagtctgtaaagcagttacttccaagtggaaacggaaggtcttatgggcttgggtcagagcagaggtcccaggcaccagcaagatactccctgcagtctgctaatgcctcttctctctcatcgggccagttaaagtctccttccctctctcagtcacaggcatccagagtgttaggtcagtccagttccaaacctgctgcagctgccacaggccctcccccaggtaacacttcctcaactcaaaagtggaaaatatgtacaatctgtaatgagctttttcctgaaaatgtctatagtgtgcacttcgaaaaagaacataaagctgagaaagtcccagcagtagccaactacattatgaaaatacacaattttactagcaaatgcctctactgtaatcgctatttacccacagatactctgctcaaccatatgttaattcatggtctgtcttgtccatattgccgttcaactttcaatgatgtggaaaagatggccgcacacatgcggatggttcacattgatgaagagatgggacctaaaacagattctactttgagttttgatttgacattgcagcagggtagtcacactaacatccatctcctggtaactacatacaatctgagggatgccccagctgaatctgttgcttaccatgcccaaaataatcctccagttcctccaaagccacagccaaaggttcaggaaaaggcagatatccctgtaaaaagttcacctcaagctgcagtgccctataaaaaagatgttgggaaaaccctttgtcctctttgcttttcaatcctaaaaggacccatatctgatgcacttgcacatcacttacgagagaggcaccaagttattcagacggttcatccagttgagaaaaagctcacctacaaatgtatccattgccttggtgtgtataccagcaacatgaccgcctcaactatcactctgcatctagttcactgcaggggcgttggaaagacccaaaatggccaggataagacaaatgcaccctctcggcttaatcagtctccaagtctggcacctgtgaagcgcacttacgagcaaatggaatttcccttactgaaaaaacgaaagttagatgatgatagtgattcacccagcttctttgaagagaagcctgaagagcctgttgttttagctttagaccccaagggtcatgaagatgattcctatgaagccaggaaaagctttctaacaaagtatttcaacaaacagccctatcccaccaggagagaaattgagaagctagcagccagtttatggttatggaagagtgacatcgcttcccattttagtaacaaaaggaagaagtgtgtccgtgattgtgaaaagtacaagcctggcgtgttgctggggtttaacatgaaagaattaaataaagtcaagcatgagatggattttgatgctgagtggctatttgaaaatcatgatgagaaggattccagagtcaatgctagtaagactgctgacaaaaagctcaaccttgggaaggaagatgacagttcctcagacagttttgaaaatttggaagaagaatccaatgaaagtggtagcccttttgaccctgtttttgaagttgaacctaaaatctctaacgataacccagaggaacatgtactgaaggtaattcctgaggatgcttcagaatctgaggagaagctagaccaaaaagaggatggttcaaaatacgaaactattcatttgactgaggaaccaaccaaactaatgcacaatgcatctgatagtgaggttgaccaagacgatgttgttgagtggaaagacggtgcttctccatctgagagtgggcctggatcccaacaagtgtcagactttgaggacaatacctgcgaaatgaaaccaggaacctggtctgacgagtcttcccaaagcgaagatgcaaggagcagtaagccagctgccaaaaaaaaggctaccatgcaaggtgacagagagcagttgaaatggaagaatagttcctatggaaaagttgaagggttttggtctaaggaccagtcacagtggaagaatgcatctgagaatgatgagcgcttatctaacccccagattgagtggcagaatagcacaattgacagtgaggatggggaacagtttgacaacatgactgatggagtagctgagcccatgcatggcagcttagccggagttaaactgagcagccaacaggcctaagtgccaggttccctggcgttggtgacatgctgcagcctggaactctgatctccagtgtgactgcaaagctgtcttctcactggtactgccttgtgagtactggttggactgtggggcatgtggccgctgcagttccagtggttatttctaagtctatgacaggacaggctgttcttgcttcagaaccttctctgacagacacggtaactaaatgtgaaaaaccaataagctggtgactcatgaatacacacgaggaaaagcagaggtttattttatctgccttttcaacatttctttccctctgtgaaatgattggtcagatgtctttgagaagtgttaaactaattcacatggtagtgtagggccaacatacaagctaccagtctaatgtgtatagtagactttgggaaaagcgattttttttcatgtattcattctgaatagttgaaatgtatatttgtacagtcttttagacctattcaagtgatgctcatgatcctgttactgtgtgcccatcatagatttctttttttagtgttgcccttgctgtgtaataaacgctctatctagtttacctagcaaaagctcaaaactgcgctagtatggactttttggacagacttagtttttgcacataaccttgtacaatcttgcaacagaggccagccacgtaagatatatatctggactctcttgtattataggatttttcttgttctgaatatccttgacattacagctgtcaaaaacaaaaactggtatttcagatctgttttctgaaatcttttaagctaaaatcacatgcaagaattgactttgcagctactaattttgacaccttttagatctgtataaaagtgtgttgtgttgaagcagcaaaccaatgagtgctgcattttggatatttagttttatctttagttcaacaccatcatggtggattcatttataccatctaatatatgacacactgttgtagtatgtataattttgtgatctttattttccctttgtattcattttaagcatctaaataaattgctgtattgtgcttaa
